United States Patent Application Publication US 2013/0332133 A1 - sequence listing, part 40

SEQ ID NO: 271521 - DNA, 694 bp, Unknown
  Bacterial polypeptide expressing nucleotide sequence isolated from the Sargasso Sea
gtttggtgattttcaggttttaaaagatgtcaatctagaagtagaaaaaaataaaaaaattgttgtttgtggaccctcaggctcagggaaatctactttaattagatgtataaatagattggaggagcatcaaaaaggatcaattgtagttgatggaaccgagctaactgaagaaacaaaaaatatagaacaaataagagctgaagttggaatggtatttcaacaatttaatttatttcctcacttatcaatattagataattgcactttagccccgatatgggtaaaaaaaatgccaaagaaggaagctgaagatttagctttacgtcaactaaaacaagttcaaattgatgatcaagcatataaatatcctggtcagttatcagggggacagcaacaaagatgtgcaattgcaagagctttatgcatggaaccaaaaattatgctttttgatgaacctacatcagcactagatcctgaaatgattaaagaagtattggatgccatggtaaatcttgcaaaagcaggcatgacaatgattgtagtaactcatgaaatgggttttgccaaagaagttgcagatgaagttatatttatggatgaaggtatgatagttgaaaaagctaatacaaaagagttttttgccaatcccaaaagtgacagaactaagctatttttgagccaaattctttag

SEQ ID NO: 271522 - DNA, 1081 bp, Unknown
  Bacterial polypeptide expressing nucleotide sequence isolated from the Sargasso Sea
aatgaagcacagtttcgaacggctgcggctcgatggcgtgtgccgcagcttcaccaatgcgcaaggcgcgcaggtcgccgcgctggacgggctcgatctcgagatccggcgcggcgaattcatcgcgctgctcggcccgtcgggctgtggcaagtcgaccgcgctcaactgcatcgcggggctgcagccgctcacgcgcggcggcatctggctcgacgacacgcgcatcgacgtgctgccgcccgagcgccgcggcttcgggatggtgttccagaactacgcgctgtttccgcacatgtcggtgctcgacaacgtcggcttcggcctcaagatgcgcggcgtgccgaagcaggaaacgcggcggcgcgcgcagcaggcgctcgaactcgtgcagctcgtcggccacgagggcaagctgcccgggcagctgtcgggcgggcagcagcagcgcgtcgcgattgcgcgcgcgatcgtgatcgagccgccgctcgtgctgatggacgaaccgctgtcgaacctcgacacgaagctgcgcatcgagatgcgcgccgagatccgccgcatccacacgcagctcgaacgcgcgacgatctacgtgacgcacgaccaggacgaggcgctgtcgatggccgaccgcatcgtcgtgatgaaggagggcgtcgtgcagcaggtcgcgacgccgaaggacgtctacacgcgcccgcacaacctgcatgtcgcgcgtttcatgggctatcgcaacgtgctgccgttcacgctcgaagggatggccggcgattatgtgaacgtggcggccggtggcgttcgcgtcaccggcgtgccgatggccggcttcgacgcgaaagaggtcatggtcgcgctgcgacccgacgacatcgagcgcgcggacgagggcggcgacaacacgttcgacgcgacggtcgaaacggtcgagtacggcggccgcgattcgctgatccgcgcggtcacgccgttcggcccgatctgggcgcgcgtggccggcgaattcacggagggcgagccgctgcggctgcgcgtcgcgccgtcgcgcacgctcgtctacccgggagcgccgacatga

SEQ ID NO: 271523 - DNA, 742 bp, Unknown
  Bacterial polypeptide expressing nucleotide sequence isolated from the Sargasso Sea
tatgtcaaaaaaagaagatttcgtaaaatttgataaagtcgacaaaagttacgatggaaaagtattagtagttaaagatttgaatttagacatcgaagaaggtgaattcgtaacaatgcttggaccctctggttctggaaaaaccacatgcttgatgatgcttgctggttttgaaaccccaactaatggagaaatttatttagataaaaatccaatttcaaatattcctccacacaaaagaggtattggaatggtttttcaaaattatgctttgtttcctcatatgacagtttttgaaaatttggctttccctttaagagtaagaaaaatttcaaaagatgatatagataaaaaagttgaaaaggcattatctatggtttcattgtcaggatttggaaaccgtatgccaggacaactttcaggaggtcaacaacagagagtagccgtagcaagagcattggtatttgatccatcagtagttttaatggacgaacctttgggtgctttagataaaaatttaagagaaagtatgcagtacgaaattaaacatattcatgaaagcattggtgtaaccgttgtctatgttacacacgaccaaggtgaagcattaactatgtcaaacagaatagcagtatttaacgatggtaaagttcaacaactctcgagtccagataagttatacgaagaacctgtaaattctttcgttgcagagtttattggagagaataatacttttgctgga

SEQ ID NO: 271524 - DNA, 1099 bp, Unknown
  Bacterial polypeptide expressing nucleotide sequence isolated from the Sargasso Sea
aatgagcgcagatgtagagttaagtgatgtttcagtaacatttggcagtttttatgctgccaagaatgtcaacgtaaaagtaaatggaggtgagttcttcagcttcttaggaccttcaggctgtggaaagactactctgttaagggctatatctggatttcaagaaccttctgaaggtaaagtgcttattgacaataaagatatgtctggaattggtccaaataaaagaccaaccgcgttaatatttcaaaacttagctctgtttcctctcatgagtgtatcagaaaatattgcattttcccttgaagtaaggggcgtatcaaaagaagaaagaaaaaaaagagcggatgaacttttggaattgatagccttagagggacaaggagataaaaaagttcatcaactctctggaggtcaaaaacaaagagtagccattgcaagagctttagctgttgagccaaaagttcttcttttagatgaaccattgtctgccttggatttaaaacttcgtcaaagaatgagaaccgaacttagagaaatacaaaaaagagtaaacattacatttatttatattacgcacgatcaaggagaagccctaacaatgtctgatcgaatagcggtcatgaatgaaggagagcttgagcaaattggaaaatgcgacgaagtttataacaatccattaacaccatttgttgcaacattcgttggtgagaataatcctttatatggaaaagttacaggtattgagggagataaagctaaaattgaaactgctgatgggcaatatttagcaacgatgaatgaaagcaaaaagttaaatattggagatgagtcaattgcatttgttagacctgagtctttgtttataccaagagatggcgacaactttgataataaaattgatgtgaatattgaaagttttgaatttgaaggtaatttaaaaaatttttacgcaagccttaaatcgggagcaaaaattaaattttcagtaccaaacgccatagatacatcctctataacttcaggatcgtcaatcgtactaggttttgaatcttcaaaatcagtaatattacctaaagcatctctagctatagattaa

SEQ ID NO: 271525 - DNA, 964 bp, Unknown
  Bacterial polypeptide expressing nucleotide sequence isolated from the Sargasso Sea
atgaattcagaaaaagaaaaaacctttgtaaagtttgagaaaattgacaaaagttatgatggtgaagtgctcgtagttaaaaacttgaatttagatattgccaaaggtgaatttgtaacaatgctaggcccttcaggctcaggtaaaacgacaacacttatgatgcttgctggttttgaaactcctactaatggagaaatctatcttgatggaatgccaattagcaaaattcctccttatgaaagagaaattggtatggtttttcaaaattatgctctcttccctcatatgaccgttcaagaaaatttagcttttccacttgaagttagaaaaatgtcaaaagcagaaacaaaagaaaaagttcaaaaagctcttgatatggttgagcttggtgaatttggaacgcgttttcctgcacaactatcaggaggacaacaacaaagagttgcgcttgcaagagcactagtatttgaaccaaggcttgtcttaatggatgaaccgcttggtgcgttagataaaaatcttagagagcaaatgcaatatgagattaaacatatacatgacagaataggtattactgttgtctatgtaacacatgatcaaagtgaggctctaacaatgtcaaatagaattgctgttttcaatgatggtgtagtgcagcaattatcaacaccagatatattatatgaaaaaccagaaaattcctttgttgcacagtttattggtgagaataatagaatgactggcacaataaaaagtatggaaaataattattgttctgtcgaacttgaaaatggtgccggtactgtgaatgctttaaaagttaatgtaggcaatgttggagaaaaaactcaactatccgtaagaccagaaagagtatctttaggttctgaaggaaatggagaaaatgttttcactggcaaggttgaggaacttatttatttaggtgatcatataagggtta

SEQ ID NO: 271526 - DNA, 805 bp, Unknown
  Bacterial polypeptide expressing nucleotide sequence isolated from the Sargasso Sea
catgaacctatccgacagcacgccgcccgtagcgttgaaggcgagcggcatagtcaagtggttcggcgcgaaccgcatcctcgacggcgtcgatctgaccgtagcgcgcggcgaaacggtctgcgtacttggtccgtcgggctccggaaaatcgacgctgttgcgctgcctgaactggctttcgccgcccgacgaaggcgccatctggatcggcgaccagcggatcggcttgcgcgagaacccgaacggcgcgacgagcccgcggcctgagcgcgagatacgggcgcagcgcagccgcatcggcatggtgtttcagagtttcaatctgtggccgcatatgacggtgctcgaaaacgtgatggaagggctgctgtcggtcaaacggatgaaccgtctcgccgccgctgacctcgccgtcgaagcgctgagccaggttgggctgggcggcaagcacacgtcgatgcccgcgaacctctcgggcggccaacagcagcgtgtcggcattgcccgcaccctcgcgatggcgccggaagtcatcctgttcgacgaaccgaccagcgcgctcgatcccgaattggtcggcgaagtgctgacggtgatgcgcggactcgctgcgaacgatacgacgatgattgtcgtcacgcatgaaatcggctttgcgcgcgatgtcgcggaccgcgtggtcttcatggacggcggacgcatcgtcgaacaaggtccgcccgcgcaggtactcgacacaccctcgtcgccacgactccagcaatttctctatcgctttactccggaaaaatcacgctcatga

SEQ ID NO: 271527 - DNA, 1864 bp, Unknown
  Bacterial polypeptide expressing nucleotide sequence isolated from the Sargasso Sea
gttggataaaaatatttactcaagactacttaagtacacctttagacacaaaggtttattttcactaagtattattggtttttttatatttgcagcagcagatatatcagctgttgaatggcttaaaagagttataagctacataaataattcaaatcaatcagaacttcttagtccaatctcgttagcactatttcttttagtggtttctgtacttagaggtataggtttttatatgggtaatttcttcatggctaatgttggtttaaaagtagttcataatctgagagaagaattgatcagctctctaatttatcagcctatgagtttttttgatctggcccccaaaggtgagattgtaaacagaatcatatttacaacaaaccaaattactggggcagcaacaaatgctctaaaaattttagctaaagagggattattgcttattggactatttgtatatcttttatatttaagctggaaacttacagttgttgtacttgtaataacgcccttaatagcagttgttgtaagttttgcaggaaaaagaatgagaagagtagctagaaaaattcaagaaattatgggcttagtaactcaagtaagtaatgaaattgcaacaggcgcaagggaaattaaatcatttaataatgaagatggtgaaaaagatagatttaaaagggcaaacgatgagaatttaaaacaaaacctgaagatggaaagtacactgaatttatctaccccgcttattcaagttttcgttgcattctcattagctcttatgagttatcttgcattatcgaacttagatgaattaaatttaccatctgaatcatttgtagctttttttactgcagcaggtttaatggctaggcctataaggcaattgtcgaatttaaacgctgtaatacagagaggactagctgctgcagaagatattttcaatactattgatagctatccagaggatcatgaatctggcattaagcttcaacaaacacttgaaggaaatgtagaaatcgaaaacgtttcattttcttatctcgagcactctgatccagttctaaaagagatatcaatatctgcaaaaaaaggtgaaacaattgctcttgtagggagatctggaagtggaaaatctactatagtgaatcttctaaataggttttatgactcctttgaagggaaaattacgattgatggttatgacatcaggaagattaaccttaaagacttaagggaagtaatttcttatgtttctcaggatcctgttctttttaatgacaccataagaaataacatcacctatggtttaaaggaagtaacagaaaaggcaatttatgaggctgcgaaggatgctaacgcttacgagtttataacaaatcttccagatggttttgacacaattattggcgatgatggtgttttactttctggtggagaaaaacaaagggttgcaattgctagagcacttcttaaaaaatcttctattttaatttttgatgaagcaacttctgcactagacaatgaatctgaaaaggctattcagacagctattgaaaaggcatctaaagataaaaccactttcattattgcgcatcggctaagcagcgttgagaaagctgacaagatatgtgtaattgaagatggaagaataactcaaatgggtaaacatgatgagctcatggaacaacaagggctttacaacaagcttcaagggaaggggcaagaaaaaatagaaaaagaaactcctaaaatagaaaaagtgttaccagaaatctatgttgaaaaattaggattttgggataggtttggcatattaaacatattgttaatgccaattagcctcgtatattggctttcaata

SEQ ID NO: 271528 - DNA, 736 bp, Unknown
  Bacterial polypeptide expressing nucleotide sequence isolated from the Sargasso Sea
tatggagacttgtgttagcttgggcgatctaaacaaatggtttggatcttttcaggttcttgattcgattaatttgagtatttcaactggagaaaaagtggtgatttgcgggccgtcaggttcaggaaaatcaacactgattcggtgtgtcaatgcacttgagccttttcagtctggttctgtcaatgtttgtggaatcagtgttgaaaaaaacggaagaaatgctacagatattcagcgaagagtcggaatggtatttcagcaattcaatctcttcccacatttaagtgttttgaaaaactgtactcttgccccttgccgtgtacttggattatccgatgatgaagctgaatcaaaggctatgcattatcttgagcgtgttcgtatcccggaacaggcatcaaaatatccggcagacctctcaggcggacagcaacaacgggttgctattgcccgtgctttgaccatggaacctgaattgatgctgtttgatgaacccacatctgctcttgaccctgaggttgtaactgaagtattagatacgatggttgatcttgcagaaactggcatgacaatgatctgtgtgacccatgaaatgggttttgctaaacaagtggctgatagggtagtttttatggatgaaggaaaaataattgagattgccacccctgaaaagtttttttcagagccaactcatgaacgtacaaagttttttctcagcagagttttgggttag

SEQ ID NO: 271529 - DNA, 964 bp, Unknown
  Bacterial polypeptide expressing nucleotide sequence isolated from the Sargasso Sea
gatgtgtaaatccacaatgcttagaatgattgcaggtcttgaagatattactcagggaacaatttctattgatggtcaagttgtaaatgacttgccacctaagcaaagaaatatagcaatggtttttcaatcttatgctttatatccacacatgacagtttttgataatatggcttttggattaaaacttgaaaaaagatcaaaagatgaaattaacgaaagagtgaatgaagcagctagaatacttcaaatagaagattatcttcaaagaaagccaaaacaactttcaggtggtcagagacaacgtgttgctattggaagagcaattacaagaaagccaaaagttttcttatttgatgagccactttctaaccttgatgctgcattaagggttcaaatgagagttgaattagcaaaacttcataatgaactagaagcaacaatgatatacgttacacacgatcaaacagaagcaatgactctggctgatgatattgtagtacttgatacaggcattgtttcgcaaaaaggatcgccactagaactttatgataaaccaaataatatgttcgtaggtggatttattggatcaccaaaaatgaattttatttcaagtaagatattaagcaaaagttctgattctacagaagttgatattatgggaatgtcaaaaatatcaatctctaaaatgtcagcatcatcctctgagggtgattcagtaaccttaggtatcagacctgaacacttagtagtaaatggtaatgcagatggaacttgggaaagcaaagtatttgttgttgaaaaacttggtgacgtttcttatctataccttgaaaaagatggagaaccattagttgctgaaactgaaggacattcagagattaaagttggtgatactgtaaaagttggcttcccttctggaagatgccaattatttgatagttcaggccaagcatttaaataa

SEQ ID NO: 271530 - DNA, 1060 bp, Unknown
  Bacterial polypeptide expressing nucleotide sequence isolated from the Sargasso Sea
tatgagtacagttgaattaaagggtatagaaaaaagttttggaacaaacaaagttattaataaatttgatattaaaatcgaacacggtgaatttatagttttggttggaccttcaggatgtggaaaatccacactcttgagaatgatctcaggactagagtcggttgatgttggaaaaatatttttagatgaaaagttaataaataatttaattccttctaaaagagagatagcaatggtttttcaatcctacgctctttatccgcatatgaatgtttatgagaacatgtctttcggtttaaaaacagaaaaattagataaaaaagagatagataaaaaggttttagctgcagcaaaaactttgcagatagaggatcttcttgacaggaagccaagacagttgtctggaggtcaaagacaaagggtagcaattggtagagcaattacaagaaacccaaaacttttcctatttgatgaacctttatcaaacctagatgcagctttaagatctgaaatgcgtgtagaaatttcaaaacttcataaaaaattaaacacaaatatgatttatgtaactcatgaccaggtagaagctatgactttagctgataaaatagttattttaaacaaaggtattatggaacagtatggaacaccagatgaaatttacaacaaccctaacaatatttttgtagctgaatttataggttcacccaaaatgaatattttaaaaattcctaaagaaaaaattaaaaatggtaacacaataaatatttttaagaatgacacacagtttaatggctataaatttcttgatgatatatatcttgggataagacctgaacatattatagctgacaattcagaagaaataaaagtaaaaataaaagccgatctaattgaaaatcttggttttgagaagattatttatacctcaatagatggaagtgaatttagaattaaaacttcaaaaaatatcgaaaataatatttcacaaatttctttttcaaaagacaacgtttatttttttgataaagaaaaaataagaattaaaaaaagttaa

SEQ ID NO: 271531 - DNA, 1060 bp, Unknown
  Bacterial polypeptide expressing nucleotide sequence isolated from the Sargasso Sea
atggctaccatagaattaaaaaatatcgaaaaatccttcgggagcaataaagtaataaataaatttaatataaagataaatcacggcgagtttattgttctggtaggtccatcaggatgcggaaagtcaactcttctaagaatgatttctggcttagagtcagttgatgagggtgaaatacatttagataaaaaaataataaataatttaattccatcaaaaagaggaattgctatggtttttcaatcatacgccttgtatccacacatgaatgtttacgaaaacatgtctttcggtttgaaaaatgaaaaaattgataaaaatgaaatagataaaaaggtaaaagatgctgcaaaaacacttcaaattgaaaatcttcttgagagaaaaccaagacaactttctggcgggcaaagacaaagagtggcaataggtcgagcaataacaagaaacccaaaattatttctttttgacgaacctctttcaaatcttgatgctgctttaagatcggaaatgcgtgttgaaatttcaaaacttcataaaaaacttagtatgaatatgatttatgtgacacacgatcaagtagaggccatgactttagctgataaaattgtaattttaaaccaaggtgtaacggagcagtatggaactcctgatgagatttataataatcctaacaatatctttgtagcagagtttattggctcaccaaaaatgaatattttcaagattgataaagaaaaaataaaaaatcaaaattcagtcaatattttcaataataatataaaatttgataattataaattcttaaatgatgtttacatgggtattagaccagagcatattagggtagacgactctggagatataaaatttaatataaaaattgatcttatagagaaccttggttttgaaaaaataatatatgcttcattagatgggaatgaatttagaatcaaaacttcaaaaaatataagtaaaaatcattcacaaatatcgtttttaaaagaaaatatttatttttttgatataaataaaaaaagaatttatggaaattaaa

SEQ ID NO: 271532 - DNA, 1102 bp, Unknown
  Bacterial polypeptide expressing nucleotide sequence isolated from the Sargasso Sea
ttggccaaagactcacaagcagaagcttttgtacagttcaatcgtgtgcaaaaaagttatgatggcgaaacgctggtagtaaaagatctaaaccttgaaatcccaaaaggtgagtttttaacgatgctgggcccatctggttcgggcaaaaccacctgtttgatgatgttagctggttttgaaacagcaacacatggcgacattaagttaaatggtgtttcaatcaataacataccgccgcacaaacgcggaatcgggatggtatttcaaaattacgcgctttttccacacatgacagtggcagaaaacttatccttccccttggaagttagaaagcttgagaagtcggttcgtgaagaaaaggttgcgagagcacttgatatggttgaaatgggcgggtttaaggggcgacgtccagcacagttgtctgggggtcaacaacagcgcattgccctggcacgcgcgctcgtgttcgaacctgaattagttttgatggatgagccgcttggtgctttggataaacaacttcgtgaaaaaatgcagttcgaaataacggcacttgcacatcgtttgggaataacagtcgtttatgtcactcatgatcagacagaagccctgacaatgtcagaccgagtagcagtgtttaacgatggccgtattcagcagttagctactccagaccagttgtatgaagaaccggaaaacagttttgtagcacaatttatcggcgagaataatactctgaacggggttgtcaaagaattgaagagtgatattgcaacagtcaaactggatagtggtgatattattgactgtaaacccgttaatgtttccgaagtcggcgagcgaactcaagtttccataagaccagaaagggtagagcttgataaaagtaagcttccaaaaaaagcgcatactctgacggctgaagttttggaatttatttatatgggtgatacttttcgtaccagacttaaggtagctggtaacgaagacttcattgtaaaaacaagaaattcgtctaatcaagtgcggctgaagcctggagaaaaggttgagataggttggtcgcccgagtgttgtcgtgctttggatgcatgaa

SEQ ID NO: 271533 - DNA, 615 bp, Unknown
  Bacterial polypeptide expressing nucleotide sequence isolated from the Sargasso Sea
gtaaatcaactatgatcagatgtattaatagacttgaagaacatcaagaaggtacaattgtagttgatggtattgaattaactggaaaccttaaaaatattgacagtgtaagaagagaagtaggaatggtattccaacaatttaatctttttcctcatttatctgtaaaagaaaacattactttagctcccatatgggtaaagaaaatgccaaaagctgaagctgaagagttggccatgaaacaattagaaatagttaaaataccagaacaagccaataaatatcctggtcaactttctggtggtcaacaacaaagagtagctattgcaagatctttagcaatgaatcctaatattatgctttttgatgaaccaacatcagctcttgatcctgagatgattaaagaggttttagatgttatggttgatttagctgaaggtggtatgacaatgattgttgttactcatgagatgggctttgctaaaacagttgccaatagaatggtttttatggatgaaggaagaatagttgaagaagctcctcctgataaattttttaataatccagagagtgacagaacaaaattatttttaagccaaatacttaatcattaag

SEQ ID NO: 271534 - DNA, 736 bp, Unknown
  Bacterial polypeptide expressing nucleotide sequence isolated from the Sargasso Sea
atgtcagagtctattattcaaatgaaggatgtaaataagtggtttggagattttcaagttttaaaagatattaatcttgaagttaaagaaaaacaaaaaattgttgtttgtggaccctctggttctggaaaatctactttaataagatgtataaatagacttgaagagcatcaaaagggtaaaatcgtagttgatggaaacgaactttccgaaaaaactaaagatattgaaaaaataagagcagaagtcggaatggttttccaacagtttaatttatttccgcacttatcaattttggataactgcacattagcaccaatctgggttaaaaagactcctaaaaaacaagctgaagaatttgctatgaaacagttagaacaagtccagatagctgatcaagcacaaaaatttcctggacaattatctggtggacaacaacaaagagctgctcttgctagagctttgtgtatggaaccaaaaattatgctttttgacgaaccaacatcagcattagatcctgaaatgatcaaagaagttcttgatgcaatggtaaatcttgcaaaagctggtatgacaatgatcgtggttactcatgaaatgggttttgctaaagaagttgccgacgaagtggtttttatggatgaaggaatgatagttgaaagagcaaacacaaaagatttctttgcaaatcctaaaaacgaaagaactaagcttttcttaagccaaatactttaat

SEQ ID NO: 271535 - DNA, 972 bp, Unknown
  Bacterial polypeptide expressing nucleotide sequence isolated from the Sargasso Sea
gcctggaagaaagtcaaatcggctgtttgctggggcccagcggctgcggtaaaacgactgtgctgagagccatcgccggtttcgagaacccgaccaaaggtgaaatcgtcttaaacggaaataaacttaacggctcaaaaatctttgtcgaaccggagaaaaggcaaatcggaatggtattccaggacattgccttatttccccacctttcggtcgaaagcaatatccaattcggtatacgcacattgcctcagacacaaagagacaaacgcagtaatgaattgttggatctggtcggcatgtcgcaattcaaaaaaacctatccccatgagctctccggaggccagcagcaacgtattgcattggctcgagcgatagccccaaaaccttcgctgctcttgatggacgaacctctttcaagtctggatgaggaactgagagagcaactggcccgggagattagactcattttgcagcaggaaaagatatccgccatattggtgacccacgatcagaatgaagcctttgctgtgggagaccatatatgtgtaatgcaccaaggccgagtacagcaaaacgattctgcatataatctatatcatcgtcctctaaaccgttttgttgcagaatttatcggcgaaggtgctttgctgccaggtgtagttgccgatgaggatactatcacaacagatttgggagaaattaaggtgaacttaccggaatcttgtaagcatcaagataatgttgacgttttgatccggccggagaatgtgatcttaggggatgataaagaaaataaagccgtgattacggagcgttattttcgagggtccggttacttgtattctttaaaaacgagaggcggtgaggaactgttatgtttaattccaggcaccgaggcccttcaaatagatcaatctatcagcgtccgacttcaaatcgaaagaccagttgtttttagccgcccataaa

SEQ ID NO: 271536 - DNA, 661 bp, Unknown
  Bacterial polypeptide expressing nucleotide sequence isolated from the Sargasso Sea
tatgaataataagctaattcattgtcagggcttgagtaaatcctactaccaagcagacgaaaacctcgtagttctcaataacttaagtttttcagtcgaaaaaggagaaagtataggtctaataggagcttctggatgcggaaaatcaactcttctacatattttagctggattagacttacctgattctggagaggtttcttttaatgggaataatatagtcttactaaatgcaaatgaacgcgcagcatttagaaataaaaatattggatttgtttatcaatttcatcatttgttacctgaatttagtgcattagaaaacacagcttttcctctgtggttgtctggcaaatcaaaggaaaaaagtttaattcaagctaaagatatattggataaggtcggtctcaaatctaaggaaaataataaacctagtcagttatcaggaggagaaaggcaaagggtagcaattgctagatcaataataaacaaaccagcatcgttactgatggatgagcctactggaaatttagataatagaaatatagacaattttatgagtcttatactggatttaagctgtgagcttgatattagcttaataattgcaacacatgataataatgtctcaagtcgactggataggatattgaatctagaatag

SEQ ID NO: 271537 - DNA, 718 bp, Unknown
  Bacterial polypeptide expressing nucleotide sequence isolated from the Sargasso Sea
ggttgagcttggtgactttggtactcgttttcctgcgcaattatctggaggtcaacaacaaagagttgctcttgcaagagctcttgtttttgaaccaagacttgttttaatggatgagccgcttggagcattagataaaaatttaagagaacagatgcaatatgagataaaacatattcatgacagaataggaattactgtcgtttatgtaacacacgatcaaagtgaagctttaacgatgtctaatagaatagcagtttttaatgatggagttgttcagcaattatcaacacctgatatattatatgaaaaaccagaaaattcttttgttgctcaatttattggtgagaataacagaatgtcaggaacaattaagggtatggaaaataattactgttctgtagaactggaaaatggagcaggtattgtaaaagctcttaaagttaatgtaggtggtgtgggagagaaaactcaactctccgttagacctgaaagagtatcattgggctcagatggaaacggggaaaatgtatttacaggaaaagttgaagagctaatatatttaggtgatcatattagggttagattagatgtatgtggaaataacgagtttattgttaaagttccaaatgaaggatcttttaactataatgaaggagattctataaaacttaactggaatcctgatgatataagagccttagatccggtaaattag

SEQ ID NO: 271538 - DNA, 1084 bp, Unknown
  Bacterial polypeptide expressing nucleotide sequence isolated from the Sargasso Sea
atgaacgaaaattttattcagataaacggaatttcaaaacattttggaaatgtcaaagcagttgatgacgtgtctttttcaattaaagaaggagagttcttttctttgttaggtccatcagggtgtggaaagacaactttactccgattgttagcaggatttgaatatccaacaaatggtaatttattaatcgatggcagtgatatcactgcattgcctcctgataaaagacctacaaatatggtatttcaaaactatgccatatttccacacattaatgttgagcaaaatataaaatttggattaagaaaacttggtttgactgatgacgaaattaaaaaaagagttgatgatgttttggcccttgtaaagcttgagggttatgaggagagattcagtggtcaattatctggtgggcagagacagcgtgttgcgttagcaagagctttagttagacaaccaaaagttcttttattagatgagcctcttggagcgctagataaaaaattaagagacgaaatgcaacttgaattgagaacgctacagaaagaaattggaattacctttgtatttgttactcatgatcaacaagaagctataagcatgtctgatagagttgctgttatgagtgaaggcaagatacaacaactttctgctccaaatgaactttataagaacccagaaaatatttttgtaagtgatttcattggagaaacaaactttttaaaagcatctacaaagtcaaaagatggcgatcacatcaatgttgcgattgaagatcttggtgattttaaagtaaagaataacctaaatattccagagaattcatctgatgttgtttgtagtgttcgaccagagtcaatgatgatttctagagataaatctgattgggatatttgcttagaagcaaaaataaatcagacttcctacttaggagaaatgacaagattttatgttgaggtatcaggaataaataaagtaataactgtatcatcccagcactttgataatcagtcatttgagaataatacttgttttataagtatcagtttagaagatattagcttactgcaaaaaaaatagc

SEQ ID NO: 271539 - DNA, 1099 bp, Unknown
  Bacterial polypeptide expressing nucleotide sequence isolated from the Sargasso Sea
gatgtcttccagcgaagcctttgtccagttcaaaaacgtccaaaagagttatgacggagaaacgctggtggtcaagaatctcaatcttgacattcaagaaggagaattcctgaccatgctgggcccttccgggtccgggaaaaccacctgcctgttgatgcttgccggattcgagacggcaacccatggagaaatcattctcaacggtaagccgatcaacaatgtacctccgcataaacggaacatcggcatggttttccagaattacgcccttttcccccacatgacggtcaaggaaaatttggcttttccgttgaaagtcaggaaattaccgaattcagaaatcgaatccaaaatcaagagggctctggatatggtgcagttggatggatttcaaaatcgccgtccgatgcagctttcgggagggcagcaacaacgtgttgcagtggcaagagcattggtcttcgaacccagcctggtcttgatggacgaaccccttggggcattagacaagcaactgcgcgagcagatgcagtacgaaatcaagcatatccatgaaaatcttggggtcaccatcgtttacgtcacccatgatcagagtgaagcgcttacgatgtccaaccgaattgcggtattcaatgacggaatcatccagcagttggccagtccggaacagctctatgaagctccggaaaatgcgtttgttgcacaattcatcggggagaataatacgcttcgggggaaagtcagtgacatgaatggcaccacctgcaaggtcacccttgaaaatggacaatccgtagatgctcttgtggtcaatgtggattcggtaggagctgaaacctctatatctttgaggccggaaagggtttttgtaaacccgaaaaagaactcatgcaagaatctggtggaagcacaggttctggaattgatctatctgggagatcatattcgctcccgggtcaatgtatgcggccatgatgacttcatcatcaaggtcccaaattccgcagatcatacccaactcaaaccgggagattcggttcaggttggttggcatgtggaagacgcacgtgcattggatatgcatgctgcttaa

SEQ ID NO: 271540 - DNA, 976 bp, Unknown
  Bacterial polypeptide expressing nucleotide sequence isolated from the Sargasso Sea
atgggagcaattgatattaagtcagccgggaaaatatatccaaatggcactagggctttagaggatgtaagtataactattaatgatggtgagtttgtagttctagttggtccttcaggatgtggaaaaactactttgctaagaatggtcgctggactagaagacataactgaaggggaaattgcaatcggcgagaaaacggtaaacgaagtcgcaccaaaagatcgtgatattgcaatggttttccaaaattatgcgttgtatccgcatatgtcagtttttgacaatatggctttttctttaaaactgagaaagctgccaaaaaatgaagttgaaaaaaaagttaaagatgcggcaaaaactttagagataagtgaacttttagatagaaagccgaaagccttatcaggtggacaaagacaaagggtcgcaatggggagagcaattgtaagaaatccacaagcatttttaatggacgagcctctctctaatttagatgcaaaattaagagttcagatgcgagctgaattgggtcaactacatacacagctccaaacaacaactctttatgttactcatgaccaagttgaagccatgacaatgggtgatagagttgcagtaattagaaaaggtgaattgcaacaaatagacacaccccgagaaatttattccaatccaaaaaatatatttgtagctggatttattggaagtccatcaatgaattttgtgtatgcaaaaattaaatcaaaagacgatgtaattgaattaacttttggagacaatcaaattacatacaaagatgaaaaaaaagaaaagttaaaatctttcgagaataaagaaatagttttaggtataagaccagaagcttttgaagatggtcattttgcgaaccagtctgattactcagaaagcataaaagtaaaagtatctttactagaacaactaggatctgactcgtatattcacttctacaaag

SEQ ID NO: 271541 - DNA, 549 bp, Unknown
  Bacterial polypeptide expressing nucleotide sequence isolated from the Sargasso Sea
tgttgatggcattaaacctagacggaaatacaaaaaatattgataagattaggagtgaagtaggaatggtgtttcagcaattcaatttatttcctcatttatcaattatagataattgtacccttgcacctatgtgggttaaaaaaaaatcaaaaaaagagtgtgagacacttgcaaaagagtatttagaaaaagttcaaattttagatcaaggtaataaatttcctggacaactttctggcggtcaacaacaaagagcggcaatcgctcgtgcgctttgtatggagccaaaaataatgttatttgatgaaccaacatccgcgttagatcctgaaatgattaaagaggttttagatgttatggttgatttagcaaaaggtggaatgactatgtgcgtcgtgacacatgagatgggttttgcaaaagaagttgctgatagagtaatttttatggatgaaggcaatatagttgaagaaaaaaatacaaaagaattttttgaaaatccagaaaatgatagaacaaagctatttctaagccaaattttgtaat

SEQ ID NO: 271542 - DNA, 1087 bp, Unknown
  Bacterial polypeptide expressing nucleotide sequence isolated from the Sargasso Sea
atgtctaatgaacaattcgtaagatttgaaaacgtagataaaagctacgatggaaaactacttgtagttaaaggtttaaatttagatatagccgaaggcgaatttgttactatgcttggaccatctggttcaggtaaaacaacttgtctaatgatgttagctggatttgaaacaccaactaatggacagatttatttagataacaatgttatttcagatattcctccacataagaggggaattggaatggtttttcaaaactatgctttatttcctcatatgacagtatatgagaatttagctttcccattaagagtaagaaaaattccaaaagatgaagcagataaaaaagttgataaagcattatcaatggtatctcttcagggtttcgaagctagaatgccaatgcagttatcaggagggcagcaacaaagagttgcagttgcaagatcactagtatttgatcctaagcttgttttgatggacgaacctttaggcgctttagataaaaatttaagagagagtatgcaatatgagataaaacatattcatgaaagtattggtgtaaccgtcgtttatgttacacatgatcaaacagaagccttaacaatgtctaacagaattgctgtatttaatgatggaaaagttcaacaactttcaagtcctgatgaattatatgaaagaccagttaattctttcgtagcagaatttataggtgagaataatacctttggtggagaagtaattgaagcatcaggagacaaatgtaaagtaaaattaaattcaggagcagaaatattagcaaacccaattgttgtgaaagcaaaaggggaaaaaacaaatgtttcattaagacctgagagagcaattattgatccaacaacaactatggacaataatcacaaaggtaaaattgaagaagttatttaccatggtgaccatacaagattaagagtagacctattaggcaacaaagattttattcttaaagtaccaaatagttcaaatagaatggatattaaagagggaagagaaattaaaattggctggaacagtgttgactgtagagctttagacccaaaataga

SEQ ID NO: 271543 - DNA, 1045 bp, Unknown
  Bacterial polypeptide expressing nucleotide sequence isolated from the Sargasso Sea
gatgggttccataaaactcaactccatcgaaaagtggtttgatcagttacaggttattaagggaattgacctagaaataatggacggtgagtttgttattttagtcggaccttccggttgtggtaagtccacacttctgagaatgattggtggtttggaagaaacctctcgtggctctattattctggatggtaatgatgtaaccgaccagcccccatcgaaacgtggcctgtctatggtttttcagtcatacgccctttatccacacatgactgtccgtgagaacatgggtttcagtctaaaggtcgcggggactcaaaaggaagtgatagatgataaagttgaccgagctgcacaaatattgaaacttgaagattttcttgatcgtcgacccaaagatctttctggcggtcagaggcagcgcgtcgccattggtcgatctattgtaagggcgcccactgcttttctttttgatgaaccactttcaaatcttgatgcttctcttcgtgtggaaatgcgtctggagttggcaaggctacatcagactttgaagactactatggtttatgtaactcatgaccaagtcgaggccatgacacttgcagacagaatagtagtactagaatctggaaaaatagcacagattgggaccccaaaacaattatatgagcaaccagctaatctatttgtagcgcaatttgttggctccccgaaaatgaacattatttccagacaagtagcaggaagtgtttcaaaaaatggcgagtttttggaagctttaatcaaaaacaaacaggctgaaaatataggagttaggcctgaacactttactcttcagcgtggtcaaaaaaaaggctttttgggaagtgtatcagttgtcgaatatttaggtgctgattgttttgtttttgtcaattgtggagatctaggaacaataaatgttcgtatagaaggttcagagcaatatatgattgatgaaaaagtatcggttacccctatgcttgaacatgtgcatttttttgatcagcagggaaatcgtctataa

SEQ ID NO: 271544 - DNA, 1036 bp, Unknown
  Bacterial polypeptide expressing nucleotide sequence isolated from the Sargasso Sea
atgctggtgttacaacaggtttcgatagcttatggccaggctactgtggtcaaagacgttagcctcacactacaacaaggccagataggttgtttgttagggccttcaggctgcggcaaaaccagtttattacgggctatcgcaggttttgaaccagtgcaaacagggtctgttgtgttggcaggctcatctctgtcagaacccggcaatatggtgaatcctgagcagcgccgtattggcatggtgtttcaggatttcgcgctttttccgcacctgactgtggcgcaaaatattgcctttggcttaaagaagaagccaaaagcacagcagcaacaaatagtagacgagttgttagctgtagttggtttgcccactttaggcgatcgatatgtgcatcaactgtctggtggccagcagcagcgggtcgctttagcccgggctttagcaccagagccagacgtcttgttattggatgagcctttttccggtttagacgctgatttacgtgaagctttggcgcaggatatccgcgctattctgaagcagcgtggcatcagtgctttgatggtgactcatgatcagtttgaagcttttgccatggccgatcagataggtgtgatgcaacatggcaagctacagcagtggggcagtgcttacgagttatatcatcagccagccaaccgttttgtcgctgactttgttgggcacggcgctttactcaaaggcgaagtgttggcggatgagaaggtgtacacagctttgggagtatttgctcagacccagtcgaattttactgcgggtgtcgctgtggacttgctggtacggccggacgatatagtgcacgacgatcaaagtggttttaccgccaaagtcgtgagtaaatcctttcgtggttcgcatattttatatagtttggaattagaaggggcagagcaggtgtattgcttagcgcccagccaccacaaccatcaattgcatagccgcattggtattaagctggagctggatcatctggtgttgtttcagcggctataaa

SEQ ID NO: 271545 - DNA, 895 bp, Unknown
  Bacterial polypeptide expressing nucleotide sequence isolated from the Sargasso Sea
atgctatctgtaagtcagttgtctatagattatggcagtaatcgcgttgtgagcgatttgaatttaacgcttggtgaaaacgaaatcctaatgcttgttggccccaccggttgcggtaaaagtacaatattacaagcactcgcaggcttaatacccatttctgaaggtgaaataaacgcagataaatggcgtgcaacccgtaataaatcagtgcctcctgagaagcgcagtgtaggtatggtttttcaagactttgcgttatttccgcatttaacggttgagcaaaatatttgttttaaattaaaagatcacagcgtggcagatcattggattaacctacttggtcttgaagagtttagaactaagaaacctgcgaccctgtctggcggtcaaaagcaacgcgttgcattagcacgtactcttgctcaccagcctgactttgtattacttgatgagccgctgtcgaatctagatgcggcgttaaaagacatgctgcgttgggatatccgaaacgcactaaaaaatgcaggtgtacctgctatttgggttacccacgaccaagaagaggcactatcggttggggatcgtgttggtgttttaaaaggtgggcaaatacaacaaattgacactcccgaaaaatgctttagcaccccagaaaaccgctttgttgcgcgttttttaggtgaagctagctttataaaaggtacattaaataacggccaagcacttaccgatattggtaatgtacccgcgcatggtgttgactgcgctcaaggcaatgttgatgtattgcttcgccccgacgatgttttattagtacaaagcagtataggtaataatggcgaggttatttgggtacgctttgaaggcggtagtcgattatgcgctataaaac

SEQ ID NO: 271546 - DNA, 1054 bp, Unknown
  Bacterial polypeptide expressing nucleotide sequence isolated from the Sargasso Sea
atggcaactattgaactaaaaaatattgaaaaaagttttggaacgaacaaggtaataaataaatttgatataaaaataagtgatggagaatttattgttttagttggtccatcaggttgtggaaagtccacacttttaagaatgatctcaggtttagagtcaattgatttaggagaaatctatttagataacaaactaataaataatctaattccatctaaacgtgaaattgcaatggtttttcaatcctatgctctgtatccacacatgaatgtttttgaaaatatggcttttggtttaaaaatggaaaaaattccgaagagtgaaatcagccaaaaagttaatgatgctgctgctacacttcaaattgaagatttacttgaaaggaagcctaaacagttgtcaggtggacaaagacaaagagttgcaattggtagagcaattacaagaagtcctaaagttttcttatttgatgaacctttatcaaaccttgatgcagctttaagatctgaaatgagagttgaaatatctaagctacataaaaaaatgaattcaaatataatatatgtaactcatgatcaagttgaagcaatgacattagctgatagaattgtagttcttaataagggaaatatcgaacaatatggaacaccaaatgagatttattcagatccaaataatatttttgttgcagaatttattggatcgccaaaaatgaatataattaagattaataaagaaaatatttctaattcaaacactttgcacttatttaataataaaataacttttgataatttagaatttaaagatgagatttatataggtattagacctgagcatataagcttaaaaaataatcatgaaatcaaggtagatgtaaaaattgatcttgttgaaaatttaggatttgaaaaaatcatttattctaaagtttcagaaaaccagattataattaaatcatcagaaaatattaataatcattcacttaagatatctttttcaaaagataaagtattattttttgataaggataaaaacaggattagataat

SEQ ID NO: 271547 - DNA, 1090 bp, Unknown
  Bacterial polypeptide expressing nucleotide sequence isolated from the Sargasso Sea
tatgtctgaaaaagatagtttcgttaaattcgagaaggtagataaaagctatgatggcgaaatattggtcgttaaagatttaaatcttgatgttccaaaaggtgagtttttaactatgttaggaccttctggatcaggtaagactacagtattaatgatgttagctggatttgaaactccaacaagcggagaaatttatttagatggaaatccaataagtagtattcctccaaataaaagagggataggcatggtctttcaaaattatgctttatttcctcatatgactgtaaaagaaaatttagcatttccacttgaagttagaaagatgcaaaaatctgaaatcgatgaaaaagttggaaacgcacttgcaatggttgaattacaagattttggaaatcgaatgcctttacaattatctggaggacaacaacaacgtgtcgcattagcaagatctttggtgtttgaaccgagattagttttaatggatgagccacttggagcgcttgataaaaatttaagagagcaaatgcagtatgaaattaaacatattcatgaaaaaattggaataacagtagtttatgtaactcatgatcaaagtgaagcattaacgatgtcaaatcgaattgcggtatttaatgatggaaagatacaacaaatttcttcaccagatgttttatatgaaaaaccaaatagctcttttgttgcccaatttattggggagaacaatcagctaaaaggaaaagtgaaatcaattaatggagaaaattgtattgttaccactgaatcaggagatgatatccatgctttaaaaataaatgtgaacaataacggcgatggttctttagtttcattaagacccgaaagagttgctattaactcatctgagaattttgaaaataattttgacgcaaaggtaaaagaattaatttatttaggagaccacataagatctcgagtagaagtttgtggaaatgatcaatttatagttaaaattccaaattcttataaagaagaaaatttaaaagaaggttcgacagtcaaactgtcatggaaagcgtcagattctagggctctagaccttaattaa

SEQ ID NO: 271548 - DNA, 1096 bp, Unknown
  Bacterial polypeptide expressing nucleotide sequence isolated from the Sargasso Sea
atgagtgcagacgttgaactccaagacgtatcaatcgcatttggcgatttttatgccgcaaaaaacgtaaatgttaaaatagaggcaggtgagttttttagtttccttgggccttctggttgtggcaaaactactcttctgagggtagtttcgggttttcttgaaccgtctgaaggtaaagttcttataggtggacaaaatatgtcaggcattgggccaaataagcgcccaacatctttgattttccaaaatttagcattgtttccattaatgtctgtggcggataatattgccttttctttagaggttagaggcgtaagcaagcaggcaagacgcaaaagagcggatgaattgcttgatttggtagcgttaaatggacagggcgataaaaaagttcatgaattatctgggggccagaagcaaagagtagcaatagcgagagctctggcagtagagcctgaagttcttttgcttgatgaaccactatctgcactcgatcttaaattgcgtcaaaaaatgagaactgaactcagagcaatacagcagagagttggaattacgttcatctacataacccatgatcaaggcgaggctttgaccatgtctgaccgagttggcgttatgaacgatggtcaacttgagcaagtgggttcgtgttatgaagtatatcaagctccgagtactccgtttgttgcaacttttgttggagaaaataatgccttttcaggaaaggtagagaaggtttccaaaggcatcgcccaagtggatgttgaagggacctcctttagtggatctattggtaagacaactgtaggtgatctacatccagtcggcgttggagacgaagtaattatttttgtcaggccagaatctctgagtttggcaaaaggcaccaaggctccaaaaaataagttttctgcagatattgaaactatcgaatttgagggaaatttgaaaaatatttatttaaaatcgagtaaaagtaaaagtattcgatttagtgtgccaagtgtatttgatacatctgagctaacactcggttctacgatcgagctatctttttcggctgagagcgcgatttttgccaagcggccca

SEQ ID NO: 271549 - DNA, 1108 bp, Unknown
  Bacterial polypeptide expressing nucleotide sequence isolated from the Sargasso Sea
ttgaaagatcgctcaaaggaggatgaagtggcagatataaatataaatactgttaataaatattttggagacgtccatgtaatcaaggatgtttctcttgatataaaaagtcaatcattcacagttctagttggtccaagtggttgtggtaaatcaactatgttaagaatgatagcgggactggaagacataaattcaggtacaatttcaattgatggtcaggtagttaatgatttgccaccaaagcaaagaaatattgcaatggtgtttcaatcgtatgcattataccctcatatgactgtatttgataatatggcttttggtttgaaattagaaaaaagatcaaaagatgaaattaatgaaagagttaatgaggcagcaagaattcttcaaatagaagattatcttctaagaaaaccaaaacaactttcaggtggtcaaaggcagcgtgttgctattggaagagcaattactagaaagccaaaagttttcttatttgatgaaccactttcaaaccttgatgctgcattaagggttcaaatgagagttgagttagcaaaactgcataatgaactagaagcaacaatgatctatgtaacacacgatcagacagaagctatgactttagctgatgatattgttgtacttgatacaggtatcgtttcacaaaaaggatcaccacttgaactttatgataaaccaaataatatgttcgtaggtggatttattggatcaccaaaaatgaactttatttcaagtaagatattaagcaaaagttctgatactacagaagttgatattatgggaacgtccaaaatatcagtctctagaatgtctgcatcctcctcagagggtgattcagtaactttaggcattagacctgaacacttagtagtaaatggtgatgcagatggatcttgggaaagtaaagtgtttgttgttgaaaaacttggtgacgttacttacctataccttgaaaaagagggagagccattagttgctgaaactgaaggacattcagaaattaaagttggtgatactgtaaaagttggttttccggctggaagatgccagttatttgacagttcaggcgaagcatttaaataat

SEQ ID NO: 271550 - DNA, 559 bp, Unknown
  Bacterial polypeptide expressing nucleotide sequence isolated from the Sargasso Sea
atgaacaacctatctacaacctacttatcagtaatcgatctttgcaaatattttggagcatttcaggccttaaaaaatatatcgattgaaattaatgaaggagaatttgcctgttttttaggcccttcaggttgtggaaaaacaacacttcttcgttgtatcgcaggattggaaactcaatcatcgggatccatttctcaaaaagaaattgagatttcatctcttccaccttcagcaagagatttcggtattgtgtttcaatcttatgcacttttcccgaatttaacggtcttctcaaacatttcctatggtttgattaacaataaatgggggaaggatgaaattaagtccagagtggagcatttactggatctagttggtttgaaatcacatgcaggaaaatatccgagtcaattatctggaggagaacaacaacgtgttgctttagcaagagctttggcgacgtcaccaggattgttattgcttgatgaacccctttcagccctggatgcaaaagtcaggttgtatctgaggaaacagattaaaaatctgcaccgaa

SEQ ID NO: 271551 - DNA, 718 bp, Unknown
  Bacterial polypeptide expressing nucleotide sequence isolated from the Sargasso Sea
tatgaacaattcatttatacagatcaataatatttcaaaacactttgcagatgtaaaagcagttgatgatgtttcatttgaaattaaagaaggcgaatttttttctcttttaggaccttctggatgtggtaagacaacattgttaaggttgttggcaggatttgaatatcctacttctggaaatctattaattgatggaacagatattactgcattaccaccagacaaaagacctacaaatatggtttttcaaaactatgcaatttttcctcaccttaacgtagaaaaaaatattcaatttggactaagaaaacttggcttaagcaatgatgaaatagataaacgcgttaaagaagttctttcattagttaagcttgagggctatgaagaaagatttagcaatcaattatctggtggtcaaagacagcgtgttgctcttgcaagagcattagtaaggcaaccaaaagttttattattagatgaacctctaggagctttagataaaaaactaagagatgaaatgcaattagaattaagaactcttcaaaaaaatattggaattacttttgtattcgtcactcacgatcaacaagaagctataagtatgtcagacagagttgcagttatgaacgatggaaaaattcagcaattatcagcaccaaatgaactttataagaatccaaaaaatatatttgtaagtgactttattggtgaaaca

SEQ ID NO: 271552 - DNA, 1051 bp, Unknown
  Bacterial polypeptide expressing nucleotide sequence isolated from the Sargasso Sea
aatggcaaatataaaatttactggagtgcataaatcttttggctccaataagattattacagacttcaatttatccggcaaggatgatgaatttcttgtactggttgggccatctggatgtggaaaatcaactttattaagaatgatcgcaggtttagaacagattgatgaaggtgaaatatttattaatgatcaaaaaataaatgatctacatccttccaaacgacaaactgcaatggtgtttcagtcatatgctctttaccctcacatgaatgtttatgaaaatatgtcattcgggttaaagatagaaaagagatctaaagaggaaatccaaacaaaagttatgcaggcagcaaaaattctaaagatagaggaattgttggaaagaagacccaaacaattgtcagggggacaaagacaaagagttgcaattggaagagcaataacaagaaatccaaaaatatttttatttgatgagcctttatcaaatttagatgcagcactaagatcagaaatgagagttgagatttccaaattacataatcaaattaaaacaaatatgatttatgttacgcatgatcaggtagaggcaatgactttagcagatagaattgtaatattaaatcttggtaatattgaacaagttggaactccagacgaaatttacaacaatccagcaaatatttttgtagctcaatttattggaactccaaaaatgaatattttacctttaaataatgaaaatataatttcagataataaaattatttttttaggtaatgaaataacttttgaaaaaaccaaatttgataaaaaaaaatatttcttaggaataagacctgagcattttaacttatctaatgaatcacaatttaaatttaaacctaaaattgatcttgttgaaaatttaggtaatgaaaagattgtatacatgagtaacgacaacttagaacttagtgcaaaaatttctagtcaggaagattttcaaaatcagataaattttgactctaaagatatttttatttttgacgaaaacggaagaagaatttag

SEQ ID NO: 271553 - DNA, 1018 bp, Unknown
  Bacterial polypeptide expressing nucleotide sequence isolated from the Sargasso Sea
atgaaaacattaaaaattgaagatctatcaaaaaattttgggtctacagaagtattaaaaaaaattaatttagagatagatgaaggaaattttttagttttattaggtccgtcaggatgtgggaaatctacattactaaacattattgcagggttagagtcaatcaatgaaggtaacgtttttattgatgattataatgtcagtaaagtagagccaaaagacagaaatattgcaatggttttccaatcttacgctttatatccatcaatgaatgtaagagagaatatgatttttggactgaaacaagcaaagacttcaaaagaaaaaattgagcaacagctagagaaggtatctaaatttttacaagttgatcaattattagaaagaaaaccatctcaattgtctggaggacaaagacaaagggttgctattggaagagcattagtaagagaacctagaatatttttatttgatgaacctttatctaacttagatgcaaagttaagagttgagatgagaagagaaattaaaaaacttcaccaacaattaaaaaccacagttgtatatgtaactcacgatcaaactgaagcgatgagtttaggtacaagaattgcaattatgaatcatggtgttattcagcaaaatgatactcccgaaaacatttacaataaaccaagcaacacttttgtagctgactttattggatcaccatctatgaatttaattaagggaactttaaaagaaagttcaggtgaaatatcttttacagcaagtggatctaattttgaaattccagtaaagggctatgaatttaaagataaatctaacttaaataataaagaagtcttctttggggtaagaccagaacacatttactttaaaaaatctaatgaaactgattttgaagttactttaagagcagatttaagtgaatatattggtcacgaacaaataatgacatttgattatgctaatcaagaaattttagctaaatttccttcacaattaaaattgaatt

SEQ ID NO: 271554 - DNA, 688 bp, Unknown
  Bacterial polypeptide expressing nucleotide sequence isolated from the Sargasso Sea
aatgtcaaaaattattataaaaaacctcgaaaagtcttttggtaataataaaattattaacaattttaatattgatatagaagatggagaatttattgttttagtaggtccttcaggttgcggaaaatctactttgttaagaatgatatcgggactggaaaatattgatcgaggggaaatttttttagatcaaaaattaattaataatctgcttccctctaaacgtgaaattgcaatggtgtttcaatcctatgctttatatccacatatgaatgtttttgaaaacatgtcatttggattgaaaatggaaagaattaaaaaaagtgaaattaatcaaaaagttaataatgctgctgccacacttcaaattgaggatttacttaaaagaaaacctaaacaactttcaggcggacaaagacaaagagttgcaattggaagagcaatcacaagaaatcctaaagttttcttatttgatgaaccattatcaaatctagatgcagctttaagatctgaaatgagagttgaaatatctaaattacataaaaaacttaaatcaaatataatttatgttactcatgatcaaatagaggcaatgactttagctgatagaatcgtggttcttaataaaggaaatatcgaacaatatggaacacctaatgaaatttattcagaccctaataatattttt

SEQ ID NO: 271555 - DNA, 670 bp, Unknown
  Bacterial polypeptide expressing nucleotide sequence isolated from the Sargasso Sea
atgagtagtgaccagtcgggcgcgctggcagggaccgccgcgccgtttccgggcctgagcgcccaagcgggcgacgcagcagagaatttcatccagatcgtcgacgtcgtgaagaaatttggcgagaccgtcgcggtgaaaggggtcaacctgtcggtgaaaaagggcgagctgtttgcgttgctcggcagttccggctgtggcaagtcgaccttgttgcgcatgctggccgggctcgaatcgatcacgtcgggcaagattctgatcgacggggaagacctggcgcaattgccgccttatcgccggccggtcaacatgatgttccagtcgtatgcgctgtttccgcacatgacggtcgaggccaacgtcgcgttcggactgaagcaggagggtgtgccgaaagccgaactgaaggaccgtgtgcagaatgcactcgatctcgtgcagatgggccgcttcgcgaagcgtaagccgcatcagctctccggtggtcagcagcagcgggtggcgctcgcgcgctcgctcgtcaagcggccaaagctgttgttgctcgacgaaccgatgtcggcactcgacaagcagatccgtcagcgtacgcagatcgaactggtgaatattctcgacaaggtcggcgtgacctgcatgatggttacgcacgaccaggaagagg

SEQ ID NO: 271556 - DNA, 448 bp, Unknown
  Bacterial polypeptide expressing nucleotide sequence isolated from the Sargasso Sea
accgcgctcgagaacgtcatgttcgggcccattcaggtccgtgcagcaacgcgtgccgaagcgcgtgaccaggcaatggcgctgctcgacaaagtcggtctcgaatcgcgggccaatcactatccgtcggaattgtccggtggacaacagcagcgtgttgcgatcgcgcgggcgcttgccatcaagcccaagctgatgctcttcgacgagccgacgtccgcgctcgaccccgagcttcgtcacgaagtgctcaaggtcatgcaggatctcgcgactgaaggcatgacgatgatcgtcgtcacacatgagatcggcttcgcgaagcgggtagggacacgtctgctgttcatggacaacggggggattgcggaggacggcgagccggcggcgctgatcgacaatccgcctacgcagcgcttgcaggactttttgaagcatgtggcttagg

SEQ ID NO: 271557 - DNA, 736 bp, Unknown
  Bacterial polypeptide expressing nucleotide sequence isolated from the Sargasso Sea
tatgtcagatccaattataaaaattcaaaatatgaataaatggtttggtgattttcaagttttaaaaaatattaatttagaagttgaagcaaataagaaaattgtagtatgtggaccgtcaggttcaggaaaatcaacactaattagatgtatcaacagattagaagagcaccaagagggtgatataatcgttgatggaaatgaattgtcagaaaaaacaaaagatattgaaaaaattagagctgaagttggaatggtttttcaacaatttaatttattcccgcacctttcaatattagataattgtacacttgcacctatttgggtaaaaaaaatgccaaaaaaggaagcccaagaactagcattggaccaacttaaaaaagttcaaatagacgatcaagcaaacaaatttccaggacaactttcagggggacaacaacagcgttgtgctatcgctagagcattatgtatgcaaccaaaaattatgttatttgatgaaccaacatcagcattagatccggaaatgataaaagaagtgcttgatgcaatggtaagtcttgcaaaaggtggaatgacgatgattgttgttacacatgagatgggatttgctaaggaagttgcggatgaagttatttttatggacgaaggcatgataattgagaaggcagaaacaaaagaattctttgccaacccaaagagtgacagaacaaagctttttttaagccaaattctttaa

SEQ ID NO: 271558 - DNA, 845 bp, Unknown
  Bacterial polypeptide expressing nucleotide sequence isolated from the Sargasso Sea
tggtttttcaaattacgcaatttttcctcatctaaatgtagaacaaaatgtggcttatggtttgcacaaaaaaagtatatctaaaatcgaaaaagaggaaatgataaatcaggtccttgagcttgtgggattatcggggttaaatcaaaggtcggcaaatgccttatcgggagggcaaaagcaacgtgtagcattagctagagcccttattctaaaaccaaaagtattattgcttgacgagcctttatctgcattggacaaaaaacttagagaacaaatgcaattagaattgcgccatttgcaacgagcagttggcattacttttattttggtcactcacgatcaggaggaagctcttactatgagtgacaaggttgccgttatgtttgatgggaaggttgaacaggtagcatctccaagagagttatatgaaaggccaacctctcaaagggtggcgtcttttatcggagcaatgaattttattaatggaactgtgatggaagcaaagaatgaaattggaattaactctgatatccttggcccattgactatttcaagatctcaagtttttggagacctcacagaaaataaaattattatagggataagacctgaaagaatttcaatagtttctgatggttctagtgtagcaggttcaatttctggaagaattacagatgcttcgtattttggtgaaaccacctattacaaagttgcatgtgggaaaggatctgaaactttaactgtttcggctcaaaattcattcggccaaatggattaccaaataggtgaagaagtaaaattaaatgttgatattaaaagcctagttggctttttggattgaa

SEQ ID NO: 271559 - DNA, 897 bp, Unknown
  Bacterial polypeptide expressing nucleotide sequence isolated from the Sargasso Sea
gaatctatttagattctaatcctatttcaaatattccaccgcacaaaagaggaattggaatggtttttcaaaattatgcattgtttcctcatatgacagtttatgaaaatttagcatttcctttaagagttagaaaagtccaaaaagatgagattgataaaaaagtagataaagctttatcaatggtttctttatcaggatttgaaagtagaatgccagcgcaattatctggtggtcagcaacaaagggtagctgttgcaagagctttagtatttgatccagcagtagttctaatggatgaacctcttggagctttagataaaaacttaagagaaagtatgcagtacgaaattaaacatattcatgaaaatattggtgttactgtagtttacgttacacacgatcaaggagaagcattaacaatgtcaaataggatcgcagtttttaatgatggtaaagttcaacaattatcaagtcctgataaattgtacgaagaaccagttaattctttcgttgcagagtttataggtgaaaataatacatttggaggagaagtaactgacatttcaaaagatgtttgtaaagttaaactacaaaatggagaaattttagctaatccagtttcagtaacttccaaaggtgataaaacaacagtttcaataagacctgagagggcattgataaatccaaaagataaaatggataataatcaaacgggaaaaatcgaagaagttatttaccatggtgatcacactagagtaagattagatcttttaggtaataaagaatttattttaaaagttccaaatagctcaaacgagttagatttaaaattaggtaatgagattaaagtaggatggaacagtcaagacgcaagagctctagatcctaaataat

SEQ ID NO: 271560 - DNA, 1096 bp, Unknown
  Bacterial polypeptide expressing nucleotide sequence isolated from the Sargasso Sea
gatgaaaacattaaaaatagaagaattatcaaagaactttggatcaactgaggttttaaggaaaattaatttagagatagatgaaggtaatttcttagttcttttaggaccttctggatgtggaaaatcaaccttgttaaacattattgcaggattagaaactattaatgaaggaaatgttcacatagatgattacaatgtaagtaaagtagagccaaaagatcgaaatattgcaatggtatttcaatcttatgctttgtacccatcaatgaatgtacgtgaaaatatgatctttggtcttaaacaagctaaagtttcaaaggagaaaatcgaagagcaattggaaaaagtatcaaaatttttacaagtagatgctttgttagagagaaagccatcacaattatctggcggacaaagacagcgtgttgcaataggtagagcactagttagagaaccaagaatatttttatttgatgaacctttatcaaatttagatgcaaagttaagagttgagatgagacgagaaattaaaaaacttcatcagcaacttaaaacaacagtagtttatgtaacgcacgatcaaacagaagctatgagcttaggtacaaacattgcaattatgaatcatggtgtaattcagcaaaatgatacacctgaaaatatttataataaacctagtaatacttttgtggcagacttcataggctctccatcaatgaatttaataaaaggcaatttaaaagagagttcaaataaagtttcattcattacaaatggatcaaatattgaaattccaataaatggatatgattttaaagaaaagtctaatttagataataaagaggttttttttggtataagaccagaacatatattttttaaaaaatctaatgaagaggattttgagattaatttaagagcagatttaagtgaatatattggacatgaacagataatgacctttaattttgaaaatcaagaggtgttagctaagtttccatcaacagtaaaaatagatctatcaaaaaatacaaaattattctttgatttaactcaaatttcattgtttgatgctaaaacagaggagagaatttaa

SEQ ID NO: 271561 - DNA, 691 bp, Unknown
  Bacterial polypeptide expressing nucleotide sequence isolated from the Sargasso Sea
atgtctgatccaattatacaaataaaagatatgaataaatggtttggagattttcaggttttaaaagatataaatttagaagtagaaaaaaataaaaaaattgtagtatgcggaccttctggttcaggtaaatctacattaattagatgtattaatagattagaagaacatcaaaaaggaacaattgttgtagatggtactgaattatcagaagatacaaaaaatatagagactattagagcagaagttgggatggtctttcagcaattcaatctttttcctcatttatctatactagataattgtactttagcgcctatttgggtaaaaaaaacgccaaaaaaacaagcagaagaattagcaatgaaacaactagaacaagtccaaattgttgatcaagcacataaatttcctggccaattatcaggtggacaacaacaaagatgtgccattgctagagctttatgtatggaacctaaaataatgctttttgacgaacctacttcagcattggatcctgagatgatcaaagaagttttagatgccatggtaaatttagctaaagcaggaatgacaatgatagtagtaactcatgaaatgggttttgcaaaagaagtagcagatgaggtaatattcatggatgaaggaatgataattgaaaaagccatgactaaagagttttttgccaacc

SEQ ID NO: 271562 - DNA, 1099 bp, Unknown
  Bacterial polypeptide expressing nucleotide sequence isolated from the Sargasso Sea
gatggcaaaactttcgctacgcaacgttcagaagcactacgccaacctccaggtcgtgcacggcatcgacatggaaatcggcgacggggagttcatcgtcatcgtcggcccctcgggctgcggcaagtccacgctgctgcgcatggtggcgggcctcgagcccatcaccggcggcgaagtttggatcggcgaccgcgtcgtcaacgaactcgagccggccgagcgcgacatcgcgatggtgttccagaactacgcgctgtatccgcacatgagcgtgttcgacaacatggcttatggcttaaagattcgcggcttgcccaagagcgatattcaagcgcgtgtggaacaggctgcgggcattctcgagctgggcaagctgctggatcgcaagccgcgtcagctctcgggcgggcaacgccagcgggtggccatgggtcgggcgatcgtgcgtgaaccggctgtgtttttgttcgacgagccgctctccaacctggatgccaagctgcgcgtgcagatgcgcctggagctgaaggatctgcatcgccgtttgcgcacgacgagcctgtacgtcacgcatgatcaggtcgaagccatgacgctggccgatcgcatgatggtgctcaacggcggccgggtcgagcagatcggcacaccgctcgaggtgtactcgcgtccggcgagcacgtttgtggccggttttattggctcgccgccgatgaacctcgtgcccgtgtcgcgcaacgccggcggcgacacgcagattcgggtggacggagcgaaggagagcgatgccgccgccacgctcggccacttgccgatgggccttcatctgcccgagcgtgcgctcatgggtttgcgtcccgaacatatcgagccgtgctcggctgatgaggccatcgccttcatcgacgtgcgcgtggtggaggccctcggcgcggatgcattcgcgtacggcgccctggccggccatccggtcgtggttcgtcttgaaccgcacgccagcgtaaaggcgggcgacaagctacccatcaccgcgtcggccgagcacctgcactggttcgacccgcaaaccacgcgccgcatcgaggcgctggcatga

SEQ ID NO: 271563 - DNA, 1057 bp, Unknown
  Bacterial polypeptide expressing nucleotide sequence isolated from the Sargasso Sea
aatgagttttttagagttaaaaaaagtaacaaaagtttatcctaacggcactaaagctgtacaaccaacatctcttaaaatagaaaaaggagaattcatggtttttgttggaccatcaggctgtggaaaatccactttgttaagaatggtagctggacttgaagatataacaacgggcgatattaaacttgataaaaaaattataaataaaattgatccctcagaaagagatgtagcgatggtatttcaaaactacgcattatatccacatatgaatgtttataacaatttagcttatggattaaaaaacaggggtttagctaaagatgtaatagaaaaaaaagtaaaagctgcagcaaaactattgcagatatcagattatttagaaagaaggccagcattattatcaggaggccaaagacagagagtggcaatgggtagagcaattgttagaagtcccaaaatttttttatttgatgaaccgttatctaacttagatgcaaaactacgtattcaaatgagactagagattaaaaaacttcaaagaaaggttggtgtaacaagtatttttgtaactcacgatcaagtagaagcaatgacattagcagatagactggcagtaattaataacggaataattgagcaattaggaacaccaatagaaatttataataatcctacatctgtttttgtagctggatttataggatcgcctcaaatgaattttattgaaggtgaactaaaaaataaaaaattaaaaacccaatcatttgaaattgcaggcattaaaagtgattttaatggaaaagttattttaggaattagacctgaacacatggtgcaagcttacaatggattaattaagctcaatgtggatttagttgaaaaattaggatccgacaatcttgtttatggagaaatcaagggtaaaaaagatttattatgttatcgaacaccaggaaatgagaaaataaattcaggatctaaattagcattaaatattcaagataataaactttatatatttaataaaaaaactggcaaaagaataatttaa

SEQ ID NO: 271564 - DNA, 736 bp, Unknown
  Bacterial polypeptide expressing nucleotide sequence isolated from the Sargasso Sea
tatgtctgaaaatataattaacataaaaaatgtaaataagtggtttggagattttcaagtattaaaagatataaatcttgaagttaaaccaaaagaaaaaattgtagtttgtggtccatcaggatcaggtaaatcaactttaattagatgtataaatagacttgaagagcatcaacaaggagatattatagttgatggaaacactcttactgatgacacaaaaaatatagaacaaataaggtctgaagttggaatggtttttcaacaatttaatttatttccacatttatcagtattggataactgtacacttgcacctatatgggtaaaaaaattacccaaaaaagaagcagaagaactagcacttgagcatttagaaagagtacaaattcttgatcaagcgcaaaaatatcctggacagttatcaggaggacaacaacaaagagtagcaatagctagagctttatgcatgaaaccaaaaataatgctttttgatgaaccaacatcagctttagatcctgaaatgattaaagaagtactagatgtaatggtaaatttagccaaacaaggtatgacaatgatagtagttactcacgaaatgggttttgctaaagaagttgcagataaaatgatttttatggatgaaggaatgatagtagaaaaagctgatacatctgaattttttgcaaatccaaaaagcgatagaactaaactttttttgagccagatactatag

SEQ ID NO: 271565 - DNA, 763 bp, Unknown
  Bacterial polypeptide expressing nucleotide sequence isolated from the Sargasso Sea
tatgaatgacacatctcaaagtttcgttaaatttgaaaagatcgataaaagttatgatggagaagtactagtagtaaaaaacttaaacttggatattgctaaaggtgagtttgtaacaatgttgggtccatcaggatcaggtaaaacaacaactttgatgatgttagctggttttgaaacacctacaaacggtgaaatatttttagatactaaaccaataagtaaaataccgccctatgaaagagaaataggaatggtatttcaaaactatgctttatttccccatatgactgttgcggaaaatttgtcatttcctctagaagtaagaaaaatttcaaaaccagatattaaagaaaaagtgcagaaagctcttgatatggttgaattaggtaattttggtacaagatttccagctcaattatccggtggacaacagcaaagagtcgctttggccagagcacttgtatttgaaccacgcctagtattaatggatgagcctttaggtgcactcgataagaatttgcgtgaacagatgcaatacgaaataaaacatattcatgataggattggtataacagttgtctatgttactcatgatcaaagtgaagctttaacaatgtccaatagaatagcggtattcaatgatggagtagtacaacaattatctacacctgatatcttgtatgaaaaacctgaaaattcttttgttgcaaaatttataggggaaaataatacacttaatggtgttgttagggaagtgaat

SEQ ID NO: 271566 - DNA, 1099 bp, Unknown
  Bacterial polypeptide expressing nucleotide sequence isolated from the Sargasso Sea
tatggctaaggttgaattaaaaaacttaacaaagaaatacggtgaagttgtagctgttcaaaatatggatttaacaattcctcataatgaatttcttgtgctagtagggccttcaggatgtggaaaatcaacaacattgaggatgattgcaggattagaagaaatttctggaggtgaaatttttataggtgatcaaaaagttaatgaaaaagatccaaaagatcgaaatgtttctatggtttttcaaaattatgctctttatcctcatatgacagttgaagaaaatttaggtttcagtctaaaaatagcaaaagttaatccagatgaaattgaagcaaaagtaaaagacgcggttaatattttaggtttggaggatttgagaaaaagaaaaccttctcaactttctgggggacaaagacaaagagtagcaatgggcagagctattgttcgacgacctgatgcttttttatttgatgaacctctatctaatttagatgctaaactcagaacgcagatgagaacagaaataaaaaaactccatcaaaaacttaaaacaacagttatttacgtaacacacgatcaagtagaagccatgactttagctgatagaattataataatgaaagatggttttattgaacaaattggatctccaatagatgtttttaacaatccagtaaatgtttttgttgcaacttttatcggcagccccccaatgaatattattgaatgcgagataactaaaagtaataatcagataatgattaaattggataatgatattcttgttcattgccctaaagataaaataggaaaacttgctgacttaaaaaaagttattgttggtataagggcagaagatatagttccagtaaaaagcttttctaatgaaaaaaattcactatgggtttttagtaaagcaattgatcttgctgaaccgcttggtactgagacacaacttttttttaaattacaaaataaagaaataataagtcgtatgtacaatccaagaccagtagatgttggagaaagtattaattttcaaatagaaacaaataaaattcatttttttaattatgaaacaaaaaaagcaatctaa

SEQ ID NO: 271567 - DNA, 1177 bp, Unknown
  Bacterial polypeptide expressing nucleotide sequence isolated from the Sargasso Sea
atgacacacccggcagcaggcgcggcagaagtggcaggtgcggccggcctcggcgacgtggcggatgcggcggggctggcgaatccggccaatgtatcggtgcgcaacctgaagattcagctcggcgcgaatacggtgatcgaaaatctcgatctcgacgtgcgcgcgggcgagttcgtggtgctgctcggaccctcgggctgtggcaaatccaccttgctgcacagcattgcgggtctgatcgatgtgaccggcggcagcatcgaaattgccggcgaagacatgacctgggccgacccgaaagatcgccgcatcgcgctggtgtttcagtcgtatgcgttgtatccgaccatgagtgtcgagcgcaatctgtcgttcgcgttgcgcatcaacggcacgccgaaggcggaaatcgaacggcgcgtcacgcgggcctccgagatgctgcaactcggcccgctgctcaagcgcaagccggcgcaactctctggcgggcaacggcagcgcgtcgcgattggccgtgcgatcgtacgcgaggccgacgtgttcctgttcgacgaaccgctgtcgaatctcgacgccaagctgcgtaccgaattgcggcgcgagctcaagcaactgcaccagcgtctgggcgcgacgatgatctacgtgactcacgaccaggtggaagccatgacgctcgccacacgcatggccgtgatgcgcggcggcgtgatccagcagttcggcacgcccggggaagtctatgcgcggccggacaatctgtttgtcgcgacgtttctgggctcgcccgcgatgaatctgctcaagggcacactcgaagtgcgcgatgggtcgctgcacttttgcagcgcgaacttgcggttcgatgtgtcggcctatcctttcaaaaacctgccggcggatcgtctgccttgtgtgctcggcgtgcgggcagaagacgtgcgggtgagcgaacgcgtggattcgggcacggcaatgagcgagcgcgcgaacatttcactgattgagccgatgggcaaccaccgcgtcgtctggctcgattatcatggcgtgcagatcgcgtcgatcgatcagaccaagacgccgttggcgataggagatgccgcggcgttctcgttcgacggcgcacatatttcgctgttcgacgaggagggcggcgcgcgtctttagt

SEQ ID NO: 271568 - DNA, 736 bp, Unknown
  Bacterial polypeptide expressing nucleotide sequence isolated from the Sargasso Sea
atgtcggataaaataatacagattacagatatgaataagtggtttggagattttcaagtattaaaaaatattaatttacaagttgataagaataaaaaaattgttgtctgtggaccttcaggatcaggcaaatcaacattaattagatgtataaacagattagaagagcatcaagagggctcaatcattgtagatggaaatgaattaacagcagatactaaagatatagagaaaattagagctgaagttggaatggtatttcaacaatttaatctttttcctcatctttctattttagataattgtacattggcaccaatttgggtaaaaaaaatgccaaaaaaagatgcagaagatttagctattcaacatttagaaaaagtacaaattgcagatcaagcaaataaatacccaggacaactttctggcggtcaacaacaaagatgtgcaattgctagagcattatgtatggagccaaaaataatgctttttgatgaaccaacgtcagcattagatcctgagatgattaaagaagttttagatgctatggttaatcttgcaaaagcaggaatgacaatgattgtggtaacacatgagatgggatttgctaaagaggttgctgatgaagttatttttatggatgaaggcatgatagtagaaaaagcagataccaaagaattttttgcaaaccctaagagtgacagaactaagctgtttttaagtcaaatactataaa

SEQ ID NO: 271569 - DNA, 736 bp, Unknown
  Bacterial polypeptide expressing nucleotide sequence isolated from the Sargasso Sea
atgtcagatacaataatacaaataaaaaatgtaaataaatggtttggagattttcaagtattaaaggatattaatctagaagttcagcaaaaacagaaaattgttgtttgtggtccatcaggatcaggaaaatcaactttaataagatgtattaacagacttgaagagcaccaagaaggaaatataacagtagatggcaatgaactcactgaagatactaaagatattgaaaaaattagagcagaagtgggtatggtttttcagcaattcaatttatttcctcatttatcgattttagataattgcacattagctcctatttgggttaaaaaaatgccaaaaaaagatgctgaagaattagccatgaaacaattaaagcaagttcaaattgatgatcaggcaaataagtttccaggacaactttctggagggcaacaacaaagatgtgctattgctagagccctatgcatgcaaccaaaaataatgttattcgatgaacctacatcagctttagatcctgaaatgattaaagaagtgttagatgcaatggttaatttagctaatgccggcatgacaatgattgtggtaactcatgaaatgggttttgcaaaagaagtagctgatgaagttatttttatggacgaaggtatgatagtagaaaaaaacaacacaaaagaattctttgctaatccaaaaagtgataggacaaagctatttttaagtcaaattttataac

SEQ ID NO: 271570 - DNA, 552 bp, Unknown
  Bacterial polypeptide expressing nucleotide sequence isolated from the Sargasso Sea
gatgagtaaaattatagaacttaaaaatgtaaataaatggtttgacaagtttcaagctcttaaagaagtaaatcttgaagtaaatacacaagaaaaaattgtaatttgcggtccatccggatctggaaaatctacattaattagatgtattaaccgtttagaggaacatcaagaaggtcaaatcatcgtagacggaaaagaaatttcagaaaatactaaagatattgaaaaaatcagagctgaggttggcatggtgtttcaacaatttaatttatttccacacttatcaattttagataattgcacactcgcgcctatttgggtaaaaaaaatgcccaaaaaaaaagctgaagaaattgctatgaaaaatttagaacgtgttcaaatagcagatcaagcaaaaaaatttcctggacaattatcaggtggtcaacaacaaaggtcagcattagcacgtgctttatgcatggaaccgaaaattatgttatttgacgaaccaacctcagctttggatccagaaatgattaaggaagttttagactctatggttga

SEQ ID NO: 271571 - DNA, 499 bp, Unknown
  Bacterial polypeptide expressing nucleotide sequence isolated from the Sargasso Sea
atgaattcacaagacgaacaagcctttgtaaaatttgagaaaatcgacaaaagttatgatggtgaagttcttgtagtaaaaaatttaaatttagatatcgcaaaaggtgaattcgttacaatgcttggaccttcagggtcaggtaaaacaacaaccctaatgatgttggcaggttttgaaactcctacaaatggagagatctttcttgatggaatgcctataagtaaaataccaccatatgaaagagaaataggaatggtttttcaaaattatgctctttttcctcatatgacagttcaagaaaatttagctttcccacttgaagtaagaaagatgtctaaagaagaaacaaaaaacaaagtgaaaaaagctttggatatggttgagcttggtgattttggcactcgttttcctgctcaattatcagggggacaacagcaaagagttgcattagcaagagctcttgtttttgagcctaagattagttttaatggatgaa

SEQ ID NO: 271572 - DNA, 583 bp, Unknown
  Bacterial polypeptide expressing nucleotide sequence isolated from the Sargasso Sea
tatggagaataataccgcagtcataaatctcaagaatattaccaagcactatgagatgggctcgcaacttgtgagagctcttgacggaattaacattgaagttaaacgaaatgattatcttgccttcgtcggttcttctggatctggaaagtctaccatgctcaatattcttggctgtctcgataggccgacgtctggccaataccatctcaatggaaagaatgtggcagaactttatcagaatgatctctcggaaattagaaatttagaaatcggttttatttttcagagtttcaatttgctgcctagagctgatgcgcttaataatgtgatgcaaccattagtctatcgcaacattgggtttcataatcgcaggaagatggcaatggaggctctgactagagtgggacttaaagaacgagttgaccatcttcctaaccagctttcaggtggtcaacgtcaacgcgtagccatcgcccgtgcgctagttactcaaccttctattcttctagcagatgaaccaactggaaatttagattcaaagacaacactagaaattatgggagtgtttgatgagttacat

SEQ ID NO: 271573 - DNA, 1090 bp, Unknown
  Bacterial polypeptide expressing nucleotide sequence isolated from the Sargasso Sea
catgtcaaagaaccaacaatttgttagatttgataaagttgataaaagttatgatggaaaagtcttagttgttaaagacttaaatttagacattgccgagggtgaatttgtaactatgttgggaccatctggttctggaaaaacaacttgcctaatgatgttggcaggctttgaaactccaactaatggagaaatttatttagataaaaatccaatttcaaatattcctccgcataaaagaggaattggaatggtatttcaaaactatgcattatttcctcatatgacagtttatgaaaatttagcttttccattgagagttagaaaaatttcaaaagaagagatagataaaaaagttgataaagctttatcaatggtttcattgtcaggatttgaaaatagaatgccaggacaattatcaggtgggcaacaacaaagagttgcagttgcgagagctttagtgtttgatccacaagtggttcttatggatgaaccattaggagctttagacaaaaatttaagagaaagtatgcagtacgaaattaaacatattcatgaaagtattggtgtaacagtagtttatgttactcatgatcaaggagaagcacttacgatgtcaaatcgtattgcagtatttaatgatggtaaagttcaacaactatcaagtccagatgaactttatgaaaaaccagtaaattcttttgttgcagaatttattggagagaacaatagattttcgggtgaagttacagatatttcaaaaggaaaatgtaaagttaaattagaatcaggtacggagatattagcaaacccaattagagtgaaatctaaaggtgaaaaaactattgtttccttaagacctgaaagagcaataataaacccagaagataaaatggaaaacaaacataaaggcaaaatagaagaagtgatttatcatggtgatcacactagagttagattgaatttactgggtaataaagatttcatacttaaagttcctaatagttcagcaagaatggatataaaagttggtaacgaaattagcataggttggaacagcgaagactcgagagctttagacccaaaataa

SEQ ID NO: 271574 - DNA, 1027 bp, Unknown
  Bacterial polypeptide expressing nucleotide sequence isolated from the Sargasso Sea
tatggtatttgataatttaattattagagctagatctctaacaaaatcatatggaccagaacaggtattaacagattttaacttggacgtatggaaaggttcaatatttgggatactaggagtttcaggttctggaaaaacaacagccttaaggctgcttgctggttttgagaatccagattcaggttctattgaaatgcatgacagaatagtttttgatcaggaaacaactatacctccggaagatagaaatataggaatggttttccaagattatgctctatttccacatttaaatgttgaaaaaaatattgcatttggcttatcaactaaagacatcaataacggtcgtttagaagaagttttagaaatgtgtaatctaaaaaaatatagaaacaaatttcctcaagacatttcagggggccaacagcaaagagtagctctagcaagagcattagctcctaaaccagatgttgtactgttggatgagcctttcacaagcctagatgctcatatggcaagagaattaagagatgaagtagttcatctcttaagagaaacagagacaacagcaattctagtaactcatgatcaagaagaagcattatccgtctgtgatattgttagtgttcttgaagatggtaaagtaatgcaaagcgcaacacctcaagagatctatttaaacccagttagtcaaaatgttgccaactctgtcggggatccaaatatcattaaaggattttcaaaaaatggaagagtagagacagctctaggtacattcgtgtctgcatacgagggggcattagacgtttctataagaccagaatgtattgagctgagtcttgattcaaaaggtgcttacgtggtcaaagaatgtattttctatggacacgaccaagttgtttcttttgaaaatagtgcaggtcaaatatttagatcaagatcattaccttctacaatttttgaaactggagacaaaatttctatagaaatttcggaagttacaacttttccttcaaatacttga

SEQ ID NO: 271575 - DNA, 1021 bp, Unknown
  Bacterial polypeptide expressing nucleotide sequence isolated from the Sargasso Sea
ctggttgtggcaatctaccctacttcgaattatagcaggacttgaacaacaaactactggcgatgttttaattgataataaaaatgtaaacaaaattagagctagtgaaagagacttggcaatggtatttcagtcttatgctctctatcctcatcttacagtacgaagaaatttagaaacccctctaagactgagagattataattcatttgaaagacttcctttaattggaaatttttctccaaataaaaaagataaaacagattctataaatcaactagttaataagacctcggaaacactaaaaatttctgagttgcttgatagaaagccaggccagttatctggtggtcaaagacaaagggtagctcttggacgagcaatggtaagagagcctgttgcttttttaatggatgagcctttatcaaatttagatgcggcacttagagttcatatgcggtcagaattatcagaacttcataactcacttaaaactacttttgtttacgtaacacatgatcaggcggaagcattaactatgtcatctagaatggctgtgatgattgatggaaatttattacaacttgatactcctcaggaagtatacgataatccctcctcgctaagtgtggctcaattcgtaggaagtcctaaaataaatatttttaggggttcatcagattcaagtggaactgttagttttttaaatgttaacttaaaaagaaaaagtttagaaacaaacgcagaattaaatattggaattcgaccagaacatttagagattacaaatcaaagtgatgaaaatacttttagtgcaacagtagcttatagagaaaatttaggctccgacattttctttcatgtcaacactgaagagggaatgaacagaattattgtaagaggcatacctcaattgactcataatatttctaatggctcaaaagtaaatattaaaagagtttcagataaaactctattgtttaatcaagaaggaacaagggtaaagtttaataatgcataa

SEQ ID NO: 271576 - DNA, 1084 bp, Unknown
  Bacterial polypeptide expressing nucleotide sequence isolated from the Sargasso Sea
atgaacgaaaattttattcagataaatggaatttcaaagcattttggaaatgtcaaagcggttgatgacgtttctttttcaattagagaaggagaattcttttcattgttgggcccatcgggatgtggaaaaacaactctgcttcgattgctagcgggatttgaatatccaacaaatggtaatttattaatcgatggcagtgatatcactgcattgcctcccgataaaagacctacgaatatggtatttcaaaactatgccatatttccacacattaatgttgagcaaaatataaaatttggactaagaaaacttggtttgactgataacgaaataaaaaaaagagttgatgatgttttagctctcgtgaaacttgaaggctatgaggagagatttagcggccaattgtcaggtggccaaagacaacgtgtggcgttagcaagagctttagttagacagccaaaagttcttttattggatgagcctcttggagcactcgataaaaaattaagagatgaaatgcaacttgaattgagaaatttacagaaagaaattggaattacttttgtatttgttacccatgaccagcaagaggctataagcatgtctgatagagtcgcggttatgagtgaaggaaaaatacaacaactttctgctccaaatgaactttataagaatccagaaaatatttttgtaagtgatttcattggagaaacaaactttttaagggcgtcaacaaattcaaaagatggagagcatataaatgttacaattgaagatcttggtgatttcaaggtaaaaaataatttaaatatacccgagaattcatctgatgttgtttgtagtgttcgacctgagtcaatgatgatttctagaaataaatctgattgggatatttgcttagaagcaaaaataaatcagacttcctacttaggagaaatgacaaggttttatgttgaggtatcaggaattaataaagtaataacagtgtcatcacagcactttgacaatcagtcgtttgagaacaatacttgttttatcagtattagtttggaagatatcagtttactgcaaaaaaaatagc

SEQ ID NO: 271577 - DNA, 865 bp, Unknown
  Bacterial polypeptide expressing nucleotide sequence isolated from the Sargasso Sea
gagtttttacaaacccaggttcatcaatatacaaaaaagcttatagattcaattccgaaagaaaagcaggaattgactataacaaataccccattattgaaagcaaaagaggtaaatgttaattatttattgaagaagagtttttttaaacaagatacttatctaaatgcagtaaaagatgtaaatatcaatgtttatcctggcagtaccactggcctagtaggtgaatctggatcaggtaaatcatctttggccagagccttattaggattagaagaatctaaggggaagatatattttgaaggaagagatcttgttaatttttctagctcagaatttaggaatatgaagaaagattttcaaattgtatttcaagacccttttggttctctgtctcccaggcaaacaataggagatattattggagaaggattaaaagtacacttttccgatttaaataaacaacaaagagagcaaaaaattttagatgctttaacagacgttgagttagatcaaagttttattaataggttccctcatgaactttctggtggtcagagacaaagagtagcaatagcaagggcaattattctagaacccaaattaattttacttgatgagccaacttcggcattagatgtttcgatccagatgcaaattcttgagctcttaacaaaattacaaaatagattaggtctctcttatctttgtataagccatgacctcagagtaatcagagccttgtctgatgaagtttatgtaatgaaggatggaaaggtagtagaaaaaggaatggcagatcaggttttcaactttcctcagaatgaatacactaaagagttaatttcagctgctatacactaat

SEQ ID NO: 271578 - DNA, 1138 bp, Unknown
  Bacterial polypeptide expressing nucleotide sequence isolated from the Sargasso Sea
atggcaagcacctcgggcgtcaccaataaacccactacaaagacgcaagaaaaagtcctgcttaagattgagcgggtcagtaagctgtttgatgatgtgcgtgcagttgacgacgtatcattgacgatcaataaaggcgaaatttttgccttacttggaggctcaggctcgggtaagtctaccttgttgcgtatgctcgcggggttcgaaagaccgacctctgggcggatttttctcgatggtgaagatattaccgatctaccgccttatgaacgtccgatcaatatgatgtttcaatcctatgcgctatttccccatatgacagtggcacaaaatatcgcctttggtttaaagcaagacaagttaccgaaagctgaaattgagcaacgcgtacaggaaatgctcaagttggtacatatggagcaatacgggaaacgtaaaccgcatcagctttctggtggtcagcgccaacgggtcgcccttgctcgatctttggcaaaacgtccgaaattattattgcttgacgagccaatgggtgcactagataaaaaactgcgtactcagatgcagttagaagtggttgaaatcctcgaacgtgttggtgtgacctgtgtgatggtgacccatgatcaggaagaggccatgaccatggcgggccggatctcgattatgagtgatggttggatagctcaaactggctctcctatggatatctacgagagtccaaatagtcgcatgattgccgaatttatcggttcagtgaacctctttggcggtgagattgaagtggacgaagtcgaccacctcatcattaaacccaatgatttagtacagcctttctatgtgggttacggggtaaccaccagtgttgaagaaaaacacgtatggctagctgtccgccctgagaaaaccattatcagccgtgaacaacctgaaggtgaatacaactgggctaagggcatagtgcatgatattgcctatttaggtgggatctcggtgtactacattcgccttgaaaatggtcagattgtgcaatgcagtatgacaaaccgtgaacgccgcgccgaccatgcaacctgggatgatgaagtgtttatcagttgggaggacaccagtggcgtggtgttaagatcatgaa

SEQ ID NO: 271579 - DNA, 703 bp, Unknown
  Bacterial polypeptide expressing nucleotide sequence isolated from the Sargasso Sea
catgagcctcgtcgtcgatatccgcaagacctacgcaaacgccgagcgacgcttcacgctcgacgtgtcgttcacggcaacgacgcagcgcgtcgtgctgttcgggccgtccggtgcgggcaagagcatgacgctgcaggcaatcgccggcctgctgtcgcccgacgaaggtacgatcacgctgaacgacgaaccgctgttcgacgccgcgcgccgcatcgacgtgccgacccgcgagcggcgcgtcgcgtacctgttccaggattacgcgctgtttccgcatctgaacgtgcgccagaacattgcattcgggctcacgtcggggctgcgcaacccgcgcgcgaaagcggtgccgccggaagtcgcgtactggctgcaggcgttcgatctcgaagcgctcgcggggcagtatccatcgcaattgtcgggcgggcagaaacagcgcgtcgcgctggcgcgcgcactggtcgcgcaaccgcggattttgctgctcgacgaaccgttcgcggcgctagacggtgccatgcgccagcgcatgcgtcacgaactcgcggagctgcaggcgcggctcgatatcccgatggtgctgatctcgcacgatcccgacgatgtcgccgcgttcggcgaccaggtcgtgcagttgagcgaaggacgcgtgcaggcgactccgccgcacgccgagtggccgacgcgcgtcatgtga

SEQ ID NO: 271580 - DNA, 1078 bp, Unknown
  Bacterial polypeptide expressing nucleotide sequence isolated from the Sargasso Sea
atggatttgcatagtgcttttgtagtttttgatggggtacaaaaaagctatgatggtgaaacgttggtagtcaaagaccttaatttgactatagataagggtgagtttgtaaccatgttggggccctctggttctggcaaaacaacatgcttgatgatgctggcaggttttgagacagctactcatggtgtaatcaagttgggcggaaagccgatcaacaatatacctcctcacaaacgtgggatcggaatggtatttcagaattacgctctatttcctcacatgacagtgaatgaaaacttgtcctttcctttagaggttcggggtttaaacaaaacagacagagaaaaaaaggtagcaaatattttggacatggtacagatgggagagttttctggcagacgtccggcccagctttcggggggacaacagcagagaatcgctttagctcggtctcttgtttttgaacctgatttagttttaatggacgagccgttaggagctttggacaagcagttgagagagcatatgcaatacgagattaagcatattcacgataggctgggggtgacagtagtatatgtaactcatgatcaagcagaggcattaacaatgtctgacagagtggctgtatttgaagatggcaggattcagcaactagcaacgcctgaggatctgtatgaacggcctgacaacgctttcgttgctcagtttattggagaaaacaataaacttgttggtactattgaagaagttctcggagaggtggttatttgcagaacgaagttgggaacaacatttaaagctgaaaaggttaattgtggagggatcggatctcagacaactctgtcagttcgtcctgaaagggtgaagataggtaagtctggtgagaattcaactaaagcatatgttgaagaattaatatatttgggcgatcatatccgatgcagaatgaaagtagaagatgacgacaatttcatagttaaagttcccaatgcggaaggacataagcaattgaaggctggagaggatactactgtgagttggagtttgaaagattgtcgagcgttagattaga

SEQ ID NO: 271581 - DNA, 769 bp, Unknown
  Bacterial polypeptide expressing nucleotide sequence isolated from the Sargasso Sea
atgccagaaaataatctctccactgcaaacgctgagaccatcatttcaattactgggatgcacaaatggtttggtgattttcatgttctgaaggacatcgacctcgaagtaaagcagggagagaggattgtcatctgcggaccttctggatctggaaaatcaaccttgatcaggtgcatcaatcgtttggaggagcatcagcaaggaacgattgttgtagatggcacggagttgactcaagatttaaagaacatagaaatcatccgttcggaagtcggcatggtttttcaacaattcaatctgtttcctcatcttaccgtcctggaaaatctgacccttgcaccgatatgggttcgcaaaactccaaaggcagaagccgaagaaatggcaatgcagtacctggaaagggttaaaattcctgaacagtccaaaaagtacccgggtcagctttcgggaggtcagcaacaaagggttgccattgctcggtcactatgcatgaatccgaggatcatgctatttgatgaaccaacttccgcgctggaccctgagatgatcaaggaggtcctggacgtaatgattgagttggcagagagtggaatgacgatgcttgttgtcacccatgagatgggatttgcgactgcagtagcacaccgagtgatctttatggatgaaggagaaatcatcgaagcaaatgacccggacaattttttcaataatcctcagaacgatcgaaccaaactgttcctcagtcaaatcctccaacactgaa

SEQ ID NO: 271582 - DNA, 1093 bp, Unknown
  Bacterial polypeptide expressing nucleotide sequence isolated from the Sargasso Sea
atggcagatgttgatatgcggtctgtttccaaaagttttggtgataatgaagtgattcattcggtggatctccaggtggaagacaacgaattcatggttttcgttggaccgtcaggatgcggtaaatccactcttcttcgtctgatcgcaggattggaagatgttaaccagggggaaatcagcatcggtggagaacgggtcgagcatctgccgcctgccaaacgcgggattgcgatggtttttcagtcctacgctctctatcctcacatgaccgtttttgaaaacatgtccttcggacttagattggcaaaagccaagaaagattttattcagcagagggttcaggaagcagcagatgttttacaaattacggaattgctccaacgcaaacccaaggaactttcaggaggtcaacgccaaagggttgccatcggcagggcgattgttcgtgaacccaaagtttttctttttgatgagccgctttcgaacctggatgccaaactcagggtacaaatgcgtattgaattgacgaagcttcaccaaaaattgaacgcgacgatgatttacgtaacccatgaccaagttgaggctatgaccatggcagacaaaatcgtggtcctccgtgacggtcatgtggagcaagttggccgtcctttggatctttatcacaaccctgccaacctgtttgttgcaggatttattggttctcctgccatgaacatgatggaaggcaaaatttcgggtatttcggataagtcactggaggttgaacttgaaggccagcataaagtgaaggtcctctgcaatcctaatgaaaatgcccagacgggagcatcggtccatttcggggttcgtcctgaacaccttgacccggaaggtaatggcgacgcaaaaattccagcaaaagtttttgcagtagagagactcggcggggagacctacctttacgtcaatacccgggaaggaagagaattcactgtccacgctccaggagacaaggttgtttccgaaggagaggaaatctcagtcggcgtcagttccgaaagttgccatgttttcaatcagcagggaacagctttcgaacggttggctg

SEQ ID NO: 271583 - DNA, 1069 bp, Unknown
  Bacterial polypeptide expressing nucleotide sequence isolated from the Sargasso Sea
atggataaactctcggtcgacaacctgtttctcagctatggcgacaacccgattctgaagggtgtgtcgttcgacctgaaccccggcgaagtggtgtgcctgctcggcgcatcgggcagcggcaagaccaccctgctgcgcgcggtcgcgggactcgagcagccctcctcgggccgtatcgaactggacggcaaggtgttcttccacggcaccgctaaagtcaatctgccggtcgaacaacgctcgctcggtctcgtgtttcagtcgtatgcgctatggccgcatcgcaccgtggcggacaacgtcggctatggcttgaagttgcgacgcgtatcggccgctgagcagaaaaaacgcgtgcagtccgcgctcgaccagctcggcctcggccatctcgccgcgcgttatccgtatcagctttccggcggccagcaacagcgtgtggcgattgcgcgcgcgctggtctacaacccgcccgtcattctgctcgacgaaccgctgtcgaatctcgacgccaagctgcgtgaagaagcgcgcgcctggttgcgcgaactgatcgtttcgctgggtttgtccgcgttgtgcgtcacgcacgaccagacggaggcgatggcgatgtccgatcgcatcctgctgctgcgcaacgggcgcatcgaacaggaaggcacgccggccgaactgtatggcgcgccccgctcgctctataccgccgagttcatgggtagcaataaccgcatcgacgcgcgcgtcgccgcggtcgacggcgaacgcgtgacgctggccggcgacggctggcaattgcaggctcaggcgcgcgaagcgcttagcaccgggcaaaacgcacaggccgtgattcgcctcgagcgtgtgcaggtcgccgatggtccgggcgcgaaccgcctcgaggccgatctgattacctcgatgtatctcggcgaccgctgggaatacctgttccattgcggcgatctgcgcctgcgagccttcggccacgtgccgcgcgcggccggccgccactggattgaatttcccgccaacgactgctgggcgtttgcgcaggcgagctaac

SEQ ID NO: 271584 - DNA, 1081 bp, Unknown
  Bacterial polypeptide expressing nucleotide sequence isolated from the Sargasso Sea
atggaaaactcctcactcaacatttctatcaaaaatgtgacaaagaaatatgatgaattctacgcgttaaaagatatcagccttgatataacttcaggtgagtttatgacgctacttggcccatcgggctcaggaaaaacaacattactgatggttttagcgggttttactaatcctgactatggcagtgtaaagtttggagacgaagaggtaattttaaaaccacctcatcttagaggcatcggaatggtttttcaaaattatgctctgtttccacatatgacagtagaacaaaatgtcggctatccacagaaacttcgtggtgtaagtaaggcggagacttctagaactgttgatgaggccttggaaacagtgaagcttggaggattgggacatagaagagtagatgagctatctggcgggcaaaggcagagggtagcccttgcaagggccattgtattcaaaccgaaaattcttctgatggatgaacctctttcagcccttgacaaaaaactcagggaagaaatgcaaattgaactccgtcaacttcatgacaccctaaatatgaccacggtatacgtaacccacgaccaaaaagaagcactgactatgtcagacaggattactgtgataaacggtggagagctgatgcaattaggaacacctaacgaaatttatgaacacccagaaaacgggtttatcgctgattttattggggaatcgacacttcttcccgttcaagtaaaaaattcaaaagcaacaattggagaaacagaaataaacgtagctcagccattggacaaagatggaaacttttcattagtggtcaggccagagaaagtttttttggcgccttcgaaaaaaaagaaagacgaaaaccactttaatggcacgttgcttgactcaatctttcagggagaaagtcagctgcttgttattgaattagaaactgcaggtgcagaggcgcaggaacttagagtacgaattccaaatcaaagcgttacagacaaagcgctccccgctatcggcgaaaaggtcacaatcgctctcaaagttgcagacagctatgtggttagttgaa

SEQ ID NO: 271585 - DNA, 645 bp, Unknown
  Bacterial polypeptide expressing nucleotide sequence isolated from the Sargasso Sea
gatggcaaccaaagcatctgaaataagtgaattaataaaacagcaaattaaaaacttcgaacacgaagccaaatcatccgacgttgggacagttgtttctgtaacagatggtatcaccagaatacatggattaaacgacgtccagtacggagagatgatcgagtttcctggcgatacatttggcttggcccttaacttggaacaagactcagtcggagcagtggtattaggtgactacacccacatttctgagggagcacaagtaaaaacaaccaatagaattcttgaagtgccagttggcgaaggcttgcttggcagggttgtcgactccttgggaacgcctctcgatggaaaaggagctgtttcctcagaccaaacagcaccaatagaaaaagttgcaccaggcgtcatctcaagacagtcagtcgaccaaccagttcaaaccgggcttaagtcgattgatgcaatggtaccaatcggaagaggccagcgagagcttatcattggtgatagacaaacaggaaaaacagcggttgctgttgacaccataatcaaccaaaaaggcacagggataaaatgtatctacgttgcggtgggccagaaaaactcttcagttgccaatgtggttaagaagttagaggaaga

SEQ ID NO: 271586 - DNA, 823 bp, Unknown
  Bacterial polypeptide expressing nucleotide sequence isolated from the Sargasso Sea
aatggcaaaagttagcttacaaggtgtttcaaaattttacggaaaagttcaagcagtaaaaaaaattgatttagaaatcattgataaagaatttttagttttagttggtccatcgggttgtggcaaatcatcttctctaagaatgattgcaggattagaggaaatagatgagggtattatcaaaattggtgacaaagaaatgaataatctagaaccaagagaaagaaacgtatccatggtttttcaaaactatgctctttatcctcatatgacagtagaagaaaacttaggattttcattaaagatcgcaggacttggtaaaaaagaaattgaagaaagagtacatgaagctgcaggaattttagatataactgaatttttacaaagaaaaccatcacaattatcaggtggtcaaagacaaagagttgcaatgggaagagcaattgtaagaagaccagatgtttttttatttgatgaacctttatctaatttagatgcaaaattaagaaatcagatgaggacagaaattaaaagattacatcaaaaagtatcaacaacaattgtctatgttacgcatgatcaggttgaagcaatgactttagctgatcgaattgtaattatgaaagatggtataatagagcaaacaggaacaccattagatctatttgaaagaccagctacaaaatttgtagccacttttattggatctccttccatgaatatgatcaaagcttcaataataaagcataatgatcagctatctatgaaaacaaacgatggaattatagtgccagtacctaaagataaacaaaattctataagt

SEQ ID NO: 271587 - DNA, 796 bp, Unknown
  Bacterial polypeptide expressing nucleotide sequence isolated from the Sargasso Sea
tttggagattgatacctctgaatttgtttcattactaggcccctctggttgtggcaaaacaacagctcttaaaattatttcaggttttatcaaaccagattttggatcagtttcaattgaaaattttgatgtatctgaagtacctcctgaaaaaagaaatactgctatgtgttttcagtcttacgcactgtttccacatttaactgttaaagaaaacatcaaatttggattacatgaaaagaaaattcctcaggagcaagcaaatatattatttgaagaagcaatttcacaactatcacttgaaaaagaattatcaaaatatccaaacgaattatcaggagggcaacagcaacgtgttgctttaggtcgagctcttgtgacgcgaccaaaaattatattatttgatgaaccattatccaatcttgatgcaattcttagaggaagtgtccgtgatgaaataaaacgtgttcaatcagagtttaatttaaccgcaatttatgtcacgcatgatcaatctgaagcgttatctatttcagacagagtagtactaatgaaagatggaaaaattgaacaagttgataccccagaaaatatatatgatagtccctcatcttatttttctgcatcttttgttggtatctctaatattcaccaaattaataacatcaacaaaattgatgaaaatcaatattacgttgataccaatattggacaactaaaaatttattgtgataatttttttgataccaataattatataagttggagaccggaaaatgctatcattgaaagataa

SEQ ID NO: 271588 - DNA, 1078 bp, Unknown
  Bacterial polypeptide expressing nucleotide sequence isolated from the Sargasso Sea
aatgtcatcaattaatattaaatctcttaataaatactatggtaaaacccatgttataaaggatttttctctcgatataaaagatcaatctttcaccactttagtcggaccctctggatgtggtaaatcaacattattgagaatgatagcaggtttagaggaaataaactctggaactatctcaatagatgacagggaagttaatgatttatctcctaaagatagaaatatagctatggtttttcaatcttatgctttgtacccccacatgacagtttttgacaatatggcgtttggcctgaaattagaaaaaagatctaaagaagaaatcaatgagcgagttttagaagctgcaaaaacacttcaaatacaagactacttagagcgtaaacccaagcaattatcgggaggtcaacgtcaacgtgtagctattggaagagctattacaagaaaacctcaggtttttctttttgatgagcctctatctaacctagacgcagctttgagagttcaaatgagaattgaattagcaaaactacatgagcaacttaataccacaatggtttatgttacccatgatcaaactgaagcaatgactctctctaatgaaattgtagtcttagatcaaggagagatttctcaacaaggggaccccatagaactttacaataaaccaaataatttatttgtagcaggatttattggttcgccgaaaatgaattttatccctgctaaatacaaatcatcttcaagtgaaagtacagaggtagaagctttagggactaacttagtgcttccaaaaaagacaataagtcaatcagatgaaaaaattacatttggtatacgaccagaagatattcatataacagctaactcaaatcatgactgggaaagcaaagcatttgttgttgagaaattaggttcgaatacctttatatatttagaacatgataatgaaccagttgttgttgaagcacctggagatagtcctgttaaagttggcgatactattaaagtgaaatttgatttagatagatctaatttattcaattctcaaaatactaatataattggataa

SEQ ID NO: 271589 - DNA, 1108 bp, Unknown
  Bacterial polypeptide expressing nucleotide sequence isolated from the Sargasso Sea
atgattaaaaaagaaggaagttttaaatatttagaaatcaaaaatatcagtaaaaactttggggaaacattcgttttgaaaaatattcacttggatgtttttaagggagaatttttatgtttattaggaccaagtggttgtggaaaaacaactctgctaagaataatttctggcttagagagacaaacaaatggcgatattgttcaagatgggcttttaatttctaattcccccactgagaaaagagactttggaattgtttttcagtcatatgcattatttccaaaccttaatgcaaaacaaaatatagcttatggtcttgaaaataaaaaaataaataaaaaagaaattgaaaaaagaactaataatttacttcgtttggttggattagaaaaatattctgaccaatttccatctcaattatctggaggtcaacaacaaagagtggctttggcgagagccatggcattatctcctggtttacttttattagatgaacctctttcagccctagatgctcaagttagatcaaaattaagaaatgaaattaaactaatacaaaagaaacttaatttaactactatcatggttacccatgatcaaactgaagctttatctatggcagatagagttgtagtcatggaaagaggtcatattgctcaaattggaacaccttttgaattgtatgaaaatccaattacaccgtttgttgctgatttcatagggaagatgaatttgttaaaaggtaaatatgataagaaaaattgtgttttttattatcttaataatagatttttaatttcacagaatacagaatattcatttttagaaaactgcttgcttggtattagacctgaagatattgaaattattaagttcagaaaaaatatagaaaaggaagaaaatattcttagagtaaaaataaaagaaattacttatttaggaacaatttttagattaacagtagttttagaatctaagctagaagaaaatatttttgtagacgttatttctaatcaagtgatctctaataatttaaaaattggagattttatagatattaaattaaaaaaagaaaaaattaaattatttgaaagtaatttataag

SEQ ID NO: 271590 - DNA, 620 bp, Unknown
  Bacterial polypeptide expressing nucleotide sequence isolated from the Sargasso Sea
aatgtctgacccaataataaaaattcaaaatatgaataaatggttcggtgattttcaagttttaaaaaatataaatcttgaggttgaggcaaataaaaaaattgtagtatgtggaccatcaggatcgggtaaatctacattgattagatgtatcaatagattagaagagcaccaagagggagatataattgttgatggaaatgaactatcagaaaaaacgaaagatattgaaaaaattagagctgaagttggaatggtttttcaacaatttaatttatttccacacttgtcaattttagacaactgtactcttgcacctatctgggttaagaaaatgccaaaaaaagaggcccaagaactagccttagaccaacttaaaaaagtacaaatagatgatcaagcaaacaaatttcctggacaactttctggtggacaacaacaacgctgtgcaattgctagagcattgtgtatgcagcctaaaatcatgttatttgacgagccaacttcagcattagacccagaaatgattaaagaggtgcttgatgcaatggttaatcttgctaaaggcggaatgactatgattgttgtaacacatgagatgggttttgctaaagaggttg

SEQ ID NO: 271591 - DNA, 1078 bp, Unknown
  Bacterial polypeptide expressing nucleotide sequence isolated from the Sargasso Sea
gatggcagagataaatatttcaaacataaataaatcttttggatctacacatgtaattaaagatgtgtctctagacattaaaagtgaatctttcactgtattggttgggccaagtgggtgtggtaaatcaacaatgttaagaatgatagctggcttagaggaaatcaactcaggaacaatttcaatagatggacaagttgtgaatgatcttccaccaaaagaaagaaatatagcaatggtctttcaatcttatgctttgtatccacacatgacagtgtttgacaacatggcttttggtttaaaaattgaaaaaaaatctaaagaggaaattacagagagagttatggaggctgctaaaattcttcaaattgaggaatacttagagagaaaaccaaaacaattgtctggtggacaaagacaacgagttgcaattggaagagctattacaagaaaaccaaaagtttttttgtttgatgagccattgtctaatttagatgcagctttaagagtacagatgagagtagagcttgctaaattacatgatcaattaaatgcaacgatgatttatgttactcatgatcaaaccgaagcaatgacgcttgcagatgatatagttgtgttagatcaaggtattgtatctcaaaaaggatcaccattaaaactatataatgagccagaaaatttattcgttggtggatttattggctcaccaaagatgaactttattaattctaaagtaattagctcaaatagctctagcactgaagttgaaatttcagggcaaggaaaaattattgttcctaaaacttcagataaagtttcaccaggcgatactgtaaagattggtatcagaccagaacatatcttaatcaatactgctgaaaaatgctgggagagcaaagtattcgtaattgaaaaattaggctcttcaacatttttatatcttgaaaaagagggagaacctctagtagttcaaactgacggagcaagtaaagttaatgttggcgataatctctccttgagcgtcgatctaaacaaatgtcatttattcgatagtaataatttggcctttaaatag

SEQ ID NO: 271592 - DNA, 1099 bp, Unknown
  Bacterial polypeptide expressing nucleotide sequence isolated from the Sargasso Sea
tatgagcgcagatgtagagttaaataatgtttcagtaacatttgggagtttttatgcagctaaaagcgtaaacgtaaaaattaatggcggtgaatttttttctttcttgggaccatctggctgcggaaagacaacattgtttagagctatttcaggatttcaagatccctctgaaggatctgtgttaattgataacaaagatatgtctggcataggaccaaacaaaagacctacttctctcatattccagaatctagccttatttcctctaatgtcagtttctgaaaatattgctttctctcttgaggtcagaggagtctcaaagggagatagacaaaaaagagcagatgagcttttagagcttattgcattggaaggacagggcgaaaaaaaagtacatcaattatcaggaggacaaaaacaaagagtagcaatcgcaagagcattggctgttgaaccaaaagttttattattagacgaacctttgtctgcattagatctaaaactaagacaaagaatgagaaccgagttaagagaaattcaaaaaagggttaacataacatttatttatattactcatgaccaaggtgaggcattaacaatgtctgataggattgctgtaatgaacgaaggggaaattgagcagataggaccttgtgatgaagtttataacaacccattaaccccttttgttgcaacttttgttggagaaaacaatcctctatttggaaaagtaaaagagatcaatcaaaataagattaaaatagaaactcctgatggtgatttcgtatcgacaatgaacgaaaataagaaattaaacattggggatgaagcaattgcttttgtaagacctgagtcattattcataccaagagatggagacagttttgataatttaattgatgtaaatattgaaagctttgagtttgagggaaatataaaaaatttctacgcaacgttaaagtctggaacaaagatcaagttttctattccaaatgcaattgatacttcatcaatctcttcaggtacaaaattacaacttggcttcgagtccacaaagtcttcaattttacctaaagcacaattagccatagattaa

SEQ ID NO: 271593 - DNA, 1096 bp, Unknown
  Bacterial polypeptide expressing nucleotide sequence isolated from the Sargasso Sea
atgaaaacattaagaattgaggaattatcaaaaaactttggatctactgaagttctaagaaaaattaatctagagatagacgaaggtaatttcttagttcttttaggcccttcaggctgtggtaaatcaaccttgctaaacattattgcaggcttagaaaccattaatgaaggtaatgttcatattgatgattacaatgtaagtaaagttgaaccaaaagaccgaaatattgcaatggtatttcaatcctacgcattgtacccatcaatgaacgttcgtgagaatatgatttttggcctaaaacaagcaaaagtttcaaaagaaaaaatagaagagcagctagaaaaagtatcaaaatttttacaagtagacgcattattagagagaaaaccttcacagttatcaggtgggcaaagacaacgtgttgcaattggtagagcgcttgtcagagaaccaagaatatttttatttgatgaacctttgtctaatttagatgcaaaattaagagttgagatgagacgagaaataaaaaaacttcatcaacaacttaaaacaacagtagtttatgtaacgcacgatcaaacagaagcaatgagtttaggtacaaatattgcaatcatgaatcacggtgtaatccaacaaaatgatactccagaaaatatttacaataaacctagcaatacctttgttgcagattttattggatctccttcaatgaatttgattaaaggtaatcttaaagaaagttctaacaaaatttcatttattgcaaatggatctaatgtcgaaattccaataaatggatataacttcaatgaaaaatctaatttgaataataaagaagttttttttggaattagaccagagcatattttctttaaaaaatttaatgaaagtgattttgagatctctttaaaagctgatttaagtgagtatataggtcatgagcagataatgacatttgattatgaaaatcaagaagtattagctaaatttccctcaacaataaaaattgagctctcaaaaaatacaaatttattttttgatttaacgcaaatttccttatttgatgctaaaacagaagagaggatataaa

SEQ ID NO: 271594 - DNA, 1099 bp, Unknown
  Bacterial polypeptide expressing nucleotide sequence isolated from the Sargasso Sea
atgaaaactttaaaaattgaagatttatcaaaaaactttggaactactgaggttttaaaaaaaataaatttggatatcgatgaaggtaattttttagtacttttaggcccttcaggatgtggaaaatcaacattattaaacataatagctgggctagaaacgattaatgaaggaaatgtttatatcgatgactacaatgtaagcaaagtagaaccaaaagacaggaatatagcaatggttttccaatcgtacgctttatatccgtctatgaatgttaaagaaaatatgatttttggtcttaaacaagctaaagcctcaaaagaaaaaattgaagagcaactcaaaaaagtttcatcttttttgaaggtagacgagttgttaaaaagaaaaccttcacaattatcaggaggtcaaaggcaacgtgtagcaatagggagagccttagtaagagaacctagaatatttttatttgatgaaccattatcaaatctagatgctaaattaagagtagaaatgaggcgtgaaattaaaaagctacaccaaacattaaaaacaactgttgtttatgttacacatgatcaaacagaagctatgagcttaggcacaaaaattgcaataatgaaccatggtgtaatccagcagaacgatacgcctgaaattatatataataagccgagcaatacatttgtagcagattttattggttcaccatcaatgaatttaattcaaggtaaaataataaaaaaatcagatcaatttttatttattggagataactccaatgccgcgcatataccgataaaaaattataattttgataagaatacggaattaaataataaagaaatttattttgggattagaccagaacatatttattataaaaaaagtaatgatgatgattttgagattaaattaaaagctgaactaagcgaatatataggaaatgaacaaattataacattcaattattctgagcaagaaattttagctaaatttccatcaactgcaaaaatagaaataaacaaagaaataaatttatattttgacttaagtcaaatttctttatttgataaaaattcaaaggaaaggatataaa

SEQ ID NO: 271595 - DNA, 883 bp, Unknown
  Bacterial polypeptide expressing nucleotide sequence isolated from the Sargasso Sea
atgaaagatgttgaaccaaatttgaggcctacaaatatggttttccagaactatgccattttcccacatttgaatgttgaagaaaatgttgcatatggccttagaaaaatgaaactctctaaaaatgaaaaattagagatgattaacaaatctcttaatctggttggtctatcaggattaaacaataggtcttcaaatgccttgtctggaggacaaaaacaaagagttgctctagcaagggccctcatcctaaaaccgaaagttttactacttgatgaaccgttatcagccttagataaaaaattaagagagcaaatgcaatcggaattgcgtcacttacaaagagcagttggtattacttttatattagttacacatgaccaagaagaagcattaacaatgagtgataaagtggctgtaatgtttgatggtaaagtagagcaaattgcttcacctagggaactatatgaaaagcctatttctcagagagtagcttcattcattggagcaatgaattttataaatggaaaagtaatcaaagatgacaaaaaaattatatttgaaactaaaatttttggtgagttaagtttatctaaaaaacaaatctcaggaaaaaatcaaaatggcaaactaaccttgggaattaggcctgagttggtttctattaaatctttaaaagaaacttctaaagaattgatgatgggaaccatcaaagatatttcatattttggtgaaacaacatactacaaaataagctgtgataaaagtaatgagctattaactgtttcatcacaaaattcttttggtcaaattagttttaaagttggagaacaagtaaagtttaaaattgatatagaaagtgtagttggtttctttgattaat

SEQ ID NO: 271596 - DNA, 1138 bp, Unknown
  Bacterial polypeptide expressing nucleotide sequence isolated from the Sargasso Sea
tatggcaagcacctcgggcgtcaccaacaaacccactacaaagacgcaagaaaaagtcctgcttaagattgagcgggtcagtaaattgttcgacgatgtacgcgcggttgacgacgtatcattgacgattaataaaggtgagatttttgctttacttgggggctctggctcgggtaagtcgaccttattgcgtatgctcgcggggttcgaaagacccacctctgggcggatttttctcgacggtgaagatattaccgatttgcccccctacgaacgtcccatcaatatgatgttccagtcttatgcgctctttccccatatgacggtcgcgcaaaatatcgccttcggtttaaagcaagataagttacccaaagcggaaattgagcaaagggtgcaagaaatgctcaagctggtgcatatggaacaatatggcaaacgtaagccgcatcagctttccggtggtcagcgccaacgggtggcgttagctcgctccctcgcgaaacgtcctaaattattgctgctcgatgagccgatgggggcactggataaaaagctgcgcactcaaatgcagttagaagtggtagaaattcttgaacgtgttggcgtgacctgtgtaatggtgacccatgatcaggaagaagccatgaccatggcgggccgaatttcgattatgagcgacggttggattgcccaaaccggctcacccatggacatttacgagagtcccaacagccgcatgattgccgaatttatcggttcggtgaacctctttggcggcgagattgaagtggacgaagtcgaccacctcatcattaaacccaataacttagctcagcccttctatgtgggttacggggtaacgaccagtgccgaagaaaagcatgtgtggttagcggtacgtcccgaaaaaaccattatcagccgtgagcaacccgaaggtgagtacaactgggccaagggtattgtgcatgacatcgcctacttaggtggcatttcggtgtactacattcgcctcgaaaacggccaaatagtgcaatgcagtatgactaaccgtgaacgccgtgccgaccatgcgacatgggatgatgaagtgttcatcagctgggaggacaccagtggcgtggtgttaagatcatga

SEQ ID NO: 271597 - DNA, 739 bp, Unknown
  Bacterial polypeptide expressing nucleotide sequence isolated from the Sargasso Sea
gctgctcccgatggagccaacggttgctttaaacggggtctggcatagctacggcggtgcctctgacggctggaccctgaagggggtggatcttcaggtggcgccaggggagctgctgggcctgctgggcccctccggctgtggcaagaccaccctgcttcgcttgattgcaggcttcgaacgcccccggcgcggcacggtgcagctggatcagcgcatggtggctggagattggatctggatggaaccggaacgtcggggcgttggcatggtgttccaggattacgccctcttccctcacctgaacgcttggcagaacgccagtttcggtttgccccggcggaatcccaaccgtgagcgcgtggcctggttgtttgcattgttggggctgaaggggctcgagcagcgctacccgcaccagctctccggtggccagcggcaacggctggcgttggcacgcgctctggccccagcgcccagggtggttctgcttgatgagcctttttcaagcctggatgtggaggtgaggctccgcctgcgcagtgagctctcctccgtactggacgcctgcggtgcgagcggcgtgattgtcacccatgaccccggagaagctctggcgatctgcgatcgcgttgccgtcatgcgggacggcgtgctgcatcaatgtgcatcgccccccgagatcgtgaggtcaccggcgacgccttttgttggatcctttgtgcttcaacgcaattga

SEQ ID NO: 271598 - DNA, 1105 bp, Unknown
  Bacterial polypeptide expressing nucleotide sequence isolated from the Sargasso Sea
catggctcaaatcgaatttcagcaggtcggcaagcagtacgcgaacgggcacgttgcactggacaacctgaatctgcagataaaggacaaggagtttctcgttctgctcggaccctccggatgcggcaagtcgacgacgctcaacatgatcgccggcctggaggaggtcacgcagggcagcttgcggttcgacgacgtcgaagtcaacgccttgccggcgcatcggcgcgatgtggcgatggtgtttcaaagctacgcgctgtatccgcacaagaacgtgtacgacaacatcgccttcggcctgcggatgcgcaaatatccgcaacaggagatcgatgcgcgggtgcgaagagccgcgcagtcgcttgaaatcgagcatctgcttgaccggcgccccgggcaactgtcgggcgggcagcgccagcgcgttgcgctcggccgcgcaatggtgcgccagcccgcggtctttctgatggacgaaccgttgtcgaacctcgacgcagcgctgcgcgtgtcgatgcgcgcaagcatcaaggcattgcatcagtcgatgcagacgaccttcgtgtacgtgacgcacgatcaggccgaagcgctcacgctggccgaccgcatcgtcgtgatgcgccagggcgtcgtgcagcagatcggctcgccggacgacatctacgagcggcctgccaataagtttgtcgccaattttctcggcagcccgccgatcaactttatcgacggcgtgctgatgcaaggcgagcgcggtttgcatttttgcagcggcgatctttcgctcgccctcgatgacgaaacgcaacgcctgcttgccggatgcagtggccgggccgtgtcggccggcattcgtgccgaggacatcgacgagcatggcgagtcggccgattgttcgctgacgggcgatatcgcttcgttgctgccggtcggctccgatcagttcatcggcctgcaatgtttggggcagtcgatgttttttcgtgtcggcaaggagcgttcatgcaaggtcggtgaacgtgtgtccctatcgatcaaccgccgccgtctgcacctgttcgaccaggcgagcggtgtgaacctgaaggcgcagaacgcatga

SEQ ID NO: 271599 - DNA, 1018 bp, Unknown
  Bacterial polypeptide expressing nucleotide sequence isolated from the Sargasso Sea
tatagacaaatcctttggtgaaaaccatgtaattagtaaatttaacctagaggttgaaaaaggtaaatttatagtcttgcttggaccatctggatgcggaaaatctacactactaaggatgatagctggattagaaaaaatagataaagggaaaatctttttggaaaataatcttcttaatgatttgttaccttccaaaaggcaaatcgcaatggttttccaatcatatgctttgtatccccacatgaatgtttttcaaaatatctcttttggtcttaaatctgaaaaaatttcaaaaaatgaaattaaagataaagtaattgaagcagcaaaaattttaaaaattgaagaacttttggatagaagaccaaaggaactttcagggggacagaggcagcgagttgctattgggagggctataactagaaatcctaaattatttttatttgatgaacctctttctaatttagatgcagctctgaggtcagagatgagagttgaaatttcaaaattacataagaaacttaaaagtaatattgtatacgtaactcatgatcaaattgaggccatgactttagctgataaaattgtgataatgaataaaggaaaaattgaacaatttggaactccggacgaaatttataataatccaaacaatatttttgtagctgaatttattggaaatcctaaaatgaatatctttaaggtcaaaactagagatgttattaatataaatacatttaaattattcaataaagaaattaaatttgaaaattcaaaatttgaaaatgatttttatgtaggtatcaggccagaacatctatctttagaaaatataagtgaaattgcagttgaaattaaagtcgatcttattgaaaatttaggttccgagaaaattatatacacacatataaatggtactgaaataagaataaaaactactagaaatattaaagataagaatattacaatttacttaccaaaaaataagatatatttattcgacaataataaaaaa

SEQ ID NO: 271600 - DNA, 1023 bp, Unknown
  Bacterial polypeptide expressing nucleotide sequence isolated from the Sargasso Sea
aatgacagagaaaaagactactattgaactaaaaaaattaaataagaagttcggagatattattgctgttaacaatgtgtcattaaagatctctgaaaatgatttttttaccatattgggtccatctggttgtggaaaatcaactatcttaagattaattgctggtcttgaagttcaagatagtggcgctgttataataaacaataaggactctagttttgtccaagcaaacgagagaccggttaatatggtctttcagtcatacgctctcttcccacatcttagtgtgcgagataatattgaatttggcctaaaattaaaaaaaataagcaatacagatataaaaataagagttgaagaaatactcgaacttgtaaaaatgaatggttatgatttcaagctgccatcagaactttcgggcggccaaagacaaagagtcgcccttgcacgagcaattgttaataaacccaaaatcgtacttttagacgaaccactctcggcattggatgcaaatttgagaatggaaatgcaacaagagcttgttaatattcaacgtaatctgaaaatgacttttatgcttgtgacccacgatcaagatgaagcactctcaatatcatcaaaaattgcaatcatggaaaatggaaaaattattgagacaaatactgcaacaaatatgtatgaatacccatcaaaaaaatttagtgccgagttcctcggacgaataaatataatagaaggtgcttcatcttttattgataatagaatactttttaatagtgacacatttggaaaaattaatctcgaacgagatattaaattacccaaagatggtgtgcttggaattagacctgaaaaaataatcattgagactggacttaataaacagaagaatagagtaagcatgaacggcacaattaccaattggacctattatggtgatgtaagctatattacgattgagctgaagaataaatcaaaagtttatattaatgttcaaaacatccatagaaactctttacagga

SEQ ID NO: 271601 - DNA, 1027 bp, Unknown
  Bacterial polypeptide expressing nucleotide sequence isolated from the Sargasso Sea
atggtattcgataatttaattataagagcaagatccctttcaaaatcttatggcagtgaagatgttttaacggatttcaatattgacatttggtacggatcaatatttggaattttaggtgtctctggttctggtaaaacaacagcattaagacttctagctggttttgaaaacccagatcaaggaacaatcgaaatgcataacaaagttatatttgatgagaaaactaacgtaccacctgaaaaaagaaaaattggtatggtatttcaagattatgcactattccctcatttaacagttgaaaaaaatattgcttttggtttaagtaaagaagaaattaaaaacggaagactcgatgaggtaataagtatgacaaacttaagttcatacagaaaaaaatttccacaggatatatcaggaggtcaacaacaaagggtagcgctagcaagagcattggctccaaatccagaagtggttttgctagacgaacctttcacaagtttagatgcacagatggcaagagacttaagagaagaagttgtttcattattaagagccactaaaacaactggaatcatagttactcatgatcaggaagaagcactatcagtttgtgatattgtgagtgttcttgaaaatggtaaagtgatccaaagtgctactccgcaggaaatatatctcaatccaataagtcaaactgttgcaaactctgttggagatccaaatatcataaaaggagtatcaacaaacggaagagttaaaacatcattaggaacattcaattctgcttatgatggagaattagatgtttcgataagacctgaatgtattgaagtcaacctagattccaatggggattatgtcgttaaagaatgtattttttatgggcatgatcaagtaatttcatttgaaaacaaaaacggtgagatatttagagcaagatctttgccatctatgatttttgaaccaggtgataaagtttgtatagatgtgactgaggtcactacatttccttcaaagaactgaa

SEQ ID NO: 271602 - DNA, 736 bp, Unknown
  Bacterial polypeptide expressing nucleotide sequence isolated from the Sargasso Sea
atgtccgaaccaataattaaaattgaaggtatgaataaatggtttggagattttcaagttttaaaagatattaatttagcagtagaaaaaaataaaaaaattgttgtttgcggaccatctggatcaggtaaatcaactcttataaggtgtattaatagattggaagaacatcaaaaaggtacaatagttgttgatggaactgagttaacagaaaatacaaaaaatatagaagctataagggcagaagttggaatggtatttcaacaatttaatttatttccgcatttatctattttagataattgcacattagctccaatatgggtaaaaaaaatgcccaaaaaagatgcagaagatttggcaatgaaacaattggaacaagttcaaatagtagaccaagctcaaaaatttcctggacaattatctggtggacaacaacaaagatgtgcaattgcaagagccttatgtatggagcccaaaattatgttattcgatgaaccaacatcagcacttgatcctgaaatgattaaagaagtactggatgcaatggttaatctagctaaagctggtatgaccatgatagttgtaactcatgaaatgggctttgccaaagaagttgcggatgaagtaatattcatggatgaaggtatgattgtagaaaaagcagaaactaaagagttttttgccaacccaaaaagccacagaactaaactatttttaagtcaaattctataac

SEQ ID NO: 271603 - DNA, 700 bp, Unknown
  Bacterial polypeptide expressing nucleotide sequence isolated from the Sargasso Sea
tatgagccaattattaatgccgtctaccgacgcgatgattacgctggaaaacgtcaacaaatggtacggacagtttcacgtcctgaaaaacatcaacctgaaggtaaaacagggagagcgcatcgtattatgcgggccttccggttcggggaaatcgacaactatccgctgtattaaccatctggaagaacatcagcaaggacgcattgtggtggatgggattgaactcaatgaagacatccgcaatattgagcgcgtccgacaagaagttggcatggtctttcagcactttaatctctttcctcatttaactgtcctgcaaaactgcacactggcgcctatctgggtgcaaaagatgccgaaaaaagaggctgaagtactggcaatgcactacctcgagcgggtccgcattgccgaacatgcgcataaatatcccgggcaaatctctggtggacaacaacagcgcgtggccattgcacgctcgctgtgtatgaaacccaaaatcatgttatttgatgaacccacatcagcgttggatcctgaaatggtaaaagaagtgctggataccatgataggtctggcacaatcgggcatgaccatgctatgtgtaacccatgaaatgggctttgcccgcacagtagctgaccgggtgatctttatggatcttggcgagattgtggaacaggcacccaccggatga

SEQ ID NO: 271604 - DNA, 1651 bp, Unknown
  Bacterial polypeptide expressing nucleotide sequence isolated from the Sargasso Sea
gatgaatctgtttctgcactatctcggcctgccgtatctgcttagcggcatcggctttacgatcgaggtcacggtcctcgggctggcgggcggtctgatcgtggggctggtgctcgcgagcatgcaactgagcaaggtggggccgctcgccgctatcgcgcgtggctacacggtcatttttcgcggtacgccgctgattctgcaactcgtgttcgcgtacgacgcgttgccgcacatcgggttgaagttgagcgcgatcggtgcagcgggtctcgcgctcgcggcgaacgaggggccgttcattgcggaaatcctgcgcgcgggtgtgctcggtgtcgaccgtggacaactgctcgcggggcaggcgctcggcatgacgccgaccgtgctgctgcgccgcgtgatcgcgccgcaggcgatccgcacgatgataccggcgctcggcaacgaatcggtcagcgcgctgaagaactcgtcgctggcttccgtgatcgcggtcgacgaactgacgttgcgcagcacccagctcgcgtcgtcgacgttcgatttcttttcgatcttctttgcgtccgggctgatgtatctcgtgctgaccggcgcgatcgccgcgatccagttgttcgcagaaaccgcgctcgatctcgatcgtagcccgtctggacgctttgcacggctgctgccgtggcgccgagcccgggtgacgacgaacccgcccggcgcgggcgtgtcgttacccgccgatgcgttgcccgagccgacgccgtcgcacggacacctgccagaagggggtaacgggcgtaacggacgcaacggacgtgacgctcacgcagagcgcgcgcagcgctacgcggcgctccagaaacagagtccgaccgtgcaggtgaaggggctcagcaagcgttacggcgagcagacggtgctcgacggctttgacctcaccgtccgcttcggcgaagttatcgcgctgcttgggccgagcggatcgggaaaaagcacgctgctgcgctgtatcaatcacctggagcagtgggatgcgggggaaatccgcgtcggcggcaagcgcctgggttttcgggtcgatggtcagccgatgacccaggccgatatcgccaacgagcgtgcgagtgccggcgtcggcatggtgttccagcatttcaacctgttcagccatctgacggcgtgcgagaacatcgcggggccgctgcgctgggtgcacggcgtggcgcctgccgatgccgagcgtagagcacgtgagctgctcgaacgcgtcggcctcagtcatcgcgccgacgcgttgccgcgccatctgtccgggggccagcagcagcgcgtcgcgattgcccgcgcgcttgcgcccaatcctcgcgtgctgctgcttgacgaaccgacgtccgcgctcgaccccgagctggtcggcgaagtgctcgacgtcatccagcggctcgtagacgaaggtggtctgacgatgatcatctcgacgcaccagttgcgcttcgccgatcaggtcgccgatcgcgtcgtgttcatgagcggcggcgcggtggtcgaacaggggcctgcgcacgacgtgctcacacgcccatgccatccattgacggcgcgattcctgagcgtgatgggtgccgacgaccggctcgaagtcgcgtcctga

SEQ ID NO: 271605 - DNA, 874 bp, Unknown
  Bacterial polypeptide expressing nucleotide sequence isolated from the Sargasso Sea
ctgatcattaaaggcagtctcagacgcgcccgctttacgctggatctcgacctgaatgtggatctgactaaacccttgggcatcatgggggcgaccggcgccggcaagacaaccctgctgcgcgtgatcgccgggctggagccggatttttcggggcaggtcgaattttgcggcgagatctggcatgacggggatcaccctgatcaggtgccgacgcaccaacggggcctgggtgtggtttttcaggatggtcggttgctaccggggcgcacggtagagcgcaatcttgcctttgcccagcagcgcgcccgcaatgcggatgcggcggtgagctatgaagccctgacggaggcactcgacttaaatcatctgttgagcgagcccgcagaggtgctttctggcggagagcgacagcgggtagcactcgcccgcgctctgctggtgggaccacgattgctcctgctggatgaaccccttgcggcgaatgatgcagatcatcgacagcaactgatcgcgcatctctctgagtggctgcccgcagccggcatcccgctggtctgtgtgtctcacgccgcccatgagctggcacaactgacgcgacagctcattgtgcttgagcgcggcgctgtctcggcgcagggggaaacacacctcctgctggcagcacagcgcgaagccatcaataactcagctcaggcagtcactgcagtcgtgatgtcgaccgattcggagcacaacacggccacactccagcttgaccaagatacggtgggcgcagttgtttcaggggagcgggtgctgctccagcccgacccggaggatttaggactcggcgccgcgctgcagccacagcccgaacagaatcagcactagg

SEQ ID NO: 271606 - DNA, 536 bp, Unknown
  Bacterial polypeptide expressing nucleotide sequence isolated from the Sargasso Sea
aatgtcagaccctattattaaaattcaaaaaatgaataaatggtttggtgattttcaagttttaaaagatattaatctttcagttgaaaaaaataaaaaaattgtagtttgtggtccatctggctcaggaaaatcaactttaattaggtgtataaatagattagaagaacatcaagaaggaacaatagttgtcgatggcacagaattatcagaagacacaaaaaatatagagcatgtaagagctgaagtgggtatggtatttcagcaatttaatttatttccacatctttctattttagataactgtactcttgcgccaatatgggtaaaaaagtatccaaaaaaaaaggcagaagagctagcaatgaaccagttagaaaaagtacagatttctgaccaagctttaaagtttcctggacaattatctggtggacaacaacaaagatgcgcgatagctcgagctttatgcatggagcccaaaattatgctcttcgatgaacctacttcagcgctagatccagaaatgattaaagaag

SEQ ID NO: 271607 - DNA, 1054 bp, Unknown
  Bacterial polypeptide expressing nucleotide sequence isolated from the Sargasso Sea
tatgtttgatttaaaattaaataatttatcaaaaaagtttgatcaactttttgcagttaatgatgtaagttttgatattaactcaggagagtttttttctatattaggtccctcaggttgtggcaaatcaactacattaagaatgattgcaggctttgttatgcctacaaacggtgagattttacttggtgataataatattacatatgttgctccagaaaaaagaaatataggatttgtttttcaaaactatgcgatttttcctcatatgaatgtttttgataatattgcatttggccttagaatgagagatgttgataagtcaacaattagtgaaaaagtcaaatcgtctctagaacaggtaaatttattaggttttgaaaatcgatttcaaagagagttatcaggaggcgaacaacaaagggttgcccttgctagagttttggtaactgaacctcaaattcttctactagatgaacctttaagtgcattagataaaaaactaagagaagaaatgaagatttggattaaagaattacaaaaaaaattaaaaattacaactgtttatgtaactcatgatcaatcagaagccttaactatgtctgacagaatagctattatggataaaggaaaaatttcacaaataggctcgccaaaagatatttatgaaaagcctcaaaataaatttgttgctgattttattggtatatcaaattttttacctttagaaaaaaaatcagttcaaggagattatatagaagtttcatttaatgacaaaatttttaaagtattgaataataataatggagaaaatttatctggggttttaaggcctgaacatattatctttgaaccagataataatgaaaatattatttcatttgatggtaatgtagaaataatttcataccaaggtgctttaattagatatattattaatgttaatggatttaagtttacttcagaattttcaaatttaccaaaatcaaaacaatataaagaaggtgaaaaagtaagatttggttttgataaaaataacctagttttagtttaa

SEQ ID NO: 271608 - DNA, 478 bp, Unknown
  Bacterial polypeptide expressing nucleotide sequence isolated from the Sargasso Sea
aatgattcgccttgagaaactgagcagagagttccaggtaggaaatcaggttgttcatgcgcttgatgaggtcgacctggaaattaaggaaaatgaatacgtttccatcatgggcgtttcaggatcaggtaagtcaacccttctcaatatattagggttattagatacaccaacatccggtgattacattttatcaggcatcaatacatcaaagatggacgatgacgaaatggcaggcatccgatcaacaaagatcggttttgtatttcaatcctttcatctgattccaaggctgacagcattcgaaaatatcgagatgccaatgattctatctggaatgaatccaaaagaacgatcagagaaggtcagctcagctcttgaaaaagttggcttgaccgatcgttcagatcacaaaccagagcaactttctggaggtcaaagacaaagagttgcaatagcaagatccattgtcatggaa

SEQ ID NO: 271609 - DNA, 1054 bp, Unknown
  Bacterial polypeptide expressing nucleotide sequence isolated from the Sargasso Sea
aatgtcagaaattataattaaaaatctaaacaaatcttttggcaataacaaagtaattaatgattttaatataaaaattactgatggtgaatttattgtattagtaggaccatctggttgtggaaagtctacgttgttaagaatgatttcaggtcttgaaaaagttgatgaaggagaaatttttttagataacaaagtaatcaataatttaattccttcaaaaagaggaatagcaatggtttttcaatcatatgctttatatccacacatgaatgtttatgaaaatatgtctttcggtcttaaaatggaaaaactttctaaaaatgatattgagaaaaaagtaaacgaggccgctaaaactcttcaaattcaagatttgcttaatagaaaaccaaaagaactttctggaggtcaaagacaaagagttgctataggtagagcgataacaagaaatccaaaactttttttatttgatgaaccactatctaatttagatgcagcattacgatcagagatgagagtagaaatttcaaaacttcataagaatataaattctaatattatttatgtcactcatgatcaggttgaagcaatgacacttgctgacagaatagtgattttaaataatggaaatatagaacagtttggtacacctaatgaaatttatgctgatccaaataatgtttttgttgcagaatttattggttcaccgaagatgaatataattaaattaaataaagagaatatagttaataataatacaataaatttttttaataatgagattgtgtttgaaaatatcaattttaaagatgaaatttatttaggtataaggcctgagcacataagtgtaacagattcccatccaataaagatagatgttaaaatcgatcttgtagaaaatttaggatttgaaaaaattatctattcaactgcttctaacaaagagattaatgtaaaaacatcagataatgtatcgggtaagactttaaaaatatctttcacaaaagataaaatatatctgtttgacaaaaatagaaataggataagatag

SEQ ID NO: 271610 - DNA, 358 bp, Unknown
  Bacterial polypeptide expressing nucleotide sequence isolated from the Sargasso Sea
attggaatctgcatccttttctagatttcctcatgaattatcaggaggacaaagacaaagagttgcaatcgcaagagcaatcattcttgaaccaaaactcattttattagacgaaccaacttcagcgttagatgtgtcaattcagatgcaaatcttaaatttattgaaagagcttcaatctagacttgggctggcttacttgtgcattagtcatgacctgaaagtcattagatttttatctgactacgtgtacgttatgaaagacggaaatatagttgaggatggaatttctgatgatttattcgaatctcctaatcatatttatactcaagaacttctagcagcgtcaattgcttaa

SEQ ID NO: 271611 - DNA, 1114 bp, Unknown
  Bacterial polypeptide expressing nucleotide sequence isolated from the Sargasso Sea
atgagtgctgatgtagaattacaaaatgtttctgttacttttggcagtttttatgctgctaaaaatgttagtgttaaaattaatgaaggagagttttttagttttttaggaccgtctggttgcggtaagactactttgttacgtgcaatatctggtttccttgatccatctgaaggaaaagtattaataggtggtcaagatatgtctggtataggacctaacaaaagacctacatcattaatatttcaaaatctagctcttttcccacttatgtctgttgctgataatatagctttttcacttgaagtgagaggtgttagcaaaataaaaagaagagaaagagcagatgaattattagaattgattgctttatctggtcaaggagataaaaaagttcatgaattatcaggaggtcaaagacaaagagttgctatagcaagagctttggcaatagaaccagaagtattacttcttgacgagcctttatctgcattagatttaaagttacgtcaaaaaatgagaactgaactgagagcaattcaaaaaagagttggtataacatttatttatataactcatgatcaaggagaggctctaacaatgtctgacagggtagctgtaatgaatgaaggagaactagaacaagtaggattatgtgatgacgtttatgactttccgaacactccatttgttgcaacttttgttggtgaaaataatgctttttattctaaagtaatatctagtgatggcgaaacagtcaaagtagagtcagaaggtaatgtttttatagctaaagcaggtaaaattgatgatcaaaataaacatacttttaataaaggtgatgatgttcttatgtttattagaccagaatctatttttattaataatcaaaataataaattagataataattttgtagccaaacttaatacaattgaatttgaaggaaatttgaaaaatatatatcttagtattaatcctaatatgaatgttagatttagtgtgcctaacgcagttgatactagtgatctttcacaaaataaaaatgttgaattaaccttttcctctgaaaaagctgtggttcttccaaaaggctcacttgcagtagattaaa

SEQ ID NO: 271612 - DNA, 578 bp, Unknown
  Bacterial polypeptide expressing nucleotide sequence isolated from the Sargasso Sea
aatgattaaagcttataaattaaaaaataatgttaaaaatcttaaaacagtctcaataaataatttgagtcacttttatggaaaaaatgagaataaaaaacaagttcttaacgacgttaatttaaatattgataagggagagttggttcttttgaaaggaccttctggatgtggtaaaacaactcttttaacattaattggtgctttgagaacatgtcaaagtggagatttaactgtattaaataatcagttaaatggagcatcaaggaaaactcgtcagattcttagaagaagtattggaatgatttttcaaggtcacaatcttcttagatgtttaacagcagaacaaaatgtccagatgggcgccgatttaataaaaggcttaacatatttgcaaagacgtgagatagcacgtaattggttgtcagcagtaggattagaagaacatcataaaaaattgccaaatgacttatctggtggtcagaaacagagagtagcaattgctcgagctttatctgctaagccaaaactcttattagcagatgaacctacttctgcattagatagcgtcacaggaa

SEQ ID NO: 271613 - DNA, 736 bp, Unknown
  Bacterial polypeptide expressing nucleotide sequence isolated from the Sargasso Sea
tatgtcagatagcatcatccaaattaataatatgaacaaatggtttggtgactttcaagttttaaaaaagattaatttagaagttaaaccaaaagaaaaaattgtagtatgtggtccatcaggatctggaaaatcaactttgattagatgcatcaatagattagaggaacatcaagagggaaatattattgttgatggaactgaattaacagaggatacaaaaaatattgaacaaataagagctgaagttggtatggtattccaacaatttaatttatttcctcatttatcaattttagataattgtacattagctcctatttgggtaaaaaaaatgccgaagaaagaagctgaggaactggcattaaaacatttagaaagagtacaaattcttgatcaatcacaaaaatacccaggtcaattatctggaggacaacaacaaagagcagcaatagcaagagctttatgtatggagccaaaaataatgctttttgatgaacctacatctgcattagatccagaaatgattaaagaagtgcttgatgtaatggtaaatcttgcaaaacaaggtatgactatgattgttgtaactcatgaaatgggctttgctaaagaagttgctgatcaaatgatatttatggatgagggaatgatagtagaaaaagccgatactaaggaattttttgataatcctaaaagtgatagaactaaactttttctcagccagatactatag

SEQ ID NO: 271614 - DNA, 745 bp, Unknown
  Bacterial polypeptide expressing nucleotide sequence isolated from the Sargasso Sea
atgtcagaaaattcaataatttcattacaaaatgttaataaatggtttggtgatttccaagttctaaaagatgtgaatttagaggtaaaaaagaaagaaagaatagttgtctgtggtccttcaggatcaggtaaatcaacaatgataagatgcattaatcgattagaagaacatcaagaaggaaaaattgtcgtagatggaattgaacttacaggtaatctaaaaaatatcgacagtgttagaaaagaagtaggtatggtatttcaacagtttaacttgtttcctcatttatctgtaaaagaaaacataacattagctccaatctgggtaaaaaaaatgcctaaagctgaagcagaagagctcgcaatgaaacaattagagattgttaagatcccagagcaagcaaataaatatcccggtcaactatctggaggccagcaacaaagagtggctattgcaagatcccttgcaatgaaccctaacattatgctttttgatgagccaacttcagctctagatcctgaaatgatcaaagaagttttagatgttatggttgatttagctgaaggtggaatgactatgatcgttgttacacacgaaatgggttttgctaaaacagttgctgatagaatggtgtttatggatgaaggaaaaattgttgaggaagctagcccagataagttttttaataatccagagagtgatcgtacaaagttatttttaagtcagattcttcatcagtaat

SEQ ID NO: 271615 - DNA, 1057 bp, Unknown
  Bacterial polypeptide expressing nucleotide sequence isolated from the Sargasso Sea
atgtattctgtagatttaaaaaatgtaacaaaaaaatggggagatgttactgctgttgatcaagttaatctccatattaatgaaggtgaattcgttgtacttttaggcccctcaggatgtggtaaaacaactactatgcgtcttgttgctggattagaagatataactgatggtgagataaaaattggtgatgaagttgtaaatgatgttgatccaagaaaaagagacgtatcaatggtatttcaaaattatagtcttttcccccatatgactgttagaaataatattgcttatcctctaaaaatgaaaaaaattccaagttcagaacacgataaacttattaaagaagtttctactcttgttgaattgcaagatttattacaccgtaaaccagccgaactatcaggtggtcaaaggcaacgtgttgctttagcaagagcaatagttcgtcaaccacgtgtttttttaatggatgagcctctttcaaatcttgatgctatattaagagttacaacgagagcagaattaaaaaatctacatcaccgacttggtgtaacgacaatatatgtaactcatgatcaagtagaagcgatgacacttgcaaatagaattgctgttatgaaccatggtaaacttttgcagtttgataaaccccaagtaatatttgatgatccatcttctaaatttgttgctggctttattggttcacctgcaatgaatttaattgatggtcgtgttgaaaataaaaaatttatttctgatagtctaacaacatcttttgatattgattatgaaggtgatattactcttggagttagacctgataaaattcaaatagtcagtgatactgatacaaataatggatctgctaaagtttattctgttgaattaactggtgaagcaaatctagtaacatttaaatcaaataatcaaaatctaattgttaaaactgataaaaatacacattatgatattgattctattttaaaattaaacttcaataaggaagactgttacttttttgatattaatagtgaagaaaggttaagaatatgaa

SEQ ID NO: 271616 - DNA, 520 bp, Unknown
  Bacterial polypeptide expressing nucleotide sequence isolated from the Sargasso Sea
tatgagcataattcaagctaaagaagtaaagaaatggtttggagacttccaagctctaaagggcatatcaatggaagtttcagaaggagaagtactagttatttgcggtccttctggttctggtaaatcaacgttcattagatgtattaacagacttgaacaacatcaagagggagaaataatcgttgatggtatcgaattaactaatgatttaaaaaatattgaagcaattagatcagaagttggaatggtttttcagagctttaatttgtttccacatataactgttatgcaaaatataaccttagctcctatttgggttagaaaaaaaagtagaagcgaatccgaagaaaaagcaatggaacttcttgaaagaatggggatacctgaacaagcaaataaatatccagggcaactatctggaggacaacaacaaagagttgcaattgcaagagcattagcaatggaaccaaaaataatgttatttgatgaacctacttctgcgttagatcctgaaatg

SEQ ID NO: 271617 - DNA, 1180 bp, Unknown
  Bacterial polypeptide expressing nucleotide sequence isolated from the Sargasso Sea
tatgggtgcaatacaaataaactctgttggaaaaatttatccaaatgggacaagagctttagaagatgtaaatattgagattaatgatggagaatttgttgttcttgttggcccttcaggctgtggtaaaacaactcttctgagaatggttgcaggacttgaagatatcacagaaggagaaatctctattggagagaagatagttaacgaggtagcaccaaaagatagagatatcgctatggtttttcaaaattatgcactttatccacatatgtcggtgtatgacaatatggctttctcattaaaacttcgtaaattatctaaaagtgaaattgatgaaaaagttaaagaggctgcaaaaattttagaaattggtgaattgcttgaacgaaaacctaaggcattatctggaggccaacgtcaacgtgttgctatgggtagagcaattgtaagaaatccagaagcatttctaatggatgaacctctttcgaatttagatgcaaaattaagagttcaaatgagagctgaattaggccaactacatactcaacttgagacgacaacgctttatgttactcatgatcaagttgaagcaatgacaatgggagacagggtggctgtaatacgaaaaggtgagcttcaacagatagacacaccaagagaaatttatttatatccaaaaaatatttttgtagctggatttattggcagtccttctatgaactttgtttacgcaactgtgaaagtctcatcaaagaatataactttaacatttggtgaagattcaattaaatgtaacacagatgaaaataagaaattaaaagaatttgatggacaagagattgtattaggaataagaccggaagcatttgaggattcaaattatgctaattcaaaagagttttcagagaaattaaacattggagtatctttaattgaacaactaggttcggattcttatattcatttttataaagatataaaacctgtgcagacagaagctattgaagagattcttgctgatgagggtgaagatatatctgttttaggagatgaaaccaaatttattgcaagagttaatccaaactcagttgttaaagaaggagataaaattactttagcaattgatccttcaaaattacattattttgatccggtctctggaaacgcaatagtttaa

SEQ ID NO: 271618 - DNA, 621 bp, Unknown
  Bacterial polypeptide expressing nucleotide sequence isolated from the Sargasso Sea
aatgacgccagctatagaaattaataatgtaagcaaatggtttggagaattcagagcattaaatgatgttagtttgaaaacatctcaaggagagaaagttgtaatttgtggaccttctggatcaggaaaatcaacacttgtaagatgtataaatagattggaaatacaccaagaaggaagtattaaagttcagggtattgagttaacagataaaaattcttccatatcagaaattcgttctgaagtagggatggtttttcagcagttcaatcttttccctcacttaacagttctacaaaatttaacacttggacctaccaaagcacttggactttcacagaaagaagctaatgaaagagcttttaaattattagaaagagtaaggatacctgaacaagctgataaaagacctggtcacttatcaggtggccaacagcagagagttgcaatagcaagatcactttgcatggaacctaaaataatgctttttgacgagccaacttcggcacttgatcctgagatgatatctgaagttttagatgtaatagtcgatttggctaatgaaggaatgacaatggtagttgtaacgcacgaaatgggatttgctagaaaagttgcaga

SEQ ID NO: 271619 - DNA, 1102 bp, Unknown
  Bacterial polypeptide expressing nucleotide sequence isolated from the Sargasso Sea
atgagtgcaagtgtagaactaaaaaatgcttctgtcacatttggtaatttttatgctgcaaaaaatataaatgttaaaataaatggtggggagttttttagttttttagggccatcaggatgtggtaaaactactctacttagagcgatttctggttttcaagacttaagtgaaggcgaggttctgattgatggggtagatatgtccagaattggccccaacaaaaggccaacttctcttatttttcaaaaccttgcattatttccccttatgtcagtagcagataatatttcattttcattagaagttcgaggtgttgataaaaagaaaagaaggagcagggcaaatgaattaatcgaactaatggcacttgatggacaaggagaaaaaatggttcaccaattatctggtggacaaaaacaaagagttgcaattgcaagagctttagcaattgagccaaaagttttattacttgatgagccattatcagccctagatttaaaattaaggcagagaatgagaactgaattaagggcaatacaaaaaagagtaaatattacatttatatacataacgcacgatcagagtgaggctcttacaatgtctgatagaattgcagttatgaatgagggggagatagaacaaattgggctgtgtgcagatgtttataataagccgcttacaccatttgtagcaacttttgttggtgagaataattcaatcgatggaaagttaaccgaagtaagttctaatgaggcaacaatttctaccgagaatgggagttttaaatcatatttaaataattcagatggacaatatagtattggcgatgaagtctttctgtttattagaccagaagctcttgagctagcaaagaatggtaattttgacaatgtaattgatatcaatattgatacctttgagtttgagggaaatattaaaaactattttgctaagctaggttcaaacaaaaaaataaaattttctatccctaattctgtcgacactagtgatatacactctgggtcaaatatccaaataggttttaataaattaaatacagtcattttaaaaaaaggacaacttgctgttgatacatgat

SEQ ID NO: 271620 - DNA, 989 bp, Unknown
  Bacterial polypeptide expressing nucleotide sequence isolated from the Sargasso Sea
tatgggagaaattaacatcaaatcagctgggaaaatttactcaaatggtaccagagctttagaagatgtaagtataactattaatgacggtgaatttgttgttcttgttgggccttcagggtgtggaaaaactacattacttagaatggttgctggtttagaagatattacagaaggtgaaattgcaattggtgataaaacagtcaacgaggttgcacctaaagatagagacattgcaatggttttccaaaattatgctctatatcctcatatgtcggtttatgacaatatggctttttccctaaaacttagaaaactacctaaggatgaaatagaacaaaaagttaaagatgctgcaaaaactttagaaattagtgaacttttagagaggaaacccaaagctttatctggaggacaaagacaaagagttgcaatgggaagagcaattgtaagaagtccacaagcatttttgatggatgaaccactttctaatctagacgctaaattaagagtacaaatgagagctgagttaggtcaattacatactcaacttcaaacaacaaccctgtacgttactcatgatcaggttgaagctatgacaatgggcgatagagttgcagtgattagaaaaggtgaactgcaacaaatagatactcctagagaaatttattcaaatccaaaaaatatatttgtggctggattcattggaagtccgtcaatgaattttgtatacgcaaaaataaaaacagaaaatgacgtaattgaattaacttttggagacaatcaaattagatataaagatcaaaaaaaagaaaaactgaaatcattcgaaaataaagagataatccttggaattagacctgaggcttttgaagatggttattttgcaaatgaagctgactattccgaaagtatgaaagttaaagtatctttactagaacaacttggatcagattcatatgttcatttttacaaagacataaagcctg

SEQ ID NO: 271621 - DNA, 770 bp, Unknown
  Bacterial polypeptide expressing nucleotide sequence isolated from the Sargasso Sea
aatgatgggtacggcaaaagatttaattaatgaaaaaataaaaaatgctgcaactctattacaaataaatgaattacttaaaagaaaaccctctcaactctctggaggccaaagacagcgtgtagccattggtagagctttggttagagatgcaaaagtttttttatttgacgaacctttaagtaatcttgatgcaaaattaagagctgaactacgctatgaaattaaaaaacttcatagagatttatcaaatactatgatttacgttactcatgatcaaatagaagctatgacgcttgcggaccgtatatctgttatgaaagatggattaatacagcaattagatacacctaaacaaatttacaacaaaccagctaatttatttgtggctggttttattggatctccaagcatgaattttttaaatgccaaatttaaaaaatcaaatcaaaatataattgttgggaataaacaaattgatatttctaaatatgaaaacataaataaattgattaatgatcaagaggttgtttttggaataagacctgaaaatataaacatagaaaaaaatgaaaattctattcaatgtaaagttgaattagtggaacctatgggggcagatactcttgtgtggactagtgttgaaggtaacccgatatctattaggctagaaggaagttcaaattttaatttaaatgatgaaataaacatttcatttgatataaataaatcttcaatatttgatagtaaaactgaggagagaatttaat

SEQ ID NO: 271622 - DNA, 1000 bp, Unknown
  Bacterial polypeptide expressing nucleotide sequence isolated from the Sargasso Sea
agttcttttaggaccatctggttgtggaaaatcaactttattaaatataattgcgggattagaaactataaatgagggcgatgtttttattgatgattacaatgttagtaaagtagagccaaaagaccgtaatattgctatggtttttcaatcttacgctttatatccatctatgaatgttaaggagaacatgatttttggtcttaaacaggcaaaaacatcaaaagaaaaaatagaggaacaattagaaaaagtctcaaaatttctacaggtagatcaattgttagagagaaaaccttctcaattatctggaggacaacgacaacgtgttgcaattggtagagctctcgtaagggagccaagaatatttttgtttgacgaacctttatctaacttggatgcaaagctaagggttgagatgaggagagaaataaaaaaacttcatcaacagttaaaaacaacagttgtttatgtgactcatgaccaaaccgaggctatgagtttgggaaccaatattgcaatcatgaatcatggagtaattcagcaaaatgatactccagaaaaaatttataataagccaagcaatacttttgttgcggattttattggatctccatcaatgaatctcattaagggaaatttaaaagaaaattcagaaaacttattttttacagtgagtggttcaaatttagaaattccaataaaagattatgattttaaagataaatcaaatttaaaaaataaagaggttttctttggtattagacctgagcatatcttctttaaaaaatttaatgaaagtgattttgaaattaacttaagagcagatcttagtgagtacataggtcatgagcaaataatgacttttgattatgcaaatcaagaagtgttagcaaaatttccatctacaattaaaatagacctaggtaaagagacaaaattatactttgatttaatacaggcatctctatttgatgctcaaacagaggagagaatataa

SEQ ID NO: 271623 - DNA, 1078 bp, Unknown
  Bacterial polypeptide expressing nucleotide sequence isolated from the Sargasso Sea
gttgttgatcatcttattaagtggtttggctcagatcgcgcggtggacgacgtctcatttagtattgaaaagggtaaattcctgaccttacttgggccttccggatgtgggaaaacaacaactcttatgagcatagcgggtcttcatacaatagactccggggaaataagagtgggggatgtgatatacacctcgagagagaaaaaaatatttctggcgccggaaaaaagagatattggaatggttttccagagttatgcaatttggccccatatgacggtagctcagaatgttgcttatcccttagagataaggaaaattgaaagagtagagatagacgaacgagttgataaagtactagcactagtaggcttgacagagatgtcagataagttggcaacgcaactatctggaggacaacaacagcgggcgtctcttgctcgggcaatagtgtccaatccacttttgttgttatttgatgagcctttatctaacttggatttaaaacttcgggaacaaatgcgagtagagctcaagcggatacaaaatgaggttggtatcacttctatttatgtcactcacgaccagtcagaagccttagtgatgagtgacgaaattatagtaatgagcaaagggcaaatagagcagagggatattccactctcggtttattccaagccagcaaatggttatgtaagtcagtttattggggtagctaatctcatcaagggtaccttggtaaagaaaaataaaagtggtactggggttgcagatcttaataaaactatcaaaggccttacttgcgattgtgtcttatcatcagagctggagagtggtgatgatgtattagtttccattaggcccgaaaacatttcagtgtccaaaaataatactggtggcaagggaataaagggcaaggtggatttggctattttcttaggtaattgtgttgattgccgtatttcttctgatggttttgagtggaaagtactttcgcaccctcgagagaatttacaacaaggagactcggtttttttacatcttgatccaaaacatactttggcagttaccccatgac

SEQ ID NO: 271624 - DNA, 1228 bp, Unknown
  Bacterial polypeptide expressing nucleotide sequence isolated from the Sargasso Sea
aatggcaatacgtgatggcggcgacgctgctgggaatgatcccgccgctcgtcgtcgtgctggcgatgcagcgctggttcgtgcgcggcctcgtcgattccgagaaatgaatgacggacggcaaccgggagaaagaccaagaatggctgcgctgagcttgaagggcgtcaggaaatcctacgacggcaagcagcacgtgctgcatggcatcgacgtggagatcgccgacggcgaattcatcgtgctggtcggcccgtcgggctgcggcaagtcgacgttgctgcggatgatcgcggggctcgagacggtgacggacggcgagatcgcgatcggcgagcgcgtcgtcaacgcgctggagccgaaggatcgcgacatcgcgatggtgttccagaactatgcgctgtacccgcacatgacggtcgcgcagaacatgggctacgggttgaagatccgcgggatcgagcgcgcgacgatcgactcgcgggtggcggcggccgcgaagatcctcgaactcgagccgctgctcgcgcggcggccgcgcgagctgtcgggcggccagcggcagcgcgtcgcgatggggcgtgcgatcgtgcgcgagccgtcggtgttcctgttcgacgagccgttgtcgaacctcgatgcgaagctgcgcgtgcagatgcggctcgagatccagcggctgcatgcgcggctcgcgacgacgagcgtgtacgtgacgcacgaccagatcgaggcgatgacgctcgcgcagcgcgtgatcgtgatgaaccgcggctacgcggaacagatcggtgcgccggtcgacgtgtacgagaaaccggcgacggtgttcgtcgcgggcttcatcggctctcctgcgatgaacctgatgcacggccggctgtcggaagacggcgcgactttcactgtcgcgggcggcggccccgcgctgccggtctccggcgcgcccggcatcggccgcgagatcgccgtcgggcgcgactgggtgctcggcgtgcggccggaacacatgacgccgcagccgggcgtcgcgcaggcgacgctgccggtcgattcgtgcgagctgctcggcgcggacaatctcgcgcacggccgctggggcaatcacgacgtcgcggtgcgcctgccgcacgcggatcgccccgcgcgcggcacggcgctggcggccgcgctgcctgcgcaccggctgcatttcttcgatcccgagaccggcaagcgtgccggctga

SEQ ID NO: 271625 - DNA, 790 bp, Unknown
  Bacterial polypeptide expressing nucleotide sequence isolated from the Sargasso Sea
aatgactgcagcaattgagataaaaaatgtaagcaaatggtttggggattttaaagcgcttgatgatgttagtctcgcaacttctcagggcgagaaagtggttatttgtggaccttctggttcaggaaaatcgacactcgtaagatgtataaataggctggaaatacatcaagaaggcaccataaaagttcgtggaattgagcttactgataatgattcttctatttctgaaattcgatctgaagtaggaatggtattccaacagtttaacctttttcctcacttaacagttcttcaaaatttaactcttggcccaactaaagcattgggtctttctcagaaggaagctaatgaaagagcatttaaattgttagagagggtaagaatacctgagcaagcaaataaaaagcctggtcatttatctggaggtcaacaacaaagagttgctatagctagatcactatgtatggaaccaaaaattatgctttttgatgaacctacatcagctcttgatccagaaatgatttctgaagttttggatgtgattgttgatttggcaaatgagggcatgacaatggtagttgttacacacgaaatgggttttgctcgaaaagtagcagacagaatggtctttatggatgaaggcaagattgttgaaatgggaaaaccaaaagatttttttgattcaccaaaaaccgaaagatgtaaattatttttgaaccaaaattttacaacattaaaagtaagcactatgaaaaaacattttttaattttagtatttttattaata

SEQ ID NO: 271626 - DNA, 1078 bp, Unknown
  Bacterial polypeptide expressing nucleotide sequence isolated from the Sargasso Sea
gatggcagagataaatatttcgaaaattaataaatcttttgggtccacacatgtaatcaaagatgtgtctttagaaattaaaagtgaatctttcactgtatttgttggaccaagtggctgtggtaaatcaacaatgctaaggatgattgctggtttagaagaggttaactcaggaacaatttcaattgatggacaagttattaatgatcttccaccatcagaaagaaatatagcaatggtctttcaatcatatgctttgtatccacacatgacagtgttcgataacatggcttttggtttagagattgaaaaaaaatctaaagaagaaattacagagagagttatggaggctgctaaaattcttcaaattgaggaatacttggagagaaaaccaaaacaattgtcaggaggacaaagacaaagagttgcaattggtagagcaattacaagaaagccaaaagtatttttatttgatgaacctttatctaatttagatgcagctttaagagttcagatgagagtagagcttgctaaattacatgatcaattaaatgcaacgatgatttatgttactcacgatcaaactgaagcaatgacacttgcagatgacatagttgtattagatcatggaatagtatctcaaaaaggatcacctttaaaattatacaatgaaccagaaaatttatttgttggtggttttattggttcaccaaagatgaactttatcaattctaaagttataagctctaatagctctggaaccgaagttgaaatttcaggacaaggaaaaattattgttccaaaaacttcagataaagtttcacctggcgatagtgtaaagattggtatcagacctgaacatatcttaattaatactggtgaaaaatgctggaatagtaaggtgttcgtaattgaaaaattaggttcatctacatttctatatttagagaaagatggagaaccattagttgttcaaacagatggtgagaattcagctaatattggagacaatttaagcttaagttttgatctaaataaatgtcatttatttgacgaaaataatttagcttttaaataa

SEQ ID NO: 271627 - DNA, 736 bp, Unknown
  Bacterial polypeptide expressing nucleotide sequence isolated from the Sargasso Sea
aatgtcatcaatgattcaattctccaaagttaacaagtggtacggcgagtatcaagcgctcgtcgacgtcacggccgaggtgaagcgaggcgaagtggtggtcgtgtgcggcccttccggatcgggcaaatccacgcttatccgtaccgtcaaccgcctcgaggagattcacggtggcgggatcacggtcgacggaacgagcgtccaccaggcgtcgttgaatctgaaccggtttcgcacccgtgtcggcttcgtgtttcagcagttcaacctctttcctcatctgtcggcgctcgacaacgtgtgtcttgcgccgatgaaggcagccgggagaagccgtgcggatgcgaagcggcaggcattggcgttgctcgatcgcgtgggcctcgccagcaaggccaactcgtatccgcagcagttatccggaggacagcagcaacgcgtggcgatcgcccgcgcgctggcaatggagccgccggtgatgctgttcgacgagccgacgagcgcgctcgatcccgagatggtgggtgaagtgctcagcgtgatgaaatcgcttgccagagatgggatgacgatgatgtgcgtgactcacgagatgggattcgcgcgcgaggtgagcgacagcgtctggttcatggatcgcggcgcgattctcgaggtggccgatccgcaaacgttctttcgatcgccgcagcacccacgcgcacaggcatttctgtccgacttacgtcactag

SEQ ID NO: 271628 - DNA, 1018 bp, Unknown
  Bacterial polypeptide expressing nucleotide sequence isolated from the Sargasso Sea
atggccaagctaaaaataaaaaatttaaaaaaaagttatgaaaatgaacaaataatacatggtgttaatttagaaattaaagatggcgaatttgttgtttttgtaggcccatcaggatgtgggaaatctactttattaagattgattgctggattagaagaaattactgagggagaaatttctattggagacaaagttgtaaatgaaatagcaccttcaaaaaggggtgttgctatggtatttcaaaactatgctctttatcctcatatgaatgtttataaaaacatgtcctttgctttaagacaggcgagaatgaaaaaggatgaaataaataggcgtgtaaaaaatgctgctgaaatcttacaaattagcgattttttactcaaaactccacgatcactttcaggcggacagcgtcaaagagttgcaataggccgagctatagtaagagaaccagatgtatttctttttgatgaacctttatctaatcttgatgctgctttaagagtaaatacaagacttgagatagccagacttcataaacgtttaggtactactatgatatatgttactcatgatcaggttgaagcaatgacattagccgataaaattgtggtacttaataatggtaagatagaacaaataggttctcctatagaactttatgaaaatccacttaatatgtttgttgcaggttttataggtagtccaaaaatgaatttcttaaatagcaaaactcttacaaaaaatatttctacaattgttaaaggagctaaaagagaagatataatagggatacgtcctgaacacttgcttaagacaacctatacaaactctatcataagtgctcgattagatctgattgaaaatttaggagaaaatgttttagtacatatgattttaaataatgatgatcaaattattgctaaaatgaataatgctccaaaagaacctattggaacaaaacttcattttacagctgatattaaaaacttacatttatttaacaaaaaataat

SEQ ID NO: 271629 - DNA, 802 bp, Unknown
  Bacterial polypeptide expressing nucleotide sequence isolated from the Sargasso Sea
atgaataaagaattcgtcaaatttgataaagtagataaaagttacgatggtaaagttctagttgttaaagatttacaattagatatcgctgagggtgagtttgtaactatgttaggaccttctggttctggtaaaacaacttgtttaatgatgttagcaggatttgaaacaccaactcatggcgaaatttatttagacggaaaagctatctcaagtattcctcctcataaaagaggcattggaatggtgttccaaaactatgctttatttccacacatgactgtatatgaaaatttagcatttccattaagagttagaaaaattccaaaagatgatgcggataaaaaaattgataaagcgctatcaatggtttcccttcaagggtttgctgacaggatgccaggacaattgtcaggtggacagcagcaaagggtagctgttgcaagatctctagtgtttgatcctcaattagttctaatggatgaaccacttggagctttagataaaaatttaagagaaagtatgcaatatgaaattaaacatattcatgaaagcataggtgttacagttgtttatgttactcacgatcaaagtgaagctttaacgatgtcaaatcgtattgcagtgtttaatgatggtaaagttcaacagctttctagtccagatgaattatatgaaaaaccagtaaactcttttgttgcagagtttataggagagaataatactttttcaggtgaggtttcagatatttcaggtggaaaatgtaaagtgaagctatctaattctgaaattttagcaaatc

SEQ ID NO: 271630 - DNA, 1057 bp, Unknown
  Bacterial polypeptide expressing nucleotide sequence isolated from the Sargasso Sea
aatgtctcaaattagtttacaaaatttaaagaaatctttcggaaaaacgcaggttattcatgatctaagtattgacgttaaagatggtgagctaatcgtgatagttggaccatcaggatgcggaaaatcaactctattgagaatggtggcaggattagaagatgctaatgaaggaaatattttaattgataataaaaaagtaaacgagcttgaacccatggagcgaaatattgcaatggtatttcaaaattacgctctttatccgcacatgactgtctttggtaacatggcttacggtttaaagattgcaaaagtaccaaaagaagaaattgagtctagagttcaaaaagctgctgaaattttagagcttggagaattattagagagaaaacctaatcaattatctggtggacaaagacaaagagttgctatgggaagagctattgttagaaatcctgtggcttttttatttgatgaacctttatctaaccttgatgcaaaattaagagttcaaatgagattagagattaaaaaacttcaaactcaattaaaaactacctctctttatgtaacacatgatcaagttgaagctatgactttagctgatcgtatgattgtaatgaacgaaggtaatgtagaacatattggaacacctttagaagtatatacgaaacctaaaactttattcacggctcaatttatcggaagtcctgcaatgaatattttaaaaggtaattgcggaggcaacaaattgattttggcaaacaaagcttcactttcagttaattcaaaatttaatggacctgttaatataggattgcgacctgaagattttgaattagatcaaaatggtccaatcaagttaaaagttgaacttgtagagctgatcggagctaatacacttattcatggtaaacttgaaaatagtaatgaaattttagttgcaagtatctcaggtgttgttaaagaagatactattggaaaaaatattaatctttccattcaaaatgacaaactacacctgtttgatactaatactgacttgaggattaattga

SEQ ID NO: 271631 - DNA, 919 bp, Unknown
  Bacterial polypeptide expressing nucleotide sequence isolated from the Sargasso Sea
aatgatagctggtctagaggaaattaattcaggaagcattcttataaataataaatctgttaatgacttaccaccacgggatagagggatagctatggttttccaatcttacgctctgtatccacatatgactgtatttgaaaatatggcttttggattaaagatagaaaagaaatcaaaggatgagataaatagcagagtcaaagaggcagctaaaatattacaaatcgaagaattgttaggtagaaaaccaaaacaattatcaggtgggcaacgacaacgggttgcaataggaagagctattacaagaaaaccaaaagtttttttattcgatgaacctctttcgaacttagatgctgctttaagagttcaaatgagagttgagttggcaaaattacatgaacaacttgatgcaacaatgatatatgtaactcacgatcaaactgaggctatgactctatcagatgaaatagtcgtactggatgagggcaagatttctcaattaggcaaacctttggaattatataataaaccaaataacttatttgttgctggttttataggttcacccaaaatgaattttattccagctaaatttatttcaaaaaacaaaaatgatattgaaatagaatttttaaattccaaatttatatttaattatgaaaatgatataaattttaaaaaagaggaacttattgttggtataaggcctgaaaatatccacgtgtgttttgacaataatcaccactggtgcagcaaagcttttgttgttgaaaaacttggctcaagtacttttatctacttagatagtcaaattgaacctgtggtagttgagtgtgatggtgatatttcagttaaaactggtgatattataaatgttaaatttaattttgaaaaaattattctttttaatgaatga

SEQ ID NO: 271632 - DNA, 1084 bp, Unknown
  Bacterial polypeptide expressing nucleotide sequence isolated from the Sargasso Sea
aaaaataacgaattcgtaaaatttgataaagttgataaaagttacgatggaaaagttttagttgttaaagatctaaatttagatattgccgaaggtgaattcattaccatgcttggaccatctggttcaggtaaaactacatgtttaatgatgttagcaggatttgaaactccaactaatggtgagatttatttagatggaaacccaatttcaaatattcctccacataaaagaggtattggaatggtatttcaaaactatgctttatttcctcatatgactgtttatgaaaatttagcttttccattaaaagttagaaaattttcaaaagatgaaacagataagaaagtagaaaaagctctatcaatggtttctttatcaggttttggaagtagaatgccgggacaattatctggaggacaacaacaaagagtggctgttgcaagagcattagtatttgatcctgctgtagttttaatggatgaacctttaggagccttagataaaaatttaagagaaagcatgcagtacgaaattaaacacattcatgaaagcattggagttacagttgtttatgttacgcatgatcaaagtgaagctttaacaatgtcgaatagaattgcggtattcaatgatggaaaagtacaacaactctctagtcctgataagctatacgaagaaccagtaaattcttttgtagcagaatttattggagaaaataataccttccaaggtgaggttgcagatatctcagaaaaaaaatgtaaaataaaattaaactcaggagatgaaatattagcaaatccaataagagtaaaatcaaaaggtgaaaaaagtatagtatctttaagaccagaacgtgcgattattgatcctgatgataaaatggataataaattcactgggaagattgaagaggtgatttatcatggagaccacactagagttagattaaatttattggataatcatgaatttatattaaaagtgccaaatagttctgcaagaatggatataaagctaggtaatcaaattaaaattggctggaacagttttgatgctagagctcttgatccaaaataat

SEQ ID NO: 271633 - DNA, 994 bp, Unknown
  Bacterial polypeptide expressing nucleotide sequence isolated from the Sargasso Sea
aaaggtgagtttttaacaatgttaggaccttctggttcaggtaagacaacagtgttaatgatgttagctggatttgaaactccaacaagcggagagatttatttggatggaaatccaataagtagtattccaccaaacaaaagaggtataggaatggtttttcaaaactatgctttatttcctcacatgactgtaaaagaaaatttagcattccctcttgaagttagaaaaatgcaacaatctgaaattgatgaaaaagttggaaatgcacttgcgatggttgaattgcaagattttggaaatcgtatgccattacaattatcgggtggacaacaacaacgtgtcgcattagctagatctttagtgtttgaaccaagattagttttaatggatgagccacttggagcacttgataaaaatttaagagagcaaatgcagtatgaaataaaacatattcatgaaaaaattggaataacagtagtttatgtaactcatgatcaaagtgaagctttaacaatgtcaaatcgaattgcagtttttaatgacggaaagattcaacaaatttcttcaccagatgttttgtatgaaaaaccaaatagttcttttgttgcacagtttattggagaaaataatcaactaagaggaaaagtaaaatcgattaatggagaaaattgtatcgtcacgacagaatccggagatgatattcatgctttaaaaataaatgtgaataataatggtgatggttctttagtttctttaagacctgagagagttgctattaactcatcagaaaaatttgaaaataattttgatgcaaaggtaaaagaattaatttatttaggtgaccacatcagatctcgagtagaagtttgtggaaatgatcaatttatagttaaaattccaaattcttataaggaagcaaatttaaaagaaggttcgacagtcaaactgtcatggaaagcatcagattctagggctctagaccttaattaag

SEQ ID NO: 271634 - DNA, 1084 bp, Unknown
  Bacterial polypeptide expressing nucleotide sequence isolated from the Sargasso Sea
atgaacaattcatttatacagatcaataatatttcaaaacactttgcagatgtaaaagcagttgatgatgtttcatttgaaattaaagaaggcgaatttttttctcttttaggaccttctggatgtggtaagacaacattgttaaggttgttggcaggatttgaatatcctacttctggaaatctattaattgatggaacagatattactgcattaccaccagacaaaagacctacaaatatggtttttcaaaactatgcaatttttcctcaccttaacgtagaaaaaaatattcaatttggactaagaaaacttggcttaagcaatgatgaaataggtaaacgcgttaaagaagttctttcattagttaagcttgagggctatgaagaaagatttagcaatcaattatctggtggtcaaagacaacgcgtcgctcttgcaagagcattagtaaggcaaccaaaagttttgttattagatgaacctctaggagctttagataaaaaactaagagatgaaatgcaattagaattaagaactcttcaaaaaaatattggaattacttttgtattcgtcactcacgatcaacaagaagctataagtatgtcagacagagttgcagttatgaacgatggaaaaattcagcaattatcagcaccaaatgaactttataagaatccaaaaaatatatttgtaagtgactttattggtgaaacaaatttccttaaagctgaaactaaatcaagtgatggagagttcatcaacgtttcgattgaaaaattgggagagtttaaaattaaaaataatttaaatatagcaacaaattcttctgatgttgtttgtagtgttcgtccagaatcaatgatgatttctaaagtgaaatctgactgggatatctgtcttgatgctaagattagtcagacttcttatttaggagaaatgactagattttacgttgaagcgaaaggaatagacaaaataatcactgtttcttcgcaacattttgataatcaatcttttgaaaataatgaatgctttataagtattagtttagaggatatttctttgttgaataaaaaatagc

SEQ ID NO: 271635 - DNA, 694 bp, Unknown
  Bacterial polypeptide expressing nucleotide sequence isolated from the Sargasso Sea
tatgaaaaatagtgttgaggtaaaaaatatatctttcagttatgggaaaactgaaatattaaatgatttaagtcttgatatcaaagaaggtgaattcatggttttacttggaccttctggttgtggaaaaacaactctattaaattgtatagctggacttcttgatttatctgatggtcaaatttggattgaagatgacaatgtaacttggaaagaaccaaaagatagacatataggcatggtatttcagtcttatgctttgtatccaagtatgactgtagagaaaaatttatcatttggtttaaggatgatgggaactgccaaaaaaattatagatgataaaatcgaaaaagcatcaaaccttttacaaataaatgaattacttaaaagaaaaccttcacaactctcaggaggtcaaagacagcgtgttgcaatagggagagctcttgtaagagatgcaaaggtatttttatttgatgagcctttaagtaacttagatgcaaaattaagagccgaattacgttatgaaataaaaaaacttcatagagatttatctaatactatgatctatgttacacatgatcaaattgaagcgatgactctcgctgaccgtatatctgttatgaaagatggcttaatacaacaattagatacacctaaacaatctataataaaccagctaatttatttgtag

SEQ ID NO: 271636 - DNA, 1015 bp, Unknown
  Bacterial polypeptide expressing nucleotide sequence isolated from the Sargasso Sea
atggctactatagaattaaaaaatattgaaaaatcttttggtaacaacaaggtaattaataattttaatatcaaaattaatgatggcgaatttattgttctagtaggtccttctggatgcggaaaatcaacactgcttagaatgatttcaggtttagagtcggttgataaaggtgaaatacatttaaataataaaataattaataatttaattccctcaaaaagaggaatcgctatggtttttcaatcctacgccttatacccacacatgaatgtttatgaaaacatgtcatttggtttaaaaacagaaaaactagaaaaaaatgaaattgataagaaagtaaaagacgctgccaaaactcttcaaattgaagatttgcttgaaagaaaacccagacagctttcaggtggacaaaggcagagagtagctattggtcgggcaataacaaggaatccaaaacttttcttatttgatgaacctctttcgaatctagatgcagcactaagatcagaaatgcgtgttgaaatatcaaaattacataaacagctcaatactaacatgatctatgtaacccatgatcaaattgaagcaatgacactagctgataaaattgtcattttgaataatggaaatgttgaacaggttggaactccagatgaaatttataataatccaagcaatatatttgtagctgaattcataggcgtgcctaaaatgaatattttaaagaatggtatagagtctttattaaaaaatttaaatttaaagtcagacacgtatctagggataagaccggaacacattcataccaatggaaatggtgaaataaaaattgatataaaagtcgatcttattgaaaatttaggttttgaaaaaattatttatgcaacattcaaaggtcaagaattaagaattaagacatctgataatatcacacaaaatattaaacaaatttcattttcaaagaataagatatttttatttgataaaaataaaaaaagatatcgtatttaga

SEQ ID NO: 271637 - DNA, 958 bp, Unknown
  Bacterial polypeptide expressing nucleotide sequence isolated from the Sargasso Sea
ttcattactcatgatcttaatatcgtaagaaaatttgcaaatagagttaatgtaatgcaaaaaggtgaaatagtagaaaaagggaaggttgaggaagtctttgcaaacccaacccatccttatactaaaaaacttatagattctatcccaagagaaaaacaagaattaattaagactgagagtgccttactagaagctcaaaaagtcaatgtaaattacttactaaagaaaaatctttttaaggaaaactcctacttaaatgctgtaaaagatgtagacattaatgtttatccaggatgcactactgggttagttggtgagtcaggttcaggaaaatcttcattagctagggccttgctgggattagaagagtctgatggaaagatatactttcaaggaaaagagtttcttgatctctcaagttctgaatttagacagataaagaaagattttcagattgtctttcaggacccttttggttctctttcacctagacaaactatcggagatattattggtgaaggattaaaggtccatttccctgaattaaataaagctcaaagagcagaaaagatattacagtccttgagggatgttgaattagataagaattttgtaaatagatttcctcatgaactttcaggaggtcaaaggcaaagagtagctatagcaagggcaattattttagaacctaaattgatattattagatgagcctacttcagcattagatgtttcaatccagatgcagattctagagctcttattaaaactgcaaaataggctaggactttcttatctctgtatcagtcatgacttgagagtaataagagctttatctgatgaagtttatgtaatgaaggatggcgaggtagttgaaaaaggtatggctgatcaggttttcaactctcctcagaatgaatacactaaggagttaatttcggctgctatacactaat

SEQ ID NO: 271638 - DNA, 712 bp, Unknown
  Bacterial polypeptide expressing nucleotide sequence isolated from the Sargasso Sea
aacagaaaagctagaaaaaaatgaaattgataagaaagtaaaagatgccgccaaaactcttcagattgaagatttgcttgaaagaaaacccagacaactttcaggtggtcaaaggcagagagtagctatcggccgggcaataaccagaaacccaaaactttttttatttgatgaaccactttcgaatctagatgcagcactaagatcagaaatgcgtgttgaaatatcaaaattacacaaacagctgaacactaatatgatttatgtaactcatgatcaaattgaagcaatgacactagctgataaaattgtcattttgaataatggaaatgtcgaacaggttggaactccagatgaaatttacaataatccaagcaatatatttgtagctgaattcataggcgtaccaaaaatgaatattttaaggaatggcatcgagtctttattaaagaatttaaatttaaagcccgaaacgtatctagggataagaccagaacacatccatactaatggaaatggtgaagtaaaacttgatgtaaaagttgatcttattgaaaatctaggttttgaaaaaattatttatgcaacatataaaggtcaagaattaagaattaagacatctgataatatttcacaaaatcttaaacaaatttcattttcaaagaataaaatctttttatttgataataataaaaaaagatatcgtatttag

SEQ ID NO: 271639 - DNA, 919 bp, Unknown
  Bacterial polypeptide expressing nucleotide sequence isolated from the Sargasso Sea
tttgaaacgccaactaatggagaaatttatttagataaaaatccaatttcaaatattcctccacacaaaagaggtattggaatggtttttcaaaattatgctctgtttcctcatatgacagtttttgaaaatttagcatttccattaaaggtaagaaaaatgtctcaagtggaaatagaaaaaaaagtagataaagctttatcaatggtttcactcggtggatttgcaaacagaatgccaggtcagttgtctggaggtcaacaacaaagagtagcagttgcaagagcattagttttcgatccatctgttgtattaatggatgagcctttaggtgccttagataaaaatttaagagaaagtatgcagtacgaaattaaacacattcatgaaagtattggtgtaacagtagtttatgtaactcatgatcaaggtgaagctttaactatgtcaaatagaatcgcggtatttaatgatggtaaagttcaacaactatcaagtcctgataagttatatgaagaacctgtgaactcctttgttgcagaatttattggagaaaataatacctttggtggagaggtttctgaaatttcaaatggaacatgtagagtgaaattagaaaagggtgaaataattgctaatccgatttcagtaaaatctgttggtgaaaaaactactgtatcaattagacctgagagagcattaattaatcctaaagataaaatggataacaatcaaaaaggaaaaatcgaagaggtcatttatcatggggatcatactagagttagattaaatttacttggtaattcagaatttatattgaaagttccaaacagttctcaaaacttagatataaaacttggcaatgaaattaatatcggctggaacagtcatgatgctcgagctttagacccaaaataag

SEQ ID NO: 271640 - DNA, 1060 bp, Unknown
  Bacterial polypeptide expressing nucleotide sequence isolated from the Sargasso Sea
atggcacaagttgaacttaaaaatgtcaataaatcttttggacaaacaaaagtcattaaagatgttcacttatctatagaaaaaggcgaatttgtcgtctttgtaggaccttcaggttgtggaaaatcgaccttgctcaggctcatcgcaggcttagaaaatttaagtaacggtgaaatcataatagccgatcggcccgttatggacttaccaccttcggaaagagggattgctatggtttttcaatcctatgctctctacccacatatgtctgttttccagaacatggccttttccttaagcctacgaaaattttctaaagctgaaatcagaacgcgcgttgaagctgctgctaaaattcttcaaatggagcatcttcttgatcgaagaccagcagccttgtctggtggacaacgtcagcgtgttgctattggtagagcgatcgtaagagaccctgatgtattcttatttgatgaacctttgtcgaatttggatgctgcgcttcggcatgatacacgagttgaaattgctaagttacacaagcagttagatgcaacaactatttatgtaacccatgatcaggttgaagctatgacactagctgataaaattgtcgttttaagagacggtgaagttatgcaggtgggatcgcccatagatttattcaatttacccgataatgaatttgtggcaggttttttaggttctccacaaatgaatttctttgacggtaacttatcaaaagttacaaaaaatggttcatcaggatctttcaagggtcaaggactcgaagctattggcatacgacttacttctaaaaataagaaaattaatgatactgttcgcttgggtattcgtccacaacacttgcaaatcaacgaaaaaggtaacctagcaggtcaagtgaccctcgtcgaaaagcttggaacggaaaccgtagttgaattgataactgaaaatggaaccccttttagatatgttgcagctgaaacagctgaaatagctttaggagacagcttaaaatttaaatttgaaagtagtaaagctcacttgttctgat

SEQ ID NO: 271641 - DNA, 736 bp, Unknown
  Bacterial polypeptide expressing nucleotide sequence isolated from the Sargasso Sea
aatgtcagaagcaataatcaaaattcaaaatatgaataagtggtttggagattttcaggttctaaaagatataaatctagaagttgaaaaaaataaaaaaatagtagtatgcggtccttcaggctctggtaaatcaacattaattagatgtataaatagattagaggaacatcaaaaaggcagcattgtagttgatggaacagaattaagtgaaaatactaaaaatatagagcaaattagagctgaagttggaatggtttttcaacaatttaacctatttcctcatttatcaattttagataactgcacattagcacctatatgggtgagaaaaatgccaaaaaaacaagctcaggaattagcaatgcaacagcttgagaaagtacaaatttcagatcaagcgcagaagtttccaggtcaactttcaggaggtcaacagcaaagatgtgcaatagcaagagcattgtgtatggagccaaaaataatgctttttgatgaacctacttctgccttagatccagaaatgataaaagaagtgcttgatgcaatggtaaatttagcaaaaggcggtatgacaatgatagtcgtaactcatgaaatgggctttgcaaaagaagtagctgacgaggttatatttatggatgaaggcatgatagttgaaaaagccgagacaaaagaattttttgcaaatccaaaaagtgaaagaacaaagctgtttttaagccaaattttataa

SEQ ID NO: 271642 - DNA, 1432 bp, Unknown
  Bacterial polypeptide expressing nucleotide sequence isolated from the Sargasso Sea
aatgaaacctatttttactgtgaaagatctaaacattagtttcttacaagatggagcacgtttcgaggcagttaacaacttatcgtttcaggttaacaaaggtgaaactgttgctttggttggagaaagtggttcgggaaagtcagtaactgcactaagtactgctgctttgttgggaaatgctgcttcagttgatggtgaaataaatattgatggaaattcacttgacccaaaggatgagcgggctctgcagaaattgagaggaagtcaggttagctttatattccaagaacctatgacatcgctcaatccattgcataccatcgagcggcagctgtcagaaacaatatcgttacatcaaagcttgaataaagaaaaattacgagaaaattgcataaatcttttagaaaaggtgggaataagagacattgagtttaggctaaacgcttatccgcatcaattgtctggaggtcaacggcagcgtgttatgatcgcgatggcaatagcaaatcgccctaaaattttgatagcagacgagcctacgacggcattagatgtgacaattcaagcccaaattctagatcttttagcaaatttaaaaaaagaatttggaatgtcgatgctttttatcacacacgatcttaacatagttaggcaaatagctgaccgagtttgtgtaatgaatgctggaaagatagttgagaaagggggtactgatagtgtttttgaaaagccaaagaatgagtatacaaaaaaacttttgaaggcgatatcttcttcaggcccaaaatcagtcgccgcaaactccaagataattttgagcgctcaagataccaaggtgtggtttcctgtttataaaggtttcttaaagcggacagtaggccatattaaagcgctaaactcagctacttttgatgtaagaatgggtgaaacattaggaatagtaggtgaaagtggctcggggaaatcaactattgctctagcccttatgagattaattgatttcgagggtgaaattaattttgatggtaaagatattggttctttaaaaacaagagaattaagacgaatacgatctgatatgcaaatcgtatttcaagacccttttggttcattgtcgcctcgaatgacttgtgcacaaataatatctgagggtttagaggtccatcagtcagaaaattctgatgataccaaactgttagtagaagatgttatgaatgaagttggtttggatccagtgtttaaacatcgttaccctcatgaattctcagggggtcaaagacagaggatcgccattgcccgggctatggtacttaagccaaaattagttattttggatgaacctacttcggctcttgacagaaccgtacaatttcagatcgtgcagttattgaagcaacttcaagaaaagtatggattagcttatgtatta

SEQ ID NO: 271643 - DNA, 1054 bp, Unknown
  Bacterial polypeptide expressing nucleotide sequence isolated from the Sargasso Sea
atggcatcggtaacactgaacgagatcaccaaacggtggggagattttaccgctgtggatcaggtttccctggaagttcgcgaccaggaattcatggtcctgttgggaccttccggctgcggaaagaccaccaccatgcggatggttgccggcctggaggaaccgagcgaaggggagattttcatcggagaaaaaatggtcaatgatgaacttccgaaagaccgggacgtggcgatggtcttccagaattacgggctttatcctcacatgtcagtctatgaaaacatccgctaccctctcaaggtccggaaagtcgacaagtctctccatgctgagcaggtccgcattgcagcggagaaggtgcaactcgggcatcttctcaaaagaagacccagggaactctcaggaggtcagcggcagagggttgctctggcaagagccatcgtgaggactccaaccgttttcctgatggacgaaccgctttccaatctcgacgcgaaactgagggtcaacatgcgtgccgagctgaaacatctgcagcatgaattgaagatcaccacgatttacgtgacccacgaccaaatcgaagcgatgaccctggccgaccgggtggcggtgatgaacgaaggcgtcatttcacaactggatactccagaaagaatctacaatgacccggccaatctgtttgtggcagggttcatcggttcaccttcgatgaacctgatacccggcaaaatgcgtgaaggcacctttgagcatggagaattctccatcaagcttacacgtggagactacgaacaatgcgtgctcgggatccgccccgaagatatggaaatcacccggcccggggatggcattttttcagccaaggtctactcatttgaactcacaggagaatcgacactgatcacagtcatcctgggagacgaaaggatcattgtgcggggtcccaaagattaccgggtggaaatagatgagcaggtcggaatcctgttgaatcctgaaaactgttttcttttcgattcggaaacccggcaacggatcaggttctgaa

SEQ ID NO: 271644 - DNA, 1191 bp, Unknown
  Bacterial polypeptide expressing nucleotide sequence isolated from the Sargasso Sea
agctcatgggcgcaggagagacaaagctattagcagtcagaggttctgaggtctcgatgatatttcaagagcctatgacttcactcaatccactccataagattggtcgccaagtcactgaactgttggtcctaaataatgttttagataaagggtcagctagtgagaaagtaagggagctttttgatttggttggattagacgattcgattcgagtcgatgcttacccgcatgaattgtctgggggtcaaagacagagagtcatgattgcaatggccttggcgcaagagccgaagctattgattgccgatgagccgacaactgctttggatgtaaccatacagaaacagattttggagcttttacaatctctgcaggaacgattgggtatggcgttattactcataactcatgacctaaccgttgtgcgctcactcgcccagagaatctgtgtcatgaattccgggagaatcgttgaagaaggaaacgcgaagcggatattcaccgctcctgagcatgattatacaaaacacctcctcgcggcagagtttctctcagagccgcctagagctgatgctgcatccgagacgatcgcttccattgacaaccttgaagtgaattatgtgattggtagacagtggttcgggaagccaaaaacgctggccgcggtaaagggagtctcccttgaaatcaaggctggtcatacgttgggagtcgttggcgagtcaggttccggtaaaactactttggggatggcgatcttaaggatgctcccaagtgaaggacagattgttttcatgggaaatgaactgtcagctctcaaagcaaaagaaatgaaacggttccgtaaagatcttcagattgtttttcaggatccatatggcagcctctcgccgagaatgaccgtttcgcaaatcattggagaaggattgagaatccattcgcctgaattagatgagcttgagagagatagcattgtcagaaatgcgttaattgatgtggggttagaggaggaaatgcttaagcgttatccgcatgagttttctggaggtcaacgccaacgaatttccatcgcgagagcgattgttttacgacccaaactgattgtgatggatgagccaacatcggctttggatgtctcggtacaagcccaaatcgtttatcttttgagagaagtacagccagtatgac

SEQ ID NO: 271645 - DNA, 1057 bp, Unknown
  Bacterial polypeptide expressing nucleotide sequence isolated from the Sargasso Sea
tatggcaaatataaagtttaccggtgtccacaaatcatttggttctaataagataattaagaattttaatcttttaggcaaagaggatgagtttcttgtattagtcggaccatcaggatgtggaaaatcaactcttctaagaatgattgcaggattagaaaaaatagatgaaggtgaaatatttattaatgatcaaaaaattaatgagctgcatccctcaaaacgtcaaactgcgatggtctttcaatcttatgccctttatcctcatatgaacgtttatgaaaatatgtcttttggtttaaaaatcgaaaaaagacctaaagaggaaattgatatgaaagttatgcaagctgctaaaattctaaaaattgaagaactattagaaagaaaaccaaaacaattatctggcggtcaaagacaacgtgtcgctattggaagagctattacaagaaatccaaaaatatttttatttgacgaacctttatctaaccttgatgcagcactcagagcagaaatgagggttgaaatatcaaaattacacaatcaaatcaaaacaaatatgatttatgtaactcatgatcaagtagaagctatgacactagcagacagaatagttattttaaatcaaggaaatattgaacaggttggtacccctgaggaaatatataatgatccttcaaatatttttgttgctcaatttattggcacaccaaaaatgaatattttagatgtgaaagaggaaaatgttgttacagaaaatacaattaaattgttaggtaataatatccattttgataaattaaaattaaataaatctaaacattttgtgggtattaggcctgagcatttaaaagcaaatcaagaaactcaatatacttttaatcctgaaatagaattaatagaaaatcttggtaatgaaaaaattgtatatatgaaaaaagacgaacatcaattaagtgcaaaaattccaagcaacattgaaataggaaattctgtaggttttgatttaaatgatatttttatttttgatgaaaatggaaataggatgaaatcataa

SEQ ID NO: 271646 - DNA, 682 bp, Unknown
  Bacterial polypeptide expressing nucleotide sequence isolated from the Sargasso Sea
ttcagttttaaaaatattaatttagacgtagaaaaaaataaaaaaattgttgtttgcggcccatctggttctggaaaatctactttaatcagatgtatcaatagactagaagaacatcaagaaggtcatataacagttgatggtagtgaattaaatgaaaatactaaaaatattgaacaaattagagccgaagttggaatggtttttcaacaatttaatttatttccacatttatcaattttagataattgtactttagctcctatttgggtaaaaaaattacctaaaaaagatgctgaagaattagcaatgaaacagttagagaaagtacaaattgctgatcaagccttaaagtttccaggtcaattatcaggaggccaacagcaaagatgtgcaattgcaagagcactatgtatggagcccaaaataatgctttttgatgaaccaacatcagctttggatccagaaatgattaaagaagtgctagacgctatggttaatttagcaaaagcaggaatgactatgattgttgtaactcacgaaatgggttttgcaaaagaagttgctgatgaagtaatatttatggatgaaggaatgatagttgaaagagcagaaactaaagagttttttgccaaccctaaaagcgatagaactaaattgttcctaagtcagattttataaa

SEQ ID NO: 271647 - DNA, 964 bp, Unknown
  Bacterial polypeptide expressing nucleotide sequence isolated from the Sargasso Sea
cttgaaagatcgctcaaaggaggatgaagtggcagatataaatataaatactgttaataaatattttggagacgtccacgtaattaaagacgtatctctagatatcaaaagtcaatcattcacagttctagtcggacctagtggttgtggtaaatcaactatgttaagaatgatagcaggactggaagatatcaattcaggtacaatttcaattgatggtcaagtagttaatgatttaccgccaaagcaaagaaatattgcaatggtgtttcaatcttatgcattgtaccctcatatgactgtatttgataatatggcatttggattaaaattagaaaaaagatctaaagatgaaattaatgaaagagttaatgaagctgcaagaattcttcaaatagaagattatcttcaaagaaaaccaaaacaactttcaggtggtcaaagacaacgtgttgcaattggaagagcaatcactagaaagccaaaagttttcttgtttgatgaaccactttctaaccttgatgctgcattaagggttcaaatgagagttgaattagcaaaacttcataatgaactagaagcaacaatgatctatgttacacacgatcagacagaagctatgactttagccgatgatattgttgttcttgatacaggtatcgtttcacaaaaaggatctccacttgaactttatgacaagcccaataatatgttcgtaggtggatttattggatcaccaaaaatgaactttatttcaagtaagatattaagcaaaagttctgatgctactgaagttgatattatgggaatgtcaaaaatatcagtatctaaaatgtcagcatcctcttcagaaggtgattcagtaactctaggtattagacctgaacacttagtagtaaatggtgactcagatggatcttgggaaagtaaagtgtttgttgtcgaaaaacttggtgacgttact

SEQ ID NO: 271648 - DNA, 690 bp, Unknown
  Bacterial polypeptide expressing nucleotide sequence isolated from the Sargasso Sea
gtggtcaaaaacaaagagttgcgattgcaagagctctagcagtagagccaaaagtccttctattggatgagcctttatcagcactagatctaaaattaaggcaacgtatgagaactgaattaagagaaattcagaaaagagttaatattacttttatttacattactcacgatcaaggagaagcattgaccatgtcagaccgtatcgctgtgatgaatgaaggtgaacttgaacaaattggcccatgtgatgatgtctataataaccctttaactccgttcgtggctacttttgttggtgaaaataatccactatttggcaagataaacgatttaagtggcgatgaggcaaaaatagaaacacctgatggagtttttatttcttcaattgataaatctactaatttaaatattggtgatgaggctatttcattcgtaaggccagaatctttattcattgtaaaagacggaaatgattataaaaataaattaagtgtaaaaattgaaaatattgaatttgagggaaatgttaaaaatttctatgcctcattaaattcaggatctaaaataaaattttctgtagccaacgcaatagatacaaacgagattgaagcaagcagccaaatagagcttggttttgatacaagcaagtctatcattttgcctaaaggcgcattagcaactgagtagt

SEQ ID NO: 271649 - DNA, 736 bp, Unknown
  Bacterial polypeptide expressing nucleotide sequence isolated from the Sargasso Sea
tatgcctgatcctattattcaaattaaagacatgaacaaatggtttggagattttcaagtattaaaagatataaatcttgacgtcgaagcaaataaaaaaattgtagtttgtggaccatcaggttctggtaaatctactttaatcagatgtattaatagattagaagaacatcaaaaaggttcaataatagttgatggaactgaattatcagaagaaacaaaaaatattgaacaaataagagctgaagtgggaatggtatttcaacaatttaatttattcccacatttatcaattttagataactgtactttagctcctatttgggtaaaaaaaatgccaaagaaagaagctgaggaattagccatcaaacaattaaaacaagttcagattgatgaccaggcaagtaaatatccaggacaattatctggtggacagcaacaaaggtgcgcaatagctagagcattatgtatggaacccaaaataatgctttttgacgaacctacatcagcacttgatcctgaaatgattaaagaggttttagatgctatggtaaaccttgctaaagctgggatgacaatgatagttgttactcatgagatgggatttgcaaaagaagtagcagatgaagtgatttttatggatgaaggtatgataattgagaaagctaataccaatgagttttttgctaacccaaaaagtgacagaactaagctctttttaagccaaatactttag

SEQ ID NO: 271650 - DNA, 682 bp, Unknown
  Bacterial polypeptide expressing nucleotide sequence isolated from the Sargasso Sea
atgaacaccaggaagcaaaagctcttcgtcgatgagcttcacaaacagtacggcgacaacgaagtcctcaagggcgtgtcgctgaaggccaatgccggcgacgtgatcagcgtgatcggctcgtccggttcgggcaagagcacgatgcttcgctgcatcaactttctcgagcagccgaactcggggcgcatctttgtcgacggcgaagaagtccgcacgcagattggcaaagccggcgcgctgcgcgtgtccgatccgaagcagttgcagcgcgtacgcaccaagctgtcgatggtgttccagcacttcaatctgtggacccatatgaacgtgctcgagaacatcatcgaggcgccggtcaacgtgctgggtctgaagcgtaaggaggccgaagagcgggcacgcgagtatctggagaaagtgggcctcgcgccgcgtctcgagacgcagtacccgtcgcatctgtcaggcggccagcaacaacgcgtggcaatcgcgcgcgcgctggccatgcatccggacgtgatgctgttcgacgagccgacctcggcactcgaccccgaactggtcggcgaagtgctcaaggtcatgcagacgctcgccgaagaaggccgcacgatgatcgtcgtcacgcatgaaatggcgttcgcgcgcaacgtgtcgaatcacgtgatgttccctg

SEQ ID NO: 271651 - DNA, 733 bp, Unknown
  Bacterial polypeptide expressing nucleotide sequence isolated from the Sargasso Sea
tatgtcatcaattataaaaatgaaagatgtcaataagtggtttggagactttcaagttttaaaagatataaatcttcaagttgctgaaaaacaaaaaattgtagtctgtgggccatctggatcaggaaaatcaactttaataagatgtattaatagactcgaagaacatcaaaaaggtcaaattattgttgatggaaacgaattatctgaaaaaactaaagatattgaaaaaattagagctgaagttggaatggtttttcaacaatttaatttatttccgcatttatccattttagataactgtacattagctcctatctgggtaaaaaagacaccaaagaaaaaagcggaagagcttgcaatgaaacaactagagcaagttcaaatttctgatcaagcaatgaaatttccaggtcaattatcaggaggacaacaacaaagagcagcacttgctagagctttgtgtatggagccaaaaattatgctttttgatgaaccaacttcagctttagaccctgaaatgatcaaagaagttttagacgcaatggtaaatttagcaaaaggtggaatgaccatgatcgttgttactcacgaaatgggatttgcaaaagaagttgcagacgaagtagtttttatggatgaaggaatgattgtagaaagagctaaaactaaagaattttttgctaacccaaaaaacgaaagaacaaaactttttttaagccaaatactctaa

SEQ ID NO: 271652 - DNA, 739 bp, Unknown
  Bacterial polypeptide expressing nucleotide sequence isolated from the Sargasso Sea
tatgagctctgaattaatgatagaaatgaaaaatgttcacaaatggttcggtgaactgcacgtgctgaatgatattaatcttgaaattaacaaaggggaaaagattgttatttgtggcccatccggatctggcaaatcaacactcataagatgcatcaatagattagaggagcatcaaagaggcaatattatagtagaaggtacagagctgactaatgacagcagaagtattgagagaattcgtggagaagttggaatggtattccaacaatttaatctatttccacatttatccatattagacaattgttcgcttgctcctatatgggttcgcaagctacccaaagctgaagctaaagataaggctatggaatatttaaaacgagttcaaatagatgatcaggctcacaagtatccagctcagttgtccggaggccaacagcagagagcagcaatagctagagcactttgtatggagccgagaattatgctttttgatgaacccacttcagctcttgatcctgagatgattaaggaagtattagatgtgatggtcggccttgctcaaggtggcatgacaatgattgttgttacacacgaaatgggatttgcaaaagaggttgctgatagcattattttcatggatgagggacaaatcgtagaagcaaaaaatccaaaagacttttttgataaccctgaaagtgagcgaactaaaacattcttaagccaaattttataa

SEQ ID NO: 271653 - DNA, 1144 bp, Unknown
  Bacterial polypeptide expressing nucleotide sequence isolated from the Sargasso Sea
atggtcttttgcttcagaagcactctttacacaagctgcattttctgcctttatattgttggcaataagcgcaatccctacttatatattaagtacaaggaatttaacagtttaaatatggtattcgataatttaattataagagcaaggtcactttcaaaatcttatggtagtgaagatgttttgacggacttcaatattgacatttggtacggttcaatatttggaattttaggtgtctctggttctggtaaaacaacagcattaaggcttctagctggttttgaaaacccagatcaaggaacaatcgaaatgcataacaaagtcatatttgatgagaaaacaaatgtaccacctgaaaaaagaaaaattggtatggtatttcaagattatgcactattccctcatttaacagttgaaaaaaatattgcttttggtttaagtaaagaagaaattaaaaacggaagacttgatgaggtaataagtatgacaaacttaagttcgtacagaaaaaaatttccacaagatatttcaggaggtcaacaacaaagagtagcgcttgcaagagcattggctccaaagccagaagtggttttgttagacgaacctttcacaagtttagatgcacagatggcaagagatttaagagaagaagtagtttcactattaagagccacaaaaacaactggaatcatagttactcatgatcaggaagaagcactatcagtttgtgatattgtcagtgttcttgaaaagggtaaagtgatccaaagtgctactcctcaggaaatatatcttaatccaataagccaaactgttgcaaactctgttggagacccaaatatcataaaaggaatatcaacaaacggaagagttaaaacatcattaggaacattcaattctgcttatgatggagaattagatgtttcgataagacctgaatgtattgaagtcaacctagattccaatggggattatgtcgttaaagaatgtattttttatgggcatgatcaagtaatttcatttgaaaataaaaacggtgagatatttagagcaagatccttaccttcaatgatttttgagccaggggatcaagtatgtatcgatgtaaccgaagttactacttttccctcaaagctctgaa

SEQ ID NO: 271654 - DNA, 649 bp, Unknown
  Bacterial polypeptide expressing nucleotide sequence isolated from the Sargasso Sea
gaaagaatcgtagtttgtggtccttctggttctggtaaatccacaatgatcagatgtattaatagattggaagagcaccaagaaggttcaattgttgttgatggaattgagttaactggaaatttaaaaaatattgataatgttagaaaagaagttggaatggtattccagcaatttaatttattccctcatttatctgtaaaagaaaatataacacttgcgccaatttgggttaaaaaaatgccaaaggcggatgcagaggaactggctatgagacagttagaaatagtaaaaattcctgaacaagccaacaagtatcctggtcaattatctggcggtcaacaacaaagagtagcaattgctagatctcttgcaatgaatcctaacatcatgctttttgatgaaccaacttcagctctagaccctgaaatgattaaagaagttttagatgttatggttgatttggcaaacggtggaatgactatgattgttgttacgcacgaaatgggttttgctaaaacagttgctgatagaatggtgtttatggatgaaggaaaaattgttgaggaagctagcccagataagttttttaataatccagagagtgatcgtacaaagttatttttaagtcagattcttcatcagtaat

SEQ ID NO: 271655 - DNA, 573 bp, Unknown
  Bacterial polypeptide expressing nucleotide sequence isolated from the Sargasso Sea
gatgaaaaatgtaaacaagtggtttggagatttccaagttttaaaagatgtaaatttagatgtaaatcaaaaacaaaaaattgttgtttgcggcccttctggctctggaaaatcaactttaataagatgcatcaatagattagaagagcatcaaaaaggaacaattattgtagatggaaacgaacttactgaagatacaaaagatattgaaaagattagagcggaagtgggtatggtttttcaacaatttaatttatttccgcatttatcaatattagataattgtactttagcacctatatgggtaagaaaaatgccaaaaaaacaagccgaagaaatggcaatgaatgaacttaaaaaagtacaaattgctgatcaagccaaaaaatttcctggacaattatctggagggcaacaacaaagatcagccatagcaagagcattgtgcatggaaccaaaaataatgctttttgatgaaccaacttcagctctagatccagaaatgattaaagaagtactagatgcaatggttaatttagctaaaggaggaatgaccatgattgtagtaacaca

SEQ ID NO: 271656 - DNA, 730 bp, Unknown
  Bacterial polypeptide expressing nucleotide sequence isolated from the Sargasso Sea
tatgagcattattaaaacaaacgatgttaaaaaatggtttggagacttccaagctcttaaaggcatttctatggaagtgcaagaaggtgaagtattagttatttgtggaccatcaggttcaggaaaatcaacctttattagatgtattaacagactagaacaacaccaagaaggtgaaattattgttgatggaattgaattaactaatgatcttaagaacattgaggcaattagatcagaagtaggtatggtttttcaaagtttcaatctttttcctcacttaacagtaatgcaaaacattactcttgccccaatttgggtaagaaaaaagagcagaagtgagtcagaagaaaaagctatggaacttttgacaagagttggtatcccagaacaggcctcaaaatttccaggccaactatcaggtggccagcaacaaagggtggcaatagcaagagctctagctatggaaccaaaaataatgctttttgatgagccaacatcagcacttgacccagagatgataaaagaagtattagatgcgatgaaagaactagctctatctggaatgactatgattgttgttactcacgaaatgggattcgctaaagaagttgctgacagggtcatgttatttgacgaaggccttatggttgaggaaaatactcctacagaattttttgataatccacaaaatgacaggacaaagctgttcttaagtcagattctttag

SEQ ID NO: 271657 - DNA, 940 bp, Unknown
  Bacterial polypeptide expressing nucleotide sequence isolated from the Sargasso Sea
atgtggaaaatcaactcttctaagaatgatcgcaggattagaaaaaatagatgcaggtgaaatttttataaatgatcaaaaaattaatgaacttcatccttcaaaacgtcaaactgcgatggtttttcaatcttatgccctttatcctcatatgaatgtttatgaaaatatgtcttttggtttaaaaattgaaaaaagaccaaaagaagaaatcaacacaaaagttattgaagctgctaaaattttaaaaattgaggaactattagagagaaaaccaaaacaattatcaggaggtcaaagacaaagagtagcgataggaagagccattacaagaaatccaaaaatatttttgtttgatgaacctttatctaatctcgatgcagcactgagagcagaaatgagggttgaaatatctaaattacacaatcaaatcaaaacaaacatgatttatgtgactcatgatcaagtagaagctatgaccttagctgacagaatagttattttaaatcaaggtaacattgaacaggttgggactcctgaggaaatttataatgaccctgcaaatatttttgtggctcaatttattggtacacccaaaatgaatattctagaaattgatgaaaaaaacgtaatttctgataacaaaataaagttattaggtaatgatattatgtttgataacttaaaactcaataaatcaaaacactttgtaggtattagacctgaacacttaaaagcaaatcaagaaaatcaatttacttttaatcctgagattgaattaattgaaaacttaggtaatgaaaaaattgcttacatgaaaaaagatgaacatcaattaagtgccaaaatcccaagcaacatagaaattggaaataaaattggatttgatctaaatgacatttttatttttgatgaaaatggaaaaagactaaaatcttag

SEQ ID NO: 271658 - DNA, 946 bp, Unknown
  Bacterial polypeptide expressing nucleotide sequence isolated from the Sargasso Sea
ttattgagactactagctggctttgagtatccaactagtggaaatctgttacttgatggtagtgatattaccgcattacctcctgataaaagacctacaaatatggtttttcagaactacgcaatttttccgcacataaacgttgagaaaaatgttcagtttggtcttagaaaacttggcttaacaaatgatgaaattatcaaaagagttaaggatgttttgtcgttggtaaaattagaaggttatgaggaacgctatagtagccaactatctggaggtcaaagacaaagagtggcattagcaagggctttagtaagacaaccgaaagtattattactggatgagccacttggggcactagataaaaagttacgtgacgaaatgcaactcgaactaagaactcttcaaaaagagattggaataacttttgtatttgttactcacgatcagcaagaggctattagcatgtcagatagagttgcggtgatgagtgaaggtaaaattcagcagatgtcatctccaaacgaattatataaaaatcctcaaaatatatttgttagtgactttattggcgaaactaattttttaaaagctaagacggagtctaaagacggagaatatattaatgttaacattgaagatcttggttcatttaaaataaaaaataatctcaatataagtgaaaatgcctcagatgttatttgcagtgttcgtccagagacaatgatgattgacaaagaaaaatcagactgggatatttgcttagaaggtaaaatcaagcaaacatcatatctaggtgaaatgacaaaattttacgtagaaactaaagaaatagaaaaaattataaccgtatcatcacaatattttgataatcagtcttttcaagatggtaaatgctttatcagcataaatttaaacgatatttccttactcaataaaaaatagc

SEQ ID NO: 271659 - DNA, 818 bp, Unknown
  Bacterial polypeptide expressing nucleotide sequence isolated from the Sargasso Sea
gatggtttgtgcgtggaatagcagctggggcaataaaggggtgaatgtgagaaatagtgttgaggtaaaaaatatatcttttagttatgggaaaactgaaatattaaatgatttaagtcttgatattaaagaaggtgaattcatggttttacttggaccttctggttgtggaaaaacaacgttattaaattgtatagcaggtcttctagatttatctgatggtcaaatttggattgaagatgataatgtaacttggaaagaaccaaaagatagacatataggcatggtatttcaatcttatgctttatatccaagtatgacagtagagaaaaatttatcatttggtttaaggatgatgggaactgcgaaaaaaattatagatgataaaatagaaaaagcatcaaaccttttacaaataaatgaattacttaaaagaaaaccttcacagctctcaggaggtcagagacagcgtgttgctataggaagagctcttgtaagagatgcaaaggtatttttatttgatgagcctcttagtaacttagatgcaaaattaagagcagaattacgttatgaaataaaaaaacttcatagagatttatctaatactatgatctatgttacgcatgatcaaattgaagcgatgactctcgctgaccgtatatctgttatgaaagatggcttaatacaacaattagatacacctaaacaaatctataataaaccagctaatctatttgtagctggttttattggttctccaagtatgaattttttaagagctaaatttgataaatcaaatcaatatttacttattggaa

SEQ ID NO: 271660 - DNA, 1279 bp, Unknown
  Bacterial polypeptide expressing nucleotide sequence isolated from the Sargasso Sea
ctgcgccgtccacgcgcagtcccatgttttccgatcgcagcgcatcttgcgagtcgctttccgcgcctcgtatggagacacttgcgctcgcgatccgcaaggaatggttacatcatgaactcgacgacatcccatagcgtagccggcgccacccagatggcccgccccgccccgacgacaaaatcgaaatcggacgaattcgttcgcatcgaaaatgtcgtgaagaaattcggcgacagcacggctgtcgacaacgtcaacctgagtattgccaagaacgaactgtttgccctgctcggcagctccggctgcggcaagtccacactcctgcgcatgctcgcggggctcgagacggtgacgtccgggcgcattttcgtcgacggcgaagatcttgccgcgatgccgccttacaagcggccggtcaacatgatgttccagtcgtatgcgctgttcccgcacatgacggtcgaagcgaacattgccttcggcctcaagcaggaaggcacgccgaagaacgagatcaaggagcgtgttgccgacgcgctcaatctcgtgcagatgggtaagtacgcgcaacgcaagccgcatcagctctccggcggacagcagcagcgcgtggcgctggcccgctcgctcgtcaagcgccccaagctgctgctgctcgacgagccgatgtcggcgctcgacaagcagatccgtcagaagacccagctcgaactggtgaacatcatcgacaaggtcgacgtgacctgcgtgatggtcacgcacgatcaggaagaagccatgacgatggccgggcgtctcgcggtgatgagcgaaggccgcatcgtgcagatcggctcgcccagccaggtgtacgagtttccgaacagccgcttctcggcggagttcatcggctcgaccaacctgttcgaaggcacggtggtggcggacgagccggaccatattttcgtcgaaagcgaagaccttgaaacgcgtatttatgtgagccacggcattaccgggccgctcggcatgccggtgggcatttcggtgcgcccggagcgcgtgaaggtgtcgcgcgaaaaaccggctacgccgcacaactggacgcgcggcgtggtttccgacgtggcgtacatgggcagctattcgctgtaccacgtgcgcctgccgagcggcaagacggtcgtgtcgaatctctccagctcgcacctgatgagcgagggtgccccttcctataacgacgacgtgttcgtctactggtcgccggctagcggcgtggtgctgacgcaatgag

SEQ ID NO: 271661 - DNA, 756 bp, Unknown
  Bacterial polypeptide expressing nucleotide sequence isolated from the Sargasso Sea
aaacgggtgatgaggcattaaaaagtgttgatattgatatcccaacctctcaagtgatggcactcataggtccatcaggagctgggaaatcaaccttaatacgatgtattaaccgacttgtagaacctacaaatggacaagtttttttgaatgatctcgatttaaccaaactttctagaagaaagcttagatttgcgagaagacgtataggaatgattttccaggaatatgcattagtcgaaagattgacagtcatggaaaatgtgctgtcaggacgattaggctttgtaggtttctggagtagtttttttagaagatttccaacggaggacatccaagaagcatataggttgcttgatcgagtaggtttatctgaaatggcagacaaaagagcagatgcattatctggcgggcaaagacaacgtgttggaatctgcagggctttgattcagaatccggaactattgttagtggatgaaccaacagcaagccttgacccaaaaacttcgcgtcaaataatgcgcttaatcaacgaattatgtgatgaaagaggattggcagcaattataaacatacacgatgttctacttgctcagatgttttccaaaagaattgtgggattggaaaaaggagttattgtttatgacggtcccccagaagatctaacccctgaagtcctgaccaaaatttatggtgaagaaaattgggaagcaaccattggcaaagtggatgaggatgaaattgatgaacagtaac

SEQ ID NO: 271662 - DNA, 1132 bp, Unknown
  Bacterial polypeptide expressing nucleotide sequence isolated from the Sargasso Sea
catggctgaaatagaactcaaaagtatttctaaatcgtttggttcaactgaagttataaagtcacttgatctttcaatttccaatggtgagttcattaccattgtgggcccctccggatgtgggaaatctacactattgagaatcatagcaggtttggaaaatcaatcgactggtgatgttataatagatgggaatgtggtcaataatactagggcaagcgaacgtgatttagccatggtttttcaatcctatgctctctatccgcatctgacagttcagcaaaacttgatggtacctcttaaactacgacgcctgtctattttggaacgcttcccgattattggatggtttatgcccaaccgtcgttccaagttagaagaggtagtgagcaaggtccaagctgcatcagaaactcttcaaataacacaccttttggaccgtaaaccaggtcagctttctggaggtcagcagcagagagtagcagtaggaagagcaatggtcagagaacctgtagctttcttgatggatgaaccactttctaatttagatgcaggcctgagggttcatatgcgtgcagaaatttcagaattgcaccgagatctcaaaacaacatttatatatgttactcatgatcaggcggaagctttaaccatgtctgatcgaatggctgtcatgatggatggagaaatacttcaacttaatactccacatgaaatttataataacccttcaactataagggtagctgaatttgttggaagccctaaaataaatattctaaagggagaatacgatgaaaaaggcaatttaaactgtttcgggactaaaataacagactccattaaacttgcccaaaaaggaaatgtttccgtaggaataagacctgaacacatggaactagtttcatcaaatgataagaaaatatttaagggggatattgtttacagagaaaatctgggatctgatattttccttcacttgactgtgaatgaaggagaacaaaaaattattgtaagaagtgaaccaagcaaggttattaatgcagcagttggtgatcaagttatgattggatgggatgagcaaaaagttatggtttttgatgttgatggtaaaaacgttacaatgcaataa

SEQ ID NO: 271663 - DNA, 1090 bp, Unknown
  Bacterial polypeptide expressing nucleotide sequence isolated from the Sargasso Sea
atgtcaaaaaattcagaatttgttaaattcgataaagtagacaagagttatgatgggaaagtcttggttgttaaagatttaaatttagatattgctgaaggtgaatttataactatgcttggaccatctggttctggaaaaactacatgtttaatgatgttggctggatttgaaacaccaactaatggagaaatttatttagactctaatccaatttcaaacattccaccccacaaaagaggtataggaatggtttttcaaaattatgcactctttcctcacatgacagtttatgaaaacttagcctttccattaaaagttagaaaaattcttaaagacgaaattgataaaaaagttgataaggcactttcaatggtttctctttctggatttgaaaatagaatgcctggacagttatcaggtggacaacaacaaagagttgctgttgcaagggcattggtctttgatccatcagttgttttaatggacgaacctttgggagctttagataaaaatttaagagaaagtatgcaatatgaaattaaacacatacacgaaagtattggtgtaacagttgtatatgttacccatgatcaaggtgaagctctaacaatgtcaaacagaattgcagtttttaatgatggtaaagttcaacaattatcttcaccagataaattatatgaagaacctgtaaattcttttgtagcagaatttattggtgagaataatagattctcaggaaaagttaccgatatttcaaaagataaatgtaaagtaaaattagatgaaggctcagagattttagcaaatcctatagcagtaaagtcaaacggtgaaaatactatagtatctttaagaccagagagagctttaattaatacaaaagaaaaaatggaaaataattttaagggaaaaatagaggaagttatttaccacggagatcatacacgagtaagattaaatttacttggaaacaaagatttcattttaaaagttcctaatagttcagctaacatggatattaaattgggaaaccaaattaatgttagttggaatagttttgacgctagagctttagatcctaaataaa

SEQ ID NO: 271664 - DNA, 448 bp, Unknown
  Bacterial polypeptide expressing nucleotide sequence isolated from the Sargasso Sea
tatgagtgctgatgtagaactacaaaatgtttcagttacctttggcagtttttttgcagctaaaaatgtaagtgtaaaaattcaagaaggagaattttttagttttttaggaccttcaggttgtggcaaaacaactttattaagagcaatttctggatttttagatccttctgagggtaaagtcttaataggtggtcaagatatggcaggtattggtccaaacagaagaccaacttcattaatctttcaaaatcttgcattgtttccattaatgtcagttgctgataacatcgctttttcactagaagttagaggaattagtaagcttaaaagaagaaaaagagctgatgaattgttggagcttattgctttaacagggcagggagataaaaaagtacatgagttgtcaggaggtcaaagacaaagagttgctatagcaagagcgtta

SEQ ID NO: 271665 - DNA, 1081 bp, Unknown
  Bacterial polypeptide expressing nucleotide sequence isolated from the Sargasso Sea
atgactcaaaaaaaagttaacgcaattgaagttaaaaatgtaactaaggtttatagaagtttgaatacggaaactaaagctttaagaaatgctaacttaacgatttatgacaatgagttttttacattacttgggccatcaggttgtggaaaaacaacgctattaagattaattgctggttttgaggatatcacagaaggatctataaatctttttgatcaagaaattgtaaacctacctccaaacaaaagacctgttaatacagtttttcaacaatattcattattccctcatttagatgtctatgaaaacgttgcttttggacttcgacgtctaaaaaaagatgaaattttaactaaaaaaagaactatggaagtgcttgagcttgtacaaatgaaagattacgcaacaagaaaacctaatcagttatcaggaggtcaacaacaaagagtagctttagcaagggctttagcgcctgagccaaaggttttacttttagatgaaccactttccgcactagatttaaaacttcgccaagcaatgcgttatgaattaaaaacacttcaaagagaaacaggtattacttttgtgtttgttacacatgatcaagaagaagctcttactatgtctgatcgtattgctgtaataaatgaaggagaaatacaacaaattggagagcctgaacaaatctatgaaagtccatccaataagtttgttgcaaattttataagtgaggcaaatttattgtctggtgtttgtaaaactcctggagaaaatggtgtttgtgaacttgatactgggcatgaattaaacttgtttgtaccccatcacataaaacaaaatgataaagtaacaatatttattaggcctgagagaattaagatagaaaaatcatctaaagataaaagtcagctaagtatttcggaatttacttatcttggcaatgccgcaaccattcaattaaaatcaaataatcaattaattaatgtaaatttaccaattgaagatttaaaagtttttaaaaaagatgattacgttgagattcagtttccaaaagaaagtgctcacgttattgactaat

SEQ ID NO: 271666 - DNA, 716 bp, Unknown
  Bacterial polypeptide expressing nucleotide sequence isolated from the Sargasso Sea
aaatgtcaataaatggtttggtgattttcaggtattacaggatgtaaatttagaagttaaaaagaaagagcgtatagttgtatgtggaccttcaggttctggtaaatctactatgattagatgtattaataggcttgaagaacatcaagaaggaacaataatagttgatggtattgaattaactggtaatttaaaaaatatagatagtgttagaagagaagtgggaatggtttttcagcaattcaatctttttccgcatttatctgtaaaagaaaacattactttagcaccaatttgggttaaaaaaatgccaaaggctgaagctgaagaattagcaatgcaacaattagaaattgttaaaattcctgagcaagcaaataaatatcctggtcaactttccgggggtcagcaacaaagagttgctattgctagatctctagcaatgaaaccaaatattatgctatttgatgaacctacatcagctcttgatccagaaatgattaaagaggttttagatgttatggttgatttagctgaaggcggtatgactatgatagttgttactcatgaaatgggttttgcaaaaactgtggctaatagaatggttttcatggacgaaggaagaattgtagaagaggcttcaccagacaaattttttaataatccagagagtgatagaacaaaattatttttgagtcagatacttaatcattaag

SEQ ID NO: 271667 - DNA, 622 bp, Unknown
  Bacterial polypeptide expressing nucleotide sequence isolated from the Sargasso Sea
tatgtcaaaaaataatgaatttgttaaatttgataaagtagacaaaagttatgatggaaaacttttagtagttaaggatctaaatctagatatagcagaaggtgagttcataactatgcttggaccctctggttcaggaaaaactacttgcttaatgatgttagcaggttttgaaactccaactaatggagaaatttatttagatggaaatccaatatcaaatattcctcctcataaaagaggcattggtatggtctttcaaaattatgctttatttcctcatatgactgtttatgagaacttagcatttcctttgaaagtaagaaaaatgttaaaagacgaaattgataaaaaagttgataaagctttatcgatggtttctttgacagggtttgaaaatagaatgccaggacaactatcaggaggacaacaacaaagagtagctgttgcaagagcattagtttttgatccagcagtagttttaatggacgaacctcttggagcgttagataaaaatttaagagaaagtatgcaatatgaaattaaacacattcatgaaagtattggcgttacagttgtttatgtaactcatgatcaaagtgaagctttaacaatgtcaaac

SEQ ID NO: 271668 - DNA, 1054 bp, Unknown
  Bacterial polypeptide expressing nucleotide sequence isolated from the Sargasso Sea
tatgtctgaaataataattaaaaatctcaataaatcatacggaaataataaggttataaattcatttgacatagaaattcaagatggtgaatttattgttttggtaggaccatcaggctgtggaaaatcaactttattaagaatgatttcaggacttgagactgttgatgaaggagaaatatttttagataaaaagttaataaataatcttattccatcaaaacgaggaattgcaatggtatttcaatcctatgctctttatccacatatgaatgtttatgaaaatatgtcttttggattaaaaatggagaaactatctaagaatgaaattgatcaaaaagttaacgaagcagccaatacactccaaataaaagatttacttgagagaaaacccaaagaactttcaggtggacaaaggcaaagagtagctattggcagagctatcacaagaaaccctaaattatttttatttgatgagccattatcgaatttagatgcagcattaagatcggaaatgagggtagaaatttcaaaacttcatgaaaaaatgaaatcaaatattatttatgtaacccatgatcaagttgaagcaatgacacttgctgacagaatagtcatcttaaataatggaaatatagaacaatttggaactcctaatgaaatttattcagatccaaataatatctttgttgcagagtttatcggttcaccaaagatgaatataataagaattgataaagaaaatataattaacggcaatactcttaaagttttgaataacgaaattaaatttaaacaattaaatctaaaagatgaaatttacttgggtataagacctgaagatattagtgttaaagatgaacatagtattaaatttgaagtaaaagttgatcttatagaaaatttaggatttgaaagaattatttattcatcttcacaaaataatgagataaaaattaaaacatcagagaatattcaaagtggtactttaaaaatatcctttcctgaaaataaattgtatttgtttgataaagacaaaaataggataaggtaa

SEQ ID NO: 271669 - DNA, 1046 bp, Unknown
  Bacterial polypeptide expressing nucleotide sequence isolated from the Sargasso Sea
aagttatgacggaaaagttttagtcgtaaaagatctaaatttagatattgccgaaggtgaatttattacaatgcttggaccgtcaggttcaggaaaaacaacttgtctaatgatgttggctggtttcgaaacaccaacaaatggagaaatatatttagatagcaatccgatttcaaatattccacctcacaaaagaggaataggaatggtttttcagaactatgctttgtttccacacatgactgtttatgagaatttggcttttcctttaagagtaagaaaagttactaaggatgatatagacaaaaaagttgataaagctttatcaatggtttctttaacaggttttgaaaatagaatgcctggtcaactatcaggcggtcaacaacaaagagtagctgttgctagagcattagttttcgatcctgctgtagttttaatggatgaaccattaggagcgttggataaaaatttaagagaaagtatgcagtatgaaattaaacatatacatgaaagcattggtgttaccgtagtttatgtcactcatgatcaaggtgaagctttaactatgtcaaacagaattgcagtttttaatgatggaaaagttcaacagctttcatctcctgataagctatatgaagagccagttaattcttttgtagcagaatttattggagaaaataatagattcgctggtcaagtaacagaaatttctaacaacaaatgtaaagttaaacttgatagtggatcagaaattcttgcaaatcctattgcagtcaaatcaaatggagaaaaaactatggtatctttaagacctgaaagagccttaataaactcaaaagaaaaaatggaaaataattttaaaggaaaaatagaggaagtgatttaccatggagatcacactagagttagacttgacttattaggaaataaagaatttattttaaaagtaccaaatagttcagctaatatggaaattaaattaggtaatcaaataaatgttagctggaacagctttgatgctagagctttagacccaaaataat

SEQ ID NO: 271670 - DNA, 745 bp, Unknown
  Bacterial polypeptide expressing nucleotide sequence isolated from the Sargasso Sea
tatgtcagttaataaagagtttgttaagttcgataaagtagacaaaagttacgacggtaaagttttagttgtcaaagatctacaattagacatcgctgagggtgagtttattacaatgctaggtccttcaggatcaggtaaaactacatgtttaatgatgttagctggctttgaaacaccaactaatggagaaatatatttagatggaaatgctatttccagtattccaccacacaaaagaggtatagggatggtttttcaaaattatgcattatttccacacatgactgtttatgaaaatttagcttttcctcttagagtaagaaaaattccaaaagatgaagcagataaaaaaattgataaagctctatcgatggtatctttacaaggatttgctcaaagaatgcctggacaattgtcaggtggacaacaacaaagagtagctgtagcaagatcattggtttttgatccacaacttgttttaatggatgaaccacttggagctttagataaaaatttgagagaaagcatgcaatatgaaattaaacatattcatgaaagcattggagtgaccgttgtttatgtaacacatgatcaaagcgaagcattaactatgtcaaatcgaattgcagtttttaatgatggaaaagttcaacaactttctagtcctgatgaattatatgaaaaaccagtaaattcttttgttgcagagtttattggagagaataatacttttgcgggcgaa

SEQ ID NO: 271671 - DNA, 1057 bp, Unknown
  Bacterial polypeptide expressing nucleotide sequence isolated from the Sargasso Sea
tatggctactatagaattaaaaaatattgaaaaatcatttggtgaaaacaaggtaattgacaaatttaatatcaaaataaatcacggcgaatttattgttttagtaggtccatcaggatgtggaaagtccacactcctaagaatgatttctggtttagagtctgttgatgaaggtgaaatacatttagataaaaaaataattaataatttaattccatcaaaaagaggaattgcaatggtttttcaatcatacgccttatacccacacatgaatgtttatgaaaatatgtcattcggattgaaaaatgaaaaactagataaaaacgaaatagataaaaaggtaaaagatgctgctaaaactcttcaaatcgaagatctcttgtcgagaaaaccaagacaactttctggcggacaacgacaaagagtggcaataggtcgtgcaataacgagaaaccctaaattgtttttgttcgatgaaccactttcaaatcttgatgctgctttaagatcagaaatgcgtgtagaaatttcaaaacttcataaaaaacttagtacgaatatgatttatgttacacacgatcaagtagaggccatgacactagctgataagattgttattttaaatcaaggtgtaatggagcaatatggatcacctgatgaaatatacaataatccaaataacatttttgtagcagaatttatagggtccccgagaatgaatattttaaaaattgataaaggaaaaattaaaaacggaaatacaattaatatttttaacagcgatatccagtttaatggttataaatttaatgatgatatttatcttggaattagacctgaacatattaaggcagataattctcaagatataaaagccaagattaagattgatctcatagaaaaccttggatttgataagattatatactcgtctgtggatggagaagagtttagaataaaaacttcaagtaatattgataaagatcattcccaaatatcattctctaaagaaaatgtttatttctttgattcaaataaaaataggatcaaaaattag

SEQ ID NO: 271672 - DNA, 736 bp, Unknown
  Bacterial polypeptide expressing nucleotide sequence isolated from the Sargasso Sea
aatgtctgacccaataataaaaattcaaaatatgaataaatggtttggcgactttcaagttttaaaaaatataaatcttgaggttgaggcaaataaaaaaattgttgtatgtggcccctctggatcgggaaaatcaacgctgattagatgtattaatagattagaagagcaccaagaaggagatataattgttgatggaaatgaactatcagaaaaaacaaaagatattgaaaaaattagagctgaagttggaatggtttttcaacaatttaatttatttccacacttatcaattttagacaactgtactcttgcacctatttgggttaagaaaatgccaaaaaaagaagctcaagaactagccttagaccaacttaaaaaagtacaaatagatgatcaggccaataagttccctggacaattatccggaggtcaacaacagcgttgtgcaatagcaagagcattgtgtatgcaacctaaaatcatgttatttgacgagccaacttcagcattagaccctgaaatgatcaaagaggtacttgatgcaatggttagtcttgctaaaggcggaatgactatgattgttgtaacacatgagatgggttttgctaaagaggttgctgatgaagtgatttttatggatgaaggcatgataattgagaaggcagatactaaagaattctttgctaacccaaagagtgacagaactaagctttttttgagccaaattctttaa

SEQ ID NO: 271673 - DNA, 571 bp, Unknown
  Bacterial polypeptide expressing nucleotide sequence isolated from the Sargasso Sea
gagcatcaagaaggtaatattgtcgttgatggaactgaattaacagaggatacaaaaaatattgaacaaattagagctgaagttggaatggtatttcaacaatttaacttgtttcctcacttatctattttggataactgcacactagctcctatttgggttaaaaaaatgcccaaaaaagaggcagaagaattagcattaaaacatttagaaagagtgcaaattcttgatcaagcacaaaaatatccaggacaattatctggaggacaacaacaaagagctgctattgcaagagctttatgtatggagccaaaaataatgctttttgacgaacctacatctgctttagatcccgaaatgattaaagaagtgttagatgttatggttaatttagcaaaacaaggaatgactatgatcgtagttacacatgaaatgggttttgcaaaagaagttgcagatcaaatgatatttatggatgaaggaatgatagtagaaaaagctgataccaaagaattttttgctaatccaaagagtgatagaaccaaacttttcctcagccagatactatagt

SEQ ID NO: 271674 - DNA, 1150 bp, Unknown
  Bacterial polypeptide expressing nucleotide sequence isolated from the Sargasso Sea
atggcgagcatctcgatgcggcgcgtgcagaaagcctacggcgatcacgcgccggtcattcgcgacgtcgatctggaaatcggcgcgcacgagttctgcgtgttcctcgggccgtccggatgcggcaagtcgacgttgctgcggatgatcgccgggctcgaggacctgagcgcgggcgagctgtcgatcgatggccgccgcgtcgacgacgtgcccgccgccgagcgcggtgtcgcgatggtgttccagagctacgcgctgtttccgcacatgacggtctacgagaacatggcgttcgggctgaagctcgcgcgcgtgcccaaggccgagatcgaccggaaggtacgcgatgccgcgcgcatcctgcagctcgacatgctgctcgatcgcaagccgaaggcgctgtcgggcgggcaacggcagcgcgtcgcgatcggccgcgcgatcgtgcgcgagcccggcgtgttcctcttcgacgaaccgctgtcgaatctcgacgccgcgctgcgcggtcagacccgcatcgaaatcgcgaagctgcaccgccagttcgaacgcgcgagcgtcgtctatgtgacgcacgaccagaccgaagcgatgacgctcgccgacaagatcgtgctgctgcatgccggcgccgataccgcgcagcacggcagcatcgcgcaggtcggtgcgccgctcgacctctaccaccacccggccagccgcttcgtcgcaggcttcatcggctcgccgcgcatgaacttcctgccggccgtcgtgaccgcctgcgatgcgcatcgcacgaccgtcacgctcacaccgtccggcgaaaccttcgtactgccacgcgatggctcggcgctcggtgcgggcgccaccgtagcgctcggcattcgccccgaacacctgacgctcggcgccgcgcacgacgcgacgtcgctcgcacgcgacgtcgtactcgtcgaacgcctcggcgaacagacctacgtgcatctcgagcagcccggcggccactcgctcatcgcgaaggtgcccggcgacgcgcaggtgcgcagcggcgagcgcgtgctcgtgcatgcgccggccgcggcctgccatctcttcaccgaagacggccgcgcggtgcccgcgtgcgccgacgtccacgttcaccactacgcataag

SEQ ID NO: 271675 - DNA, 1051 bp, Unknown
  Bacterial polypeptide expressing nucleotide sequence isolated from the Sargasso Sea
atgaccagcaccctcaatcttcatcaagttcatagcgattatcagggccaacaggtactcaaaggcttagatttaacccttgctcaaggggaaatccttgcgctgttaggcccaagtggctgcggcaaaaccactttgctcaggacggtggcaggattgcaggctatcagccaaggtgaaattcaaattaatggcaagacggtcagcggtgcaggacaatttgtgccgagtgagcagcggggaattgggatgatcttccaagactatgccttgtttccccatttgaccgtcgccgagaatattctctttggcgtagcaaaattaacggccgcgcagcgcaaggcgcgcttggatgacatgctcgccctagtgaaactcgaaggcttagccaagcgttatccccatgagttgtccggcgggcagcagcagcgggtgtcgattgcccgcgcgcttgcgtatgagccgcaattactgttactcgatgagcctttttcgaatatcgatgcccaagtgcgccacagcatgatggcggagatccgcagcattctcaaacagcgtaatgtcagtgcggtatttgtaacccacagtaaggacgaggccttcgtctttgccgataccttggccatttttaaccaaggtgtgatagtacagcatggccgcgccgaagacttatatgccgcgcccaatagccgttatgtggctgattttctgggcagtggcaactatctacccgccgaagtgatcgatggtcatagtgttgccaccccgattggtgagctgcgcagcctgacgcccttgtcacaatcccatgctttcaatggccaagtgtttttgcggccacagcaattggcgctcagcgccgatgatgctggcgtaggcactattactgagcggcgcttcctcggggcattttgccattactgggtgaaagtcgaggcggcgtcccacgcccattatgtcgaagtacgcagccaaatcatgcagttgaatgtcggccagcgggtgggattaagcactgagccgcattccttagtgctatttgaatcttaag

SEQ ID NO: 271676 - DNA, 794 bp, Unknown
  Bacterial polypeptide expressing nucleotide sequence isolated from the Sargasso Sea
tatggctaataataaagaattcgtcaaatttgataaagtagataaaagttatgatggcaaagttttagtcgtaaaagatttaaacctagatatctcagagggcgaatttattactatgcttggaccatctggttcaggaaaaactacttgtttgatgatgttagcaggatttgaaacaccaacaaatggtgaaatttatttagactcaaatccaatttcaaatattccacctcataaaagaggaataggaatggttttccaaaactacgctttatttccacacatgactgtttatgagaatcttgctttcccactaagagttagaaaagtttccaaagaggatactgataaaaaagttgataaagcattatctatggtatccctgtcaggatttgaaagtagaatgccaggacaattatcaggtggacaacaacaaagagttgcagttgcaagagccttagtttttgatccggctgttgttttaatggatgaacctttaggagcattagataaaaatttaagagaaagtatgcagtacgaaataaaacatatacatgaaagtattggagttactgttgtgtatgtaacacatgaccaaggagaagcattaacaatgtcaaatagaattgcagtttttaatgatggtaaagtacaacaactgtcatcaccagataaactttatgaagaaccagtaaactcatttgttgcagaatttataggagaaaacaacagattttctggggaagtaacaaatatttcaaaagataaatgtaaagtaaaattagatgacggat

SEQ ID NO: 271677 - DNA, 769 bp, Unknown
  Bacterial polypeptide expressing nucleotide sequence isolated from the Sargasso Sea
atgtacaagcttaccgttgacaacctgcacaagaagttcggcgacaacgaggtgttgaagggcgtgtcgatgaaggcgaaggccggcgacgtgatcagcatcatcggctcgagcggatccggcaagagcacgttcctgcgctgcatcaacttcctcgagcagccgtgctcggggcagatcacaatcggcagcgagccgatccagaccacgcgcgaccgcaacggctcgctgcgcgtggccgaccagaagcagctgcagcggatgcgcacgaagctgtcgatggtgttccagcacttcaacctgtgggcccacatgacggtgctcgagaacatcatcgaagcgccgatggccgtgctcggcgtcggcaaggacgaagcgatcgcgcgggcgcgcaagtacctggagaaggttggcctcgcgccgcgcgtcgagggcatgtatccgtcgcacctgtcgggcggccagcagcagcgtgtggccattgcacgcgcgctggcgatggagccggaagtgatgctgttcgacgagccgacgtcggcgctcgatccggagctcgtcggcgaagtgctgaaggtgatgcagaagctcgccgaggaaggccgcacgatggtcgtcgtcacgcatgagatgggtttcgcgcgcaacgtgtcgaaccacgtgatcttcctgcaccaggggaagatcgaggaagaggggaatccgcaggagattctcgtgaacccgaagagcgaacggctcgggcagtttctgtcggggcggttgaagtaag

SEQ ID NO: 271678 - DNA, 1099 bp, Unknown
  Bacterial polypeptide expressing nucleotide sequence isolated from the Sargasso Sea
tatgaatcaatctccaaacatatttgtccgatttgaaaaaattgataagagctatgatggtagagagcttgttgttaaaaatttaaatttagatattgctgaaggtgaatttttaactttactaggaccatcgggctcaggaaaaacaactactttaatgatgttggcaggtttcgaaaatcctacaagtggagaaatatatttagataaaaaacctataagtagtataaccccgcataaaagaggaattggaatggtctttcaaaactacgcgttattcccacatatgacagtttacgaaaatcttgcatttccattaagagttagaaaaatttcaaatgatgaaattgaaaataaaattaataaagcaattagtatggtatcacttacaggttttgaaaataggatgccaagtcaactttctggaggtcaacagcaaagagtagcagttgctcgagctttagtttttgaaccaaaattagttttaatggatgaaccgttaggtgctcttgataaaaatctgagagaaagtatgcagtatgaattaaaacatatacacgaaacactaggtgttactgttgtgtatgtaactcatgatcaaggtgaagcattaacaatgtctaatagaatagcagtatttaacgatggatatattcagcaattatcaagtcctaatgaactttatgaacgaccaaacaattcatttgttgctagattcataggcgaaaataatatcatcaatggaacaattgtaggtggtgacgataaaaattgtactgttaaaacaagtaatggagaaattatacatgcaaatcctattatttcaaataaggttggtgaaacaactagtatgtctttgagaccagaaagagttaaaataaatccttcagatgatacttctaataagtttagcgcaaaaattgaagaagttatttatcatggtgatcatactagacttagagtgagtttattagaacaaaatgattttattcttaaagtaccaaatgcatcaaatgtcttttcttttgaaactggctcagagttaaaacttggatggaattcttatgactgtagagctttagattttattggtaattaa

SEQ ID NO: 271679 - DNA, 703 bp, Unknown
  Bacterial polypeptide expressing nucleotide sequence isolated from the Sargasso Sea
tgctgctacacttcaaatagaagatttacttgaaaggaagcctaaacagctatcaggcggacaaagacaaagagttgcaattggtagagcaattacaaggagtcctaaagttttcttatttgatgaaccattatcaaaccttgatgctgctttaagatctgaaatgagagttgaaatatctaaactacataaaaaaatgaattcaaatataatatatgtaactcatgatcaagttgaagcaatgacattagctgatagaattgtagttcttaataagggaaatattgaacaatatggaacacctaatgagatttattcagatccaaataatatttttgtagcagaatttattggatcgccaaaaatgaatataattaaaatcaataaagaacacattgctaactcaaacactttgcacttatttaataataaaataacttttgataatttagaatttaaagatgagatttatataggtattaggcctgaagatataagcttaaaaagcaatcatgaaatccaggtagatgtgaaagttgatcttattgagaatttaggatttgaaaaaatcatttattctaaagtttcagaaaatcaaattataattaaatcttcagagaatattaataatcattcactaaagatatctttttcaaaagataaggtattattttttgataaggataaaaacaggattagataa

SEQ ID NO: 271680 - DNA, 736 bp, Unknown
  Bacterial polypeptide expressing nucleotide sequence isolated from the Sargasso Sea
atgtcagataaaataattcagattacagaaatgaataagtggtttggtgatttccaagtattaaaaaatataaatttagaggtcgagaagaataaaaaaattgttgtctgtggaccttctggatcaggtaaatcaacattaattagatgcataaacagacttgaagaacatcaacaaggttcaattatagtagatggaaatgaattaacagaagacactaaagacatagaaaaaattagagctgaagttgggatggtgtttcaacaatttaatttatttcctcatctttcaattttagataattgtacactagctccaatttgggtaaaaaaaatgccaaaaaaagaagcagaagatttagctcatcaacacttggaaaaagtacaaattgcagaccaagctaacaaatatccaggacaactttcaggcggtcaacaacaacgatgtgcaattgctagagcattatgtatggagccaaagataatgttatttgatgaaccaacatcagctcttgacccagaaatgattaaagaagttttagatgcaatggttaatttagcaaaagcaggaatgacaatgatagttgttactcatgagatgggatttgctaaagaggtagctgatgaggttatttttatggacgaaggaatgattgttgaaagagctgaaactaaagagttttttgctaaccctaagagcgataggactaagctatttttaagtcaaatactataaa

SEQ ID NO: 271681 - DNA, 655 bp, Unknown
  Bacterial polypeptide expressing nucleotide sequence isolated from the Sargasso Sea
acaggcttggttggggagtctggttccgggaaatcgtctctagccagagctttattaggaatagaagctgcagaagggtctattatatttgatggaatagatattaagtatttaaatataaaaagcatcagaagctttaaaaaagatttccaaattgtatttcaagaccctttcggttctctatctccaagaatgactattggagagataataggagaaggattaaaagtccatgagcctggactgcctaaagaagatcgtcttactaaaatactaagcgcattgaatgatgttgagctagatgagagttcttattctagatttccgcatgaactttctggaggtcaacgtcaaagagttgcaatagctagagcaataatactcagacctaagttaatcctcttggacgagcctacttctgctttggatgtctcaatccaaatgcagatattaaatctactaaaagatttacaaagtaaactaggtttagcttacttatgtattagtcatgatttaagagtgattagatttcttgcagatcaagtgtatgtcatgaaagatggagtaattgttgagcatggttcttctgaggaagtttttgaagatcctaaacatgaatacaccaaagagcttttagctgcctcacttgcataaa

SEQ ID NO: 271682 - DNA, 1087 bp, Unknown
  Bacterial polypeptide expressing nucleotide sequence isolated from the Sargasso Sea
tatggcttcaaaaaaagatttcgttaaatttgataaagtcgataaaagctacgatggtaaagtcttagttgttaaagaccttcaattagatattgctgagggagaatttattacaatgttgggaccctctggttctggtaaaacaacgtgcttgatgatgttagctggttttgaaactccgactaacggtgaaatttatttagatggtaaagctatatctagtattccccctcacaaaagaggaattggaatggtgtttcaaaattatgctttgttcccacatatgactgtttatgaaaatttagcttttccattaagagtaagaaaaattccgaaagatgaggctgataaaaaaattgataaggcattatcaatggtatccctacaaggttttgctgcaaggatgccaggtcaattatctggtggccaacaacaaagggtagcggtagcaagatcactagtgtttgatccacaattagttttaatggatgaacctttgggtgctttagataaaaatttaagagaaagtatgcaatatgagattaaacatattcacgaaagtattggtgtgacagttgtttacgttacccatgatcaaagtgaggctttaacgatgtctaatcgtattgcagtatttaatgatggtaaagttcaacaactctcaagtcctgatgaattatatgagaaaccagttaattcatttgtcgctgaatttatcggagagaataatacatttggtggtgaggtttcagatatttctggaggaaagtgtaaagtaaaattagcaaatgcagaaatactagctaatccaatctcagtcaaaggtaaaggagagcggactactgtttctttaagaccagaacgagctttgattaatccaagtacaaaaatggataatcttcacaaaggaaaaatagaagaagtaatttaccatggggaccatacaagagtaagaataaatcttttaggcaacccagagtttattttaaaagttccaaatagctcatctaaccttgatatcaaacttggcaatgagataaatatcggatggaacagtgatgacgctcgggcacttgacccaaaatag

SEQ ID NO: 271683 - DNA, 688 bp, Unknown
  Bacterial polypeptide expressing nucleotide sequence isolated from the Sargasso Sea
aatggctgctgatgctgtcaatatcaattccctcattcatgcctacgggcgtggttcgatgcgccgtgaagtgcttcgaaacatttcactcaccatcgcagcgggcgaggtggtcacgcttacgggtccatcgggttgcggcaaaacaactcttctgaccctgatcggtgcgcttcggcaggtggaagaaggttcagtcaccgttctcggtgaacagctcaatggtgccggtcgcagtcgtcgtcagcagctccggcgccacatcgggatgatctttcagggacacaaccttctcaagtgcctcacggccgaggagaacgttcagatgggtgctgatctgctgcccaacacctccttccgtgcccgccgggacagggcccgatattggttacgggctgtgggattggaaggtcacgagagcaaacgcatcgaccagctctcaggaggtcagaggcagcgcgtcgctatcgctcgcgccttggcccctgagccgaagcttctgctcgccgatgaaccaacagcgtctctggacagcgtcagcggccgggctgtggttgagctgctgcatcagctggcccgtgagcaatccagtgctgttctgatggtcacccacgacccgcgcatccttgatgtggccgaccgccttctgcgtatggaggatggcctcctccagccagctgttgagtaa

SEQ ID NO: 271684 - DNA, 867 bp, Unknown
  Bacterial polypeptide expressing nucleotide sequence isolated from the Sargasso Sea
tatgagtgctgacgtcgaacttcaaaatatttctgttacttttggaaatttttatgccgcaaaaaatgtgaatgtgaagattaatgaaggtgaattttttagttttttaggtccttcaggatgtggaaaaaccacaatacttcgagccatatctggttttcttgatccttcagaaggaaaagttttaattggcggcaaagacatgggaggtataggccctaataaaagaccaacctcactaatttttcaaaatcttgctttatttccgttaatgtcagttgcagaaaatatagcattttcacttgaagttaaaggtgttgataaaattgaaagaagaaaaagggcagacgaattattagaacttatagcattatctgggcaaggtgataaaaaagttcatgagttatcaggaggacaaaaacaaagagtagcaatagctagagcactagctatagagccaaaagttttactgttagatgagccactatctgctttagatttaaaattacgtcaaaaaatgagaactgagctaagggctattcaaaaaagtgttgggatcacttttatttatataactcacgatcaaggtgaggctctaacaatgtctgatagagtagctgttatgaacgagggagaattagaacaagttggccaaagtaatgacgtctataattttcctcaaacaccatttgtagctacttttgttggggaaaataatgcttttcactgcaaagttatttctactgaaaaagattttgtaaaagtagattttgatggcgtacatttttttgcaaaagcaggcggtgataataaaaaaaaccataacttcaaaaaaggtcaagaagtaattttatttataagacaaga

SEQ ID NO: 271685 - DNA, 1108 bp, Unknown
  Bacterial polypeptide expressing nucleotide sequence isolated from the Sargasso Sea
ttgaaagatcgctcaaaggaggatgaagtggcagatataaatattaatactataaataaatattatggagatgtgcatgttattaaagacatttctcttgatataaaaagtcaatcttttactgttttagttggcccaagtgggtgtggaaaatcaacaatgttaagaatgattgcaggattagaagatattaattcaggaacaatttctattgatggagaagtcgttaatgatcttcctcctaaacaaagaaatattgcaatggtgtttcagtcatacgccttatatccacatatgacagtttttgacaatatggcttttggattaaaattagaaaaaagatcaaaagatgaaataaatgaaagagtacaagaagctgcgaggattttgcaaattgaagaataccttcatagaaaaccaaagcaactttctggaggtcaaagacaacgtgtagctattggtagagctataactagaaaaccaaaagttttcttatttgatgagcctttatcaaatcttgatgcagctcttcgagtacaaatgcgtgtcgaactagctaaattacatgatcaacttaatgcaacaatgatttatgtaactcatgatcaaactgaagccatgacactagcagatgatatagttgttttagatgaaggcatagtctcacaaaaaggctctcctatggaattatacagtaatccatcaaatctttttgtaggaggatttattggatcaccaaaaatgaattttgttgattcgaagatcttaagtgcaacgaatgactctacagaaatagatatttttggaacatcgaaaattacaataccaaaaacttcttcaaattcatcgaatggtgactcagttaccttaggtattagacctgaacatttattagttaatcaagatggtgatgcaagctgggaaagcaaagtttttgtagtggaaaaacttggctctggtacatttctatatttagaaaaagatggtgaacctctcgttgtagagacagaaggtgactctaatattaaagttggcgatactgtaaaagttggattcacagcttcacgttgtcaattatttgatagtagcaaccaagcttttaaataat

SEQ ID NO: 271686 - DNA, 1135 bp, Unknown
  Bacterial polypeptide expressing nucleotide sequence isolated from the Sargasso Sea
aatgggcacaatatcacttaaaaatatttcaaaatcatttggatctacccaggtattaaaagatctaaacgtagatataacagaaggtgaatttttaacattagttggtccatctggttgtggcaaatctaccttgcttcgaattatagcaggtcttgagcaacaaacttctggtgatgttttaattgataataaaaatgtaaacagaattagagctagtgaaagagacctagcaatggtatttcaatcttatgctctgtatcctcatcttacagtaagaagaaatttagaaacccctcttagacttagagattatagttcatttgaaagattacctttaattggaaatttgtctccaaataagaaacaaaaaacagagtctataaatcaattagtcagtaaaacttctgagacacttaagatatctgagctacttgatagaaaaccaggtcaactatctggtggtcaaagacagagagtagctcttggtagagcaatggtgagagagcctgttgcatttttgatggatgagcctctgtcaaatttagatgcggcacttagagttcatatgagatcagagttatcagagcttcacaattctcttaaaactacatttgtttatgtaacacatgatcaagctgaagcattaacaatgtcttctcgtatggctgttatgattgatggaaatttattacaacttgatacccctcaagaagtatatgataatccttcatcgctaagtgtggctcaatttgtaggaagtcctaaaattaatatttttaaaggctcatcagattcaagtggaactgtaagcttgctaaatcttaccttaaaaagaaaaagctcagagtcagatctagagctaaatattggtattagacctgaacatttagaaattacaaatcaaagtgatgaaaatacttttagtgcaacagtttcttatagagagaatttagggtcagatattttctttcatgtaaatacagaagatggaatgaataaaataattgttagaggtataccacaattaactcatgagatttctagtggttcaaaagtaaacattagaagagtttctaataaagctttattgtttaataaagagggaaaaagggttcagtttaataatgcataa

SEQ ID NO: 271687 - DNA, 814 bp, Unknown
  Bacterial polypeptide expressing nucleotide sequence isolated from the Sargasso Sea
tttgcaggttgaaaatgtcagttgccgttacaacggccgcaatgtgctggagctgctctccctgacggtggccgacaacgagattgtctgcctgctgggggcgagcggctgcggcaagaccacgctgctcaaggccatcgccggcctgctgccgctggcggagggaacgatccgcctcggcgataccctgctcgacgggcccggtgccagcgtgccgcccgaggcgcgcaacatcggcatgatctttcaggattacgccctctttcctcacctgacggtggccgacaatgtcggcttcggcctgaccaaactcgatcgccgtgcccgccagcaacaggtggacgaggcgctggcgctggtcaatctgcaggggctgggggatcgctatccgcaccagctatccggtggccagcaacagcgggtggccatcgcccgggcgctggtgtgcaagccgcggctgatgctgcttgacgagcccttctccaacatcgacacccaggtgcggatgaagttgatcctggagatccgcgccctgctcaagcagcaggggatcggcgccatcttcgtcagccacagcaaggaggaggcgttcgccttcgccgatcggctggcgctgtttcgcgcgggtcacatcgaacaggtgggtcagccggagcagctctatcgccgcccgcagaaccgcttcgtggcggagtttctcggcggggtcaactacctggcggccgaggtggtggacagccactgcgtgcgcacggcgctcggtgtcatctgcggcagcgagccccatggccgggccgtgggtgagctgctgcaa

SEQ ID NO: 271688 - DNA, 730 bp, Unknown
  Bacterial polypeptide expressing nucleotide sequence isolated from the Sargasso Sea
aatggttaaagctaataaatcaaaaaataatgttaaaaaccttaaaacagtctcaataaataatttgagtcacttttatggaaaaaatgagaataaaaaacaagttcttaatgacgttaatttaaatattgataaaggagagttggtccttttgaaaggaccttctggatgtggtaaaacgactcttttgacattaattggtgccttgagaacctgtcaaagtggagatttaactgtattaagtaatcagttaaatggagcatcaaggaaaactcgtcagattcttagaagaagtattggaatgatttttcaaggtcacaatcttctgagatgtttaacagcagaacaaaatgtccagatgggcgccgatttaataaaaggtttaacatatttgcaaagacgtgaaatagcacggaattggttgtcagcagtaggattagaagaacatcataaaaagttgccaaatgacttatctggtgggcagaaacagagagtagcaattgctcgagctttatctgctaacccaaaacttttattagctgatgagcccacttctgctttagatagcgtcacaggaagagaaatagtaacccttttaaggaaactagcaaaagagcaaaattgttctgtacttatggtgacgcatgatccaagaatttctgatatggctgataggatattaaatatggaagatggtaaaatatatagtgctcatagtgagctaatataa

SEQ ID NO: 271689 - DNA, 736 bp, Unknown
  Bacterial polypeptide expressing nucleotide sequence isolated from the Sargasso Sea
tatgatctctatcaagaacatcaacaagtggtatggcgacttccaggtgctgaccgattgcagcaccgaggttaaaaaaggcgaagtgatcgtggtgtgcgggccatccggctcgggcaaatccaccctgatcaagtgcgtcaacgcactggaaccgttccagaagggcgacatcgtggtcgacggcacctccatcgccgacccgaagaccaacctgccaaaactgcgttcgcgcgtaggcatggtgttccagcacttcgagctgtttccgcacctgaccatcaccgaaaacctgaccatcgcgcagatcaaggtattgggccgcagcaaggaagaagccaccaagaagggcctgcaactgctcgaacgcgtgggcttgtcggcacacgcccacaagcacccaggccagctctccggcggccagcaacaacgtgtggcgattgcccgcgccctggccatggacccgatcgtcatgctgttcgacgaaccgacctcggcgctggacccggaaatggtcaacgaagtgctcgacgtgatggtgcaactggcccacgaaggcatgaccatgatgtgcgtgacccacgaaatgggctttgcgcgcaaagtggccgaccgcgtgatcttcatggacgccggcaagatcatcgaagactgcccgaaagaagagttcttcggcgacatcagcgcccgctccgagcgtgcgcagcacttcctcgagaaaatcctgcagcactaa

SEQ ID NO: 271690 - DNA, 714 bp, Unknown
  Bacterial polypeptide expressing nucleotide sequence isolated from the Sargasso Sea
aagtaaacaaatggtatgacgattttcatgttttaaaagatattaatttaatcgttaataaagggcaaaaaatcgttatctgtggccctagtggctctggtaaatcaacaatgattagatgtataaatcgtctggaagctcatcaaaaagggacaattgttgttcacggaacagaacttacaaatgatcttaaaaacattgatttaattaggaaaaatgttggtatggttttccagcaattcaatctttttccgcacctctctgtattagacaatatttctttagcgccaatttgggtaaaaaaattacctaaaaaagaatctgaaaatatagctatgacatatttagaaaaagttaaaattcctgaacaagcacataaatttcctgggcagttatctggtggtcaacagcaacgtgttgctattgctagatcattagctatgaaccctgacattatgttgtttgatgagcctacctctgctcttgatcccgaaatgattaaggaagttttagatgttatgattcaactagccgaagagggaatgacaatgctagttgtaacacatgagatgggttttgcaaaaaccgtagctgatcaaatgatatttatggacgaaggaagaattgtagagcaggcgactccagatgagttctttaataatcctaaaagtgatcgtaccaaactattcttaagtcaaatacttaatcattaaa

SEQ ID NO: 271691 - DNA, 865 bp, Unknown
  Bacterial polypeptide expressing nucleotide sequence isolated from the Sargasso Sea
aatggaacaagtgatgaaggtgggccggcaaaccatggacgagaggggcgcagcaccgtcgcgcgacggcttcaacccggcagatgcacctgcgtacagcggcgtgcaaccgctggtccggatgcgagggctgtgcaagcaatacagtcccactctgcaggtgttgaaagggctggatttcgacatgcgacacgacgaccggctcgtcgtaattggcccgagcggcggcggcaaaagcacgttgctgcgcgtgttgatgggccttgagacgatcgacggcgggagcgtcgaattcgacggtcagcgctatctgtctttcgatcccaaatcccggcaaacccgcatggatctggcgattcgcaagcggatcggcatggtgttccagcactacacgcttttcccgcatctgaatgtgctgcgcaatctcacattggccccatgcaagacacaaggggagtcgcgcaactcggctgaacagcgcgcgctccaccttctggaacggctgggtctcgcagcgaaggcacgcgcctatccggcccagctctcgggcggccagaagcagcgcgtggcgatcgcgcgcgcgttgatgctcgacccgaagctcatgctgttcgacgaggtcacgtcggcactcgacccggaactggtcgcggaagtcgaactggtgattcaggaactggccgcgaacgcgatgccgatgatcatggtcacgcacgacatgtggttcgcgaagaaggtcgcctcacggattctcttctgcgcggacggcgtcgtcgtcgagtcgggtacgcccgagcagttgttcaggaacccgcagcatgagcggacccgggaatttctgaacaacgtcctgcacattgactag

SEQ ID NO: 271692 - DNA, 814 bp, Unknown
  Bacterial polypeptide expressing nucleotide sequence isolated from the Sargasso Sea
atgagcttatcggctgcgcccgtcgctaaacaacattttgaacgtacccaattaaccgtggataggctcagctacgctatcggcgataaggcggtgttgaacaacattcgcgtgcaatttcaaccgggcagtgtcaccgcacttttagggcctaatggtgcaggcaaatccacactgttaaaagcactgtgccgagagctccccactgcgcaaggcagcatcaagcttggctactgccaactggtggattggccaagggctgaactggcaaaatccctcgccgttctgcctcaacatgccagcttaaccttcccctttaccgtggatgaagtggtggcaatggggctttatcccttaaccttgagtcaaaaagaaggccagcagttagtcacaaaatggcttgccgaagtgggtgtattgcatttagcccgacgcagttaccccacgctttctgggggagaaaaacaaagggtgcaactggcgagggtgttaacgcagttaagccaatcccccttcccgccgattttactgttagatgagccaacctcagcactggatctggcgcagcaacacaaagtattagcgctagcaaaaaatctcgcccacaagcacgcctacactgtgattgtggtattgcacgacctcaatcaggcagcccgttacagcgacagagttatcgtcctcaaacagggggaaatcgtcagtgaaggtacacctaacgatgcattatcgattgatataattcgccaagtatgggattacgaacctgagtttatttctgccccacagcgtggttacccactgattttttaat

SEQ ID NO: 271693 - DNA, 1897 bp, Unknown
  Bacterial polypeptide expressing nucleotide sequence isolated from the Sargasso Sea
ctggcgcgtcgcacgaaacggcggccgaagcgcacgcctgacacccgccgccgcgccgcccgtgcgcggcgcgcccgtccgaccgattcgaggatttccaccgacatgagcgacaccacccacctcggcggcgcgctgccgccgctctctccccccggcgcacgcgacgccggcacgcgtttcaggatcgtgcccgcgcgccaccggtcgcgcacggccggcaccgtgctggccgtcgcgctgatcgcgatcgtcctgcattcgattctcggcaacccgcaatggggctggccggtgttcgccgaatggttcctgtcgccgccggtgctgtcggggctcgcgcgcacgctggtgctgacgctgctcggtgcggtgttcggcttcgtactcggcgcgttcgtcgcgctggcccggctgtcgcgctcgcggctgctgtcggcgagcgcgtggacattcgtgtggctgttccgctcgattccgctgatcgtgctgctgctgatcctgaacaacctcggctacctgtacgagcacgtgcggctcggcgtgccgttcacggacatcgtgtggttcgacacgccgacgaccgatctcatcagcccgttcctcgcggccgtgctcggcctcacgctgaaccacgcggcgttttccgcggaagtgattcgcggcggcattctcgcggtcgaccagggccagctcgaagccgccgccgcgctcgggctgccgcgcggccgccagaccacgcggatcgtgctgccgcaggcgatgcgcgcgatcctgccgaccgcgttcaacgacctgatctcgctcgcgaaaggcacgtcgatggtgtacgtgctcgcgatgccggagctgttctatacggtgcaggtgatctatcgccgcaatctcgaagtgattccgctgctgatggtcgcgaccgtctggtacctgatcatcctgaccgtgctgtcggccatccaggtgcaggtcgagcggcactacgcgcgcggcgcgctgcgcaacccgccgccgtctgtcatcacgttcgcgcttgcgcgtatcggcgcgctgtggcgccgtgtcgcgtcccgtcacgcggcatcggtcgcccagactcacgatgatggcgacgcggcgagcgccgtcgcaccgcgcgccggcggcgaagtggccgtgcatggcgtctcgaagcagttcggcatgcagcgcgtgctcgacaacgtgtcgttcgtcgcgccgcgcggcagcgtgaccgcgatcgtcgggccgtcgggctcgggcaagtcgacgctgctgcgcacgatcaaccatctcgaacgcgtcgacgacggcttcatcgacatcgacggcgaactgatcggctatcgccgcgacggcgacgtgctctacgagctgaaggagcgcgacgtgctgacgcggcgcacggccgtcgggatggtgttccagaacttcaacctgttcccgcacctgaccgtgctcgagaacctggtcgaagcgccggtcgccgtcggcggcatcacgcgcgatgccgccgaacgcatcgcccgcacgctgctcgcgcgcgtcggcctcgcggacaaggccgatgcgtatccgcgccagttgtccggcggccagcagcagcgcgtcgcgatcgcgcgggcgctcgcgctgcgcccgaaggtgctgctgttcgacgagccgacgtcggcgctcgatcccgaactcgtcaacgaggtgctcgacgtgatcaaggagctcgcgcgttcgggcacgacgctcgtgatcgtcacgcacgaaatcggcttcgcgcgcgaagtcgcggacaacgtgctgttcatggagcgcgggcgcatcgtcgaagccgggccgccggccgtcgtgctcgatgcgccgtcgcatccgcgtacgcgtgcgttcctgtcgcgggtgctgtgat

SEQ ID NO: 271694 - DNA, 1069 bp, Unknown
  Bacterial polypeptide expressing nucleotide sequence isolated from the Sargasso Sea
catggataagctcatcgtcgacgatctgcacctcagctacggcgccaatccgatcctcaagggcgtgtcgttcgaactgaaggccggcgaagtcgtgtgcctgctcggtgcgtcgggcagcggcaagaccacgctgctgcgcgcggtggccggactcgaacagccgtccgacggccgcatccagctcgacgaccgcgtgttcttcgacggcgcgaaccgcgtcgacctgcccgtcgagcagcgctcgctcgggctcgtgttccagtcgtacgcgctgtggccgcaccgcaccgtcgccgacaacgtcggttacgggctgaagctgcgccgcgtcgcaccggccgagcagaagcgccgcgtgcagagtgcgctcgaccagctcggcctcggccatctcgcggagcgctttccgcaccagctgtcgggcggccagcagcagcgcgtcgcgattgcgcgcgcgctcgtctacaacccgccggtgatcctgctcgacgagccgctgtcgaacctcgacgcgaagctgcgcgaggaagcgcgggcatggctgcgcgagctgatcgtgtcgctcgggctgtcggccctgtgcgtgacgcacgaccagaccgaggcgatggcgatgtccgaccgcatcctgctgctgcgcaacggccgcatcgaacaggaaggcacgccggccgaactgtacggcgcgccgcgctcgctgtacacggccgaattcatgggcagcaacaaccggatcgatgctcgcgtcgcagccgtacacggcgagcgcgtcacgctcgccggcgacggctgggaactgcaggcgctcgcccgcgacaccttcgcgccgggccaggacgcgcaggccgtgatccgcctcgagcgcgtgcaggtcgccgacggcccgggcgcgaaccggctgcaggccgatctcgtcacgtcgatgtatctcggcgaccgctgggaatacctgttccattgcggcgaaatgcgcctgcgcgcgttcggccatgtgccgcgcacggccggcaagcactggatcgaattcccggccaacgactgctgggcgttcgcgaaagcgggctga

SEQ ID NO: 271695 - DNA, 724 bp, Unknown
  Bacterial polypeptide expressing nucleotide sequence isolated from the Sargasso Sea
atgatcgaattccagaacgtgtcgaagagcttcggccacgtgccggtgctgaagcatatcgacctgaagatcgacgcgggcgaggtggtcgtcgtgatcggcccgtccggctcgggcaagtcgacgatgctgcgctgtatcaacgcgctcgagaaaatcaccggcggcgaactgctcgtcgacggccagagcgtgcgcggcaacgcggcgacgatccgcaacatccggctcgaagccggcatggtgttccagcagttcaacctgtttccgcagatgaccgcgctcgagaacgtgatgttcgggccgatgcaggtgcgcggtgcgtcacgcgccgaagcgcgcgaccaggcgatggcgctgctcgacaaggtcggcctcgaatcgcgcgcgaatcattatccgtcggagctgtcgggcggccagcagcagcgtgtcgcgattgcgcgtgcgctcgcgatccggccgcggctgatgctgttcgacgagccgacgtcggcgctcgatccggaattgcgccacgaagtgctgaaagtgatgcaggatctcgcgaccgaagggatgacgatgatcgtcgtcacgcacgagatcggctttgcgaagcgggtcggcacgcgcctgctcttcatggatcagggcgggattgccgaggacggccatccggtcgagctgatcgaccggccgccgaccccgcgcctgaaggaattcctgaaacacgtgtcctgaa

SEQ ID NO: 271696 - DNA, 1084 bp, Unknown
  Bacterial polypeptide expressing nucleotide sequence isolated from the Sargasso Sea
catgtcgtttctcacgcttacggatctgacgaaaaccttcggcgacctcaccgccgtcgccgacgtcaacctgtcggtcgaacaaggcgaattcgtgtcgctgctggggccgtcgggctgcggcaagaccaccacgctgcagatgatcgccggcttcgtcgacgtcacgcgcgggcgcatcgcgctcgacgggcaggacatcacgcacctgaagccgaaccggcgcgggctcggcatcgtgttccagagctatgcgctgtttccgcacatgagcgtcgcggaaaacgtcggcttcggcctcgacatgcgcggcgtcgacaaggccgagcgcgccgagcgcatccgcgcggcgcttgcgctcgtgcgcctcgacgccctcgcgcaccgctttccgcgcgagctgtcgggcggccagcggcagcgcgtcgcgatcgcgcgcgcagtcgtgatcgaaccgcccgtgttgctgctcgacgaaccgatgtcgaacctcgacgcgaagctgcgcgaggacatgcagttcgagctgcgcgcgatccagcgcaagatcggcacgacgacgatcatggtcacgcacgatcaatcggaagcgctgtcgatcagcgaccgcgtggtcgtgatggaagcaggccgcatcacgcagaccgacacgccgtaccgcgcgtacgaacgcccggagaaccacttcgtgtcgcagttcatcggcaaggcgaacctgctgcccggcacgatcgtcgcgcacgacggcgacgcgatccgcatcgacctcgggcacgacctcaccgagacgggccataccgcgcacctgccgccgcgcgagcgcgacgtgcgcatcggcgacgcggtgtcggtctgcatccgtccggaaaaactgaggctgtgcacccccgacgccggccgcttcgccgcgaccgtcacgagccgcttctttctcggcagccagtggctgtaccgcgtcgacagcgcgctcggcgaagtgctcgtatgctgccagaacgaaggcgcggaaccgctcgcggaaggcgcgccggtcggcatcgactggcacagcgacgcggtgcgcgtgatgcgccgggaggcctga

SEQ ID NO: 271697 - DNA, 814 bp, Unknown
  Bacterial polypeptide expressing nucleotide sequence isolated from the Sargasso Sea
tatgagcttatcggctgcgcccgtcgctaaacaacattttgaacgaactcaactaaccgtggatagactcagctacgctatcggcgataaggcggtgttaaaggacattagtgtgcaatttcaaccgggcagtatcaccgcactgttaggacctaatggcgcgggtaagtccacactgttaaaggcgctgtgccaagagatccccgccgcgcgcggcagcattcggcttgggcactgcccgcttgtcgattggccaagggctgaactggcaaaatcactcgcagtgttaccgcagcacgcgagtttaacctttccctttaaggtgaatgaagtggttgctatggggctttatcccttaaccttgagtcaaaaagagggacagcagttagttacaaaatggctcaccgaggtggagatagtgcacttggcgcagcgtagctaccccaccctttcgggcggtgaaaaacaaagagtgcagctagcgcgggtattaactcaattgagccaatcccccttcccgccgattttactgctcgacgaacccacctcggcactggatttggcgcagcaacataagatattagcgttggcaaaaaatctcgcccacaaacacgcctacactgtgattgtggtactacacgatctcaatcaggccgtccgttacagcgatagagttatcgtcctcaagcagggtgaaatcgtcagtgaaggctcggcaagcaaggccttatcggccgagataattcggcaggtgtgggattatgaacctgagtttattcctgcaccacagggcggttatccattgattttttag

SEQ ID NO: 271698 - DNA, 1051 bp, Unknown
  Bacterial polypeptide expressing nucleotide sequence isolated from the Sargasso Sea
atgaccagtacgctcaatcttcatcaagttcatagcgattatcagggccaacaggtactcaaaggcttagatttaaccctggcacaaggggaaatccttgcgctgctcggcccaagtggctgcggcaaaaccaccttgctgagggcggtggcaggattgcaggcgattagccaaggtgagatccaaatcaatggcaagacggtcagcggcgcagggcaatttgtgccgagtgagcaacggggcatagggatgattttccaagactatgctttgttcccccatttgaccgtcgccgagaatattctctttggtgtggcaaaattaacgccagcgcagcgcaaggcgcggttagatgacatgctcgccctagtaaaacttgaaggcttagccaagcgttatccccatgagttgtcaggtggtcagcagcagcgggtgtcgattgcccgcgcattagcctatgagccgcaattactgttactcgacgagcctttttcgaatatcgatgcacaggtgcgccacagtatgatggcggagatccgcagcattctaaagcagcgtaatgttagtgcggtttttgttacccatagcaaagatgaggcctttgtgtttgccgataccttggccatttttaatcaaggtgtgatagtacaacatggccgagcggaagacttatatgccgcaccaaatagccgctatgtggctgattttctgggaagtggcaactatttacccgccgaggtcgttgatggccaccgtgttgtcactcctattggtgagctgcgaagcctcacgcccttgtcaaagtctaatgcatttaatggccaagtgtttttgcggccacagcaattggcgctcagtgccgatgatgcgggcgtagggacaattaccgagcggcgcttcctcggcgcattttgccattattgggtaaaagtcgaggcggcatcccacgcccattatgttgaagtgcgtagccaaattatgcagttcaatgttggtcagcgagtgggcttaaatactgagccacattccctagtgctatttgagtcttaat

SEQ ID NO: 271699 - DNA, 1198 bp, Unknown
  Bacterial polypeptide expressing nucleotide sequence isolated from the Sargasso Sea
gatgacgcaattgttcgatacgctgggtttcatcgatacgtcggccgtgcgcgccggcaccgctgccgcgacgcatgacgcagcggttgcgtcggccgaatcggctgaatcggccggcggcgccgccgtgtcgctggagcaggtcggcaaggtgttcgcgacgccgcgcggccacgccgccgcgctgcgcgacgtgacgctcgacgtgcggcgcggcgaggtcttcgggatcatcggccgcagcggcgcagggaagtcgacgctgctgcggctcgtgaacggcctcgaacggccgagctcaggccgcgtgcgcgtgcagggcgtcgatgtcggcgcgctcgacgaggacgggctcgtcgcgctgcggcgccgcaccggcatggtgttccagcatttcaacctgctgtccgcgaagacggtgttcgagaacgtcgcgctgccgctgaagatcgccggcgtgccgaaggccgagcgcgtgcgcaaggtcgaggcgctgctcgagctcgtcgggcttgccgcgaagcgcgacgcgtatccggccagcctgtcgggcgggcagaagcagcgcgtcggcattgcccgcgcgctcgtgcacgatcccgaggtgctgctgtgcgacgaggcgacgtcggcgctcgatcccgagacgacccagtcgatcctcgcgctgctcgccgacatcaaccgccgcctcgggctgacgatcgtgctgatcacgcacgagatggaagtgatccgcgctgtgtgcgacacggtcgcggtgatcgagcagggcgaagtcgtcgaaaccggccccgtgtggcgcgtgttcggcgatccgcgccacggcgcgacgcgcgcgctgctcagcacgctcgtgcacgacctgccggccgaactggcggcgcgcgtgcagccgctgcccgagcaggccgcgttgcccgacggcgcgcaggtcgtgctcgacgtccgctatacgggcgagagcggcggcgagccggatgtcggcgcgcttgcggcggcactcggcggctcggtacggttcctgcacggcgggatcgagcgtatccaggggcatgcgcaggggcggctcgtgatcgcggcagcgccgcacgcggacgacgccggccagccggcgtcgcgcggcggtgcggttgccgcgctgctcgaacgcgcgcgccgccacgcgaatcacgcggaggtgctcggctatgtttga

SEQ ID NO: 271700 - DNA, 1105 bp, Unknown
  Bacterial polypeptide expressing nucleotide sequence isolated from the Sargasso Sea
gatgaacccggtggaaaccaccctgacccatcccggcgcattcggcgccgccgaaccgcaggcaacgctgcggtccggcgcgccgggcggcgtgcagatcgagcacctgagcgtgcgctacggcgcacgcacggtgctggaagatctgtcgctgtcgatcggtgccggtgaatttctgaccgtgctcggcaagagcggctgcggcaagaccacgctgctgcgcttcatcgccgggttcgtgaaggccgacggcctgaccggcacgctgaccgtggccggacgcgacctgacctatgcgccgccgcacaagcgcaatctcggtctgctgttccagaattacgcgctgttcccgcacctgacggtgttcgagaacgtcgcattcgggctgcgcgcacgcggcatggcgtcgtcggaagtgacgcgccgcgtcgccgatgcgctgaagctcgtgcagctcggcgatgcgggccatcacctgcccgcgcaactgtcgggcgggatgcagcagcgcgtcgcgctggcgcgcgcgctcgtgatcgagccggacgtgctgctgctcgacgaaccgctgtcggcgctcgacgccaacctgcgcgcgtcggtgcgcagcgaactgaaggcgctgcacgagcgcctgccgaacctgaccgtcgtctgcgtgacgcacgaccgcgacgacgcactcgtgctgtccgatcgcgcgctgctgatgcgcgacggccacattgcgcagctcggtacgccgcagcagctgtacgacgcgccgcaggacggctacgtcgcacgctatctcggcccggcgaacctgctgccgccgcacgtgatcttcccgctcggcgatccgcgccacgaagtgcgcggcaaggtggcctgtgtgcgccccgagcgcctgaccctgatgccgctggccgcgggcgggctgcacggcacggtgtcgtccgtcgaatggcagggcgcggacctgtcgatcgcggtcacgatcgatgcagcccccgacgagcccgtgcgcgtcacgatgcaacgcggccgcggcgcggctcccgagcgcggtgcgcgcgtttccctgcattgcgaggcagacgatgtcgtccttatcgagccctga

SEQ ID NO: 271701 - DNA, 757 bp, Unknown
  Bacterial polypeptide expressing nucleotide sequence isolated from the Sargasso Sea
atgatccggatcgatgcgatacacaagcgctttcagcaacacgccgtgctgaagggcgtcagcctcgacgtgcagcagggtgaggtcgtgtgcctgatcgggccgtccggctcgggcaaatcgaccgtgctgcgctgtatcaacggcttcgagacttacgacgaaggggcgatcacgatcgacggcgtgaaggtcgacgcgcattcgaaacggattcacgagctccggatgcgggtcggcatggtgttccagcgcttcaacctgttctcgcatcgcacggcgctcgagaacgtgatggaagggccggtccacgtgcgccgcacgccggccgcgcaagcgcgcgagcaggcccgcgcgttgctcgacaaggtcgggctcgcgcaccggatgaatgcgtatccgtccgagctgtcgggcgggcagcagcagcgcgtcgcgatcgcacgcgcgctggcgatggagccgcaggcgatcctgttcgacgaaccgacgtcggcgctcgatcccgaactcgtcggcgaagtgctcggcgtgatgcgcggactcgcgcgcgacggcatgaccatggtcgtcgtcacgcacgaaatggcattcgcgcgcgaggtggccgaccgcgtgtgtttcctgcacgacggcaccatctgcgaaagcggatccgcacgcgacgtgctcacgcagccgaaacatccccgcacgcaggaattcctgcgtcgactgctggcgtcggacgacgccgccaccccggatcgaacatgag

SEQ ID NO: 271702 - DNA, 1070 bp, Unknown
  Bacterial polypeptide expressing nucleotide sequence isolated from the Sargasso Sea
tctcagcaaacgctacggcgatttcgtcgcgctcgcgccgaccagtctcgacgtcgccgagggcgaattcctgaccttgctcgggccgagcggctcaggcaagaccaccctgctcagcctgattgccggcctcgcactgccggatgaaggccagattcgcatcaatggggtggacgtgacgtacggcgcgccgtatgaacgcgacatcggcatggtgtttcagaactacgcgctgtttccgcacatgacggtcgcgcagaacattgcgttcccgctgcagatgcgcaagaccgacgccaaggccactcaggacaaggtgatgcaggcgctggaaatggtgcatctgccgcatgtggcgcaacgctatccgcgcgagctatccggcggccagcagcaacggatcgcgctcgcgcgctgcatggtctaccggccgtcgatcattctgatggacgagccgctcggcgcgctcgacaagaaactgcgcgatcacatgcagctcgaaattaaacgcatccatcgcgaactcggtacgacgatcgtctacgtaacgcacgatcaggaagaggccatgaccatgtcggaccgcatctgcctgatgaacgcgggttcgatcgctcaactcggcacgccggccgatctgtatttccggcccaacagcgtgtttgtcgcggactttctcggcgaatcgaatctgctcgacgcggtcgttacgagccgggcgggcgatcaggtgcagatcagcgtgcaaggcgtcgcaaaaggcgaggcgatggcctacgacccggtgatcggcaacggcaagaccgtcaagctgatgctgcgtccgcagaatctgcgcgtgcacgacggggcgaacaccgacccaggcaacggcggcagcctgtcggcgaaactcaccgacatcatggtgaccggcagcatgacgaagctctatctcgagccgcataccgccaacgccgcgccgctcgtcgccgccttcccgaccaaccgtttcggcagccactacgaagtcgggcaaacgctcggcctgtcgtggctcgccgccgacgccgtcgcgatcgcggggtaag

SEQ ID NO: 271703 - DNA, 382 bp, Unknown
  Bacterial polypeptide expressing nucleotide sequence isolated from the Sargasso Sea
aaaaattgccacctctttattagaaagagttggcattccagaacaggctgaaaaatttcctaatcagctttctggcggtcaacaacagagagttgctattgcaagggctctcgcaatgaagccgaaaataatgttatttgatgagcctacatctgcattggatcctgaaatgataaaagaagttcttgaagttatgacagagctagctgaatcaggaatgacaatgatcgtagttacacatgaaatgggttttgctagaaatgttgcagacaggtttttattttttgatgaaggcaaaattattgaagagggaacacctgaccatttttttaaaaaacccaaagaagaaagaacaaagttatttttaagtcaaatactttaa

SEQ ID NO: 271704 - DNA, 569 bp, Unknown
  Bacterial polypeptide expressing nucleotide sequence isolated from the Sargasso Sea
acatcaagaaggcacaataattgtcgatggtaatgaattgaatgaaaatacaaagaatattgaggaaattagagctgaagttggaatggtttttcaacaatttaacttatttccacatttgtcaatcttagataattgtacattggcacccatttgggtaaagaaaatgccaaaaaagaaggcagaagaattagctttaaaacaattagagcaagtccagatagctgatcaagcttacaaatttccaggtcaattatctggtggtcaacaacaaagatctgctattgcaagagcattatgtatggagccaaaaataatgttatttgatgaacctacttctgcattagatccggaaatgattaaagaggttttagatgcaatggtaaaccttgcaaaaggtggaatgacaatgattgtagttacacatgagatgggatttgctaaagaagttgcagatgaagtaatttttatggatgaaggtatgattgttgaaaaaaataccactaaagaattttttgcaaacccaaaaagtgatcgtacaaagctatttttaagtcaaattttataat

SEQ ID NO: 271705 - DNA, 771 bp, Unknown
  Bacterial polypeptide expressing nucleotide sequence isolated from the Sargasso Sea
aaatagaggaacaattaaaaaaggtatctaaatttttgcaagttgatgccctattagatagaaaaccatcacaattatctggggggcaaagacaacgtgtagcgatcggaagagcattagttagagaaccaagaatatttttattcgatgaaccgttatcaaacttagatgcaaaattaagagttgagatgagaagggagataaaaaaacttcatcaacagcttaaaaccaccgtagtttatgtaacccatgatcaaacagaggcaatgagtcttggtactaaaattgcaattatgaatcatggtgtgattcaacaaaataactcaccagaactaatttataataaaccaagcaatacatttgtagcagatttcattggatctccttcaatgaatctaattaaaggaaaactaaatcaaaaatcaaacaaaatcttatttactgcagatgaagcaaattttgctattccaattattagctatgattttataaaagcatcacaacttgaagataaagaggtattttttggaataagaccagagcatatttattttaaaaaatctaacgaggatgatttcgaggtaaatttaacagctgatttaagtgaatatattggtcacgaacaaataatgacttttaattttgcaaatcaagaactcttagcaaaatttccatctacttttaaaattgaattaaacaaagagacaaagttatattttgacttaactcaaatttcattatttgatgctaattcgaaagaaagaatctaat

SEQ ID NO: 271706 - DNA, 934 bp, Unknown
  Bacterial polypeptide expressing nucleotide sequence isolated from the Sargasso Sea
tggaagtctacacttttaagaatgatctcaggtttagagtcagttgatataggagaaatttatttagataacaaactaataaataatctaattccttctaaaagagaaattgcaatggtatttcaatcatatgctttatatccacacatgaatgtttttgaaaatatggctttcggcttaaaaatggaaaaaattccaaaaagtgaaattaatcaaaaagttaataatgctgcaactacacttcaaattgaagatttacttgaaaggaaacctaaacagctttcaggtggacaaagacaaagggttgcaattggaagagcaataacaaggagcccaaaagttttcttatttgatgaaccattatcaaaccttgatgctgctttaagatctgaaatgagagttgaaatatccaagctacataaaaaaatgaattcaaatataatttatgtaactcatgatcaagttgaagcaatgacattggctgacagaattgtagttcttaataaaggaaatattgaacaatatggaacaccaagtgagatttattcagatcctaataatatttttgttgcagaatttatagggtcaccaaagatgaacattgttagaatagaaaaagaacaaattatcaattcaaacacattaagattattcaagaatgaaattacttttgaaaattttaaatttgaagatcaaatttaccttggtatcagaccagaagatataagcttagaaaacaatcatgaaatccaagtagaagtcaaaattgatctcgttgaaaatttaggttttgaaaaaattatttattctaaagtttcagaaaaccaaattataattaaatcgtcagaaaatattaaaaatcattcattaaagatatctttttcaaaagacaaggtattattttttgacaaagataaaaataggattagataat

SEQ ID NO: 271707 - DNA, 951 bp, Unknown
  Bacterial polypeptide expressing nucleotide sequence isolated from the Sargasso Sea
ggtcagggaaaactacatgtttgttaatgttggcaggatttgaaacagctactcatggagaaatccttttagatgataaaccaatcaataatattcctcctcacaagagaggaattggtatggtttttcaaaactatgctttatttcctcatatgactgttggagaaaacctatcattcccactagaggttagaaaaattaataaaaatgacagagaggaaaaagttatacaagctcttgaaatggtgcaaatgactgattttataaacaggaaacctgcacaactgtctggaggtcagcaacagagaatcgctttagcaagaagccttgtttttaatcctgatcttgtattgatggatgaacctttaggtgctctagacaaacaattaagagaacatatgcaatatgaaataaaaaatctacacaagcaactaggtgttactgttgtttacgttactcacgatcagtcagaggcgcttacaatgtcggatagagtagctgtttttaatgatggacaaatacaacagctatcaacacctgatggactttacgagagacctgaaaatgcctttgttgctcaatttattggtgaaaataataaattaacaggaaaagttaagagtataaatgatagtgaagtgactgttaaaacgtctcaaaatatggaagttaaagcgttaaaagtaaattgtggtgaagtaggaactaatacaactttatctataaggcctgaaagaatacaccttaacagtaaatataaaaacaaagcagatgctactataaaacaactaatataccatggtgatcatattaggtgtctcataaaaattgataaagacaatgattttattgtaaaaataccaaattcaaacattaagaacactcttaaaataggagaaaaaatacccataagttgggatgcaatggattgtcatgcattagatgcatgat

SEQ ID NO: 271708 - DNA, 685 bp, Unknown
  Bacterial polypeptide expressing nucleotide sequence isolated from the Sargasso Sea
tttcaggttttaaaagatatcaatttatcagttgaaaaaaataaaaaaatagtagtttgtggtccttcaggatcaggtaaatctactctcataagatgtataaatagactagaagagcatcaaaagggatcaattgtcgtagatggcactgaactttccgaagatactaagaatatcgaacaagttagagcagaagttggaatggtttttcaacaatttaacctatttcctcatctatcaatattagataactgcacacttgcacctatttgggtaaaaaaaatgccaaagaaagatgctgaagaattagcaatgaaccaattgaaacaagtgcaaattcaagatcaagctagcaaattcccaggtcaattatctggtggtcaacaacaacgttgtgctattgcaagagcattatgcatgcaaccaaagatcatgctttttgatgaaccaacatcagcattagatcctgaaatgataaaagaagttttagatgcaatggttaacttagctaaacaaggaatgacaatgattgtggttactcatgagatgggttttgcaaaagaagtagctgatgaagtaatttttatggatgaaggaatgattgttgaaaaagctaatacaaaagatttttttgccaacccaaaaagcgacagaacaaagctatttctaagccaaattttataat

SEQ ID NO: 271709 - DNA, 976 bp, Unknown
  Bacterial polypeptide expressing nucleotide sequence isolated from the Sargasso Sea
tgcctgttttttaggtccttcaggttgtggtaaaacaacactttttcgttgtatcgcaggattagaaactcaatcttcgggatccatttctcaaaaagaaatagagatttcatctcttccaccttcagcaagagatttcggcattgtgtttcaatcgtatgcacttttcccgaatttaacggtcttctctaacatttcctatggtttgattaacaataaatgggggaaggatgaaattaagtccagagtggagcatttactggatctggttggtttgaaatcacatgcaggaaaatatccgagtcaattatctggaggagaacaacaacgtgttgctttagcaagagctttggcaacgtcaccaggattgttattgcttgatgaacccctctcagccctggatgcaaaagtcagattgtatttgaggaaacagattaaagatctgcaccgaaaattaggaatcaccaccattatggtgacccatgatcaggaagaagctcaatcgatggcggatagaatttttgtcatgaaggatggtgaaattattcaatccggtaccccgagagaaatctatgaaaaagctaattctccttttattgcagattttatcggaataactaattttatcgatgccattgttgtaaaccaggataaggttttctgtaaggatattcagttggaatgtaatacaactggcatagcagaagaacgttcagtaaaaattgcgatcagaccagaatctatcattataactcaaaaaaaatccaatgaacaaaactgtatcaagggaaccatcaaagagaacgaatttttaggatcatttcaacgtctttacgtagaatctccctccttgtctgaagaacttctcatgatcgatatcgctaacacttctcaaaccaattttgatttaaaccagggttcgatgatctactttatctttcccccggatcaaattaaagtttacttaaattcctga

SEQ ID NO: 271710 - DNA, 957 bp, Unknown
  Bacterial polypeptide expressing nucleotide sequence isolated from the Sargasso Sea
aatctacaatccttagaatgattgcaggtttagaagatattaattcaggtacaattgctattgatggcactgtagtaaatgatctagcccctaaacaaagaaacatcgcgatggtttttcagtcatatgctttatatcctcatatgactgtatttaacaatatggcttttggcttaaaattagagaaacgttcaaaagatgagatagaagaacgtgttcatgaagctgctaaaatattacaaatagaagattacctccagagaaaacctaagcagttatctggtggtcaaagacaacgagtagcaattggaagagctataacaagaaaaccaaaagtttttttatttgatgagcctctttctaaccttgatgctgctctaagagtacaaatgagagttgaattagcaaaacttcacgatcaacttgatgcaactatgatttatgtaacccatgaccaaactgaagctatgacaatggcagacgaaattgttgtattagatcaaggtataatttcacaatctggtggtccgatggagctttacaataacccaagtaatttatttgtaggtggctttataggctctccaaaaatgaattttatcaatacaaaaattcttagcagtaatactaaaagcacaaaagtcgatttatttggatcttcagatattgttatacctaaaacatcgaaaacttctagctcaggtgaccaagttacacttggtgtcagacctgaacatttattggtaaataaaaaatcatcttcctcttgggagagtaaagtttttgttgttgaaaaacttgggtcaggaacttttctatatttagaaaaagagggtgaacccctagttgttgaaactgacggtgattcaaagataaaagtaggagatactgtcaaagttggttttgatgctgataaatgccatttgtttgatagttcaaataattcttttacttgat

SEQ ID NO: 271711 - DNA, 716 bp, Unknown
  Bacterial polypeptide expressing nucleotide sequence isolated from the Sargasso Sea
aacaaaagatgtgactaaattctttggttcttttcaggctttgaaggggataactgcagatatctatgaaggtgaagtagttgtagttctaggaccatctggatcaggtaaatctacttatatcagaacattaaatggtcttgaagaacatgattcaggtctaattaaagtcaatggaactgagttaaataacaatgtaaaaaatattgagaaaataagatccgaagtcggaatggtctttcaacagtttaatctttttcctcatctatcagtcttaagaaatattacattagctccacaaaaggtaaagaagttaccaaaatctgaagttgatgatttggctatgagcttgttggaaagagtaggaatacctgaacaagcacaaaaattcccagcacaactatcgggtggtcaacaacaaagagtagctatagctagagctcttgctatgcaacccaaaataatgctctttgatgaaccaacatcagctcttgacccagaaatgataaaggaagttttagatgtaatgattgaattagctcaatcaggtatgacgatgatttgtgtgactcatgaaatgggatttgctaaagaggttgctgacagatttcttttttttgatgaagggcttattgtagagtcaggtaccccagaacatttttttgaaaatcctcaagaagatagaacaaaattattcttaagccaaatactataaa

SEQ ID NO: 271712 - DNA, 1051 bp, Unknown
  Bacterial polypeptide expressing nucleotide sequence isolated from the Sargasso Sea
aaaagctgaagtaaagttcgaaaatataacaaaaaaatttaacgaaactacatcagttgataatgttagttgtaaatttgaagctggaactttaacaacgttgcttggtccatctggatgtggaaaaacaacttcactaagaattattgctggtcttgaaagagctacaagtggaaaaattttagttgatgatgaggacgtaactttactacctgcaacagatagagatgtatctatggtatttcaatcttatgctttgtttccacatatgagtgtactagaaaatgtttcgtacggtttaaaaatgatcaacgtaaataaagaagaatacgtacaaaaatccctagaaacattaaaactagttaatcttgaaggatatgaaaatagaatgccttcagaattatctggtggacaacaacaaagggttgcggttgctagagctattgtattggaaccaaaagtgcttctgtttgatgaacctctttcaaacttggatgcaaaattaagaagacaggtgagagaagatattagagaaatccaacaaaaattaggagtaacaactatttacgtaacacacgatcaagaagaggcattagcaatctcagacaaagtaattgtaatgaataatgcagtaattgctcaagaaggcagtccaaaagatctttataattttcctagaaacaaatttgttgcaaactttattggtgatgcaaatgttgtaaaagctgaagttataaataaaaattcaaattcatatgatatcaaaatagctgaaatgaatatcaaaattcaaagtgataacgaattaaatggagatatttctgttgccttaagaccagaaaaaatatcaattgatagaaataaaggtgagaactgtattcaagctactgtaaataatgcatcatttgtaggtagcagttatcaatatattttaaattcaaatgttgggaaattgtatgttgtatcaggtgatacaaatgacatttttaaagttggagaagaagttttcttgagtataaatgagcaagaagtaaaaattcttaacgactaa

SEQ ID NO: 271713 - DNA, 954 bp, Unknown
  Bacterial polypeptide expressing nucleotide sequence isolated from the Sargasso Sea
tagttggtccatcaggatgtggaaagtcaacacttttaagaatgatctcaggtttagagtcgattgataaaggagaaatttatttagataataaacttataaataatttaattccatctaaacgtaaaattgcaatggtttttcaatcctatgctttgtatccacacatgaatgtttttgaaaatatggcttttggcttaaaaatggaaaaaattccaaaaagtgaaattaatcaaaaagttaataatgctgcagctacacttcaaattgaggatttgcttgaaaggaagcctaaacagctttcaggtggacaaagacaaagagttgctattggtagagcaatcacaaggagtccaaaggttttcttatttgatgaaccattatcaaatcttgatgcagctttaagatctgaaatgagagttgaaatatataagctacataaaaaaatgaattcaaatataatatatgtaactcacgatcaagttgaagcaatgacattagctgatagaattgtagttcttaataagggaaatatcgaacaatatggaacacctaatgagatttattcagatcctaataatatttttgttgcagaatttattggatcgccaaaaatgaatataattaagattactaaagaacacattactaattcaaatactttgcacttattcaataataaaataacttttaaaaattttgaatttaatgatgagatttatcttggtattagacctgaagatataagtataaaaaaagatcgtgaaattcaagtagacgttaaaatcgatcatgttgaaaatctaggatttgaaaaaatcatttattctaaagttttagaaaatcaaattataattaaatcgtcagaaaatattaataataatgcactaaaagtatctttttcaaaagataaggtattattttttgataaggataaaaataggattagataat

SEQ ID NO: 271714 - DNA, 1110 bp, Unknown
  Bacterial polypeptide expressing nucleotide sequence isolated from the Sargasso Sea
gcccttgaattattaaaagaagtacaaattcctcagccagaagaaagattaaatcaatatccccatcagttatcagggggtcaaagacaaagagttatgattgcaatggctattgcaaacagaccagacctattaatagctgatgaacccacaactgctttagatgtaacaatacaatcacaaatattaaaattgctaaaggatctacaaaaaaaatatggaatggcaattatgcttattacacatgatttaactgttgtaagaaaaactagtgatagaatatgtgtaatgcgatatggaaaaatagttgagagaggtattacagaagatgtatttaataatcctcaacatgaatatacaaaacatttaattaattctgaacctagtggtgaacccgatccttatgattcaagcaataaagattatataatacaaggacagcaatgtactgttaaatttacattgaaaaaaggaaatttttttaatcaaaagaaaacagaattaattgcagtaaataatgttgatatcaaagcacgttatggtgaaaccataggcattgttggagaaagtggatcaggtaaaagcacactcggaatgtcacttataaaactacaagacataaattctggaaaaatattttttaaagatgaagaaatacaagattacaatactaagcaattaaaagatttaagagaacatatgcagattgtttttcaagatcctttttcctctttaaatcctagacacacaataaaacaaataataggcgagggattagaaataaatagaaaagatttatcaaaagaagaaaaagacgatttaataaaaaaaacactaaacgaagtaaatcttgatgaagctgtccttcatcgtttccctcatgaattttcaggtggccaaaggcaaagaattgcgattgctagagctataattttaaatccagaatttattttacttgatgaaccaacttctgcattggatttatctattcaggcacaaattattgatttgttgagatctttaagaagaaatcacaatttgtcatatattttcattagccataatttgaaagtaattcgatcgctgtgtcattatactttggttatgaaa

SEQ ID NO: 271715 - DNA, 871 bp, Unknown
  Bacterial polypeptide expressing nucleotide sequence isolated from the Sargasso Sea
cctggcggccgccgcgaagcgcggcatcctcatcaagggcggcgtctatctggaagagggacgcaagctgaaatggttggcgctcgacaagaccggcacgatcacgcacggcaagccagcgcagacggacgtcgtggcctggaacggtgcggacgcgtccgccgcccagatcctggcagctagcctggctgcccgctccgaccatcccgtctccctggccgtggcccgcgcggcgcaggaccaaggcctagccctgcgcgacgtcaccgattttgcggccttgcccggacgcggcgtccggggccatgtcaacggtgcgctctatcacctgggcaatcatcgtctggtcgaggaactgggcgtgtgttcgccggcattggaagcacagcttgccgtgctggaaacccagggcaaaacggtcgtgatgctgatcggccaggacggcgtacgcgcgttgttcggtgtggcggacaccatcaaggacagcagtcgccaagcgatcaaggaattgcacgcactgggcatcaagactttgatgctgagcggcgacaatccgcacaccgcagaggcgattgcgcagcaggtcggtatcgacgaggctcgcggtaatctgctgccggaagacaagcagcgcgaaatcgagcgccgatccgcacaaggaaccatcggcatggtcggcgatggcatcaacgatgcgccggcgctggcacgggccgatattggattcgcaatgggcgcggccgggacggacacggcgatcgaaacggccgacgttgcgctgatggacgacgatctgcgcaagctcccggcgtttgtacgactatcccggtccacggccggggtgctgaagcagaacattgcgctggcgctc

SEQ ID NO: 271716 - DNA, 894 bp, Unknown
  Bacterial polypeptide expressing nucleotide sequence isolated from the Sargasso Sea
ccggagtgcatcttcccgtcgcggaaacgaccgcgcacccgtgtcgtccccctcgccaaggtcccaaccaggagactttggatcgtttttctgatcctctgcaccggcctcgttggtctggtcggtcggatggcttggttgcaattggtccagaccgatgcgttggagtccagagcgcgccgtctccagacgcagaccagtgcaacgttggggcaacgccgtccgatcgtcgatcgcaccggtcgtttggtggcaatggatgaggtccgctttcgcctatgggcccatccgcgttatttcaacctgccaggtgatgcccctgatctggtccggcctccagaggatgtggttgagctgctggcgacacctttggctcaaccggcaccgcagttgctcgaagagctggggcaacgacgctccggagtcaagctggcggagggacttgatccggagaccgctgaacggatccgctctctggggattagtggtctggatctggaggcctatccccagcgcgtttatccccagggggatctgttcgccaacgtcgtcgggtttctcaacgacgagcgggttcctcaggctggccttgagcagagcaggaacggtgaactgctgaggcatgaacagtcccgacgtctccggcgcggagcggacggaacaccacttcctgatgatctggctccaggggcgttctacggggatgacctgcgcctgcagctcaccctcgatgcccgcctgcaggagctcgccgtcaaagccctggcggcccaggtgggcaattggaaggccaagaagggagccgccatcgtcatggacgccaccaatggcgaactgctggtgctggcgtcaacgccgacctatgaccccaatcgctactggcgcttttcaccg

SEQ ID NO: 271717 - DNA, 253 bp, Unknown
  Bacterial polypeptide expressing nucleotide sequence isolated from the Sargasso Sea
cgatcaccctgcggctggacaataccgcgccgaccctgcccgcgacgctgccaaactggccgaactgcgcccgcaagagcagcgctactggcgcctggtggccgagcgcaagggtgcggtggatgcgcgcatgcaagagctgcgctggctgctggaggaactgcgtgtgagcttcttcgcgcaagagctgcgcacgccgcagccggtgagcgtgaagcggctggacaagctgtgggcgcagattcaaagttga

SEQ ID NO: 271718 - DNA, 910 bp, Unknown
  Bacterial polypeptide expressing nucleotide sequence isolated from the Sargasso Sea
tctaacgtcagatacgaagggtagtcgttcagtcgctgtagggtattcggctttgacggtacaaaacttcacgaccgcaacaaatagttataacactggcgtgggatatgaaggtggcactaatatcacaacagggattcacaataccctcgcaggtggtcttgctggacgcgcacttactgatgctgattacaatacagcagtagggatgcaagcattaacttcagatactttaggaagtcgttcaactgctattggtatgggagcgttgtacgcacaaaactttacgactgcaacagatgcctacaatactgctttggggttttatgcgggtgtttcactaaccacaggaaataggaacaccctcgcaggtgcgaattctggggatgctttgaccaccggatattataatgccgttttagggtacggtgctttaggctcagatactaaaggagctataagtacagcggttggctacagtgctctcgctgctcaaaatttcacaacagcagtactaagctataacactgctgtgggttatcaagcggggttctccctaaccacaggacaatctaacgtatttgtaggcgcgaacgctggtgatgctttaacagatgcagatggtaacgtagccgttggatatgctgctataggtggtgataccttgggagcgcgagcagtcgctgtaggatatggaactttagcaagtcaaaactttacaaccgctacaagtaattacaacacagcggtgggttatgctgctgggaatcaaataacaaccggaatttacaacacacttgttggagggcttgcggggaatcaaataactactggtcagaataacgtccttatgggcgtggctacgggcgatgctcttcaaggtggaaaccaaaatacggcaataggcaga

SEQ ID NO: 271719 - DNA, 777 bp, Unknown
  Bacterial polypeptide expressing nucleotide sequence isolated from the Sargasso Sea
catgacacgtaacaaggtacattatcgtttatgcaaatctggtgtcagggaaaatattgatcttcggcagattagacaagtaggaagaaccccggaatataacctcatgcttgtaagaaacatggaacgataccttgaaatgtttccttcaagcgaagagatatcaatagtttacgctacctatggcttgccttggcctggaagaaatccagaaggtcccttgggcgctccacatccatggatcaaggaggtctatcatgagaatgcatttaacaactatctcagttttaagcgctatgccgagtcttacttctcaaagaaaaataatggtaacttttcattgaactttaaccgaaatgatggctcgggtagtaatgatagtcgtacgaggagtctatacggttactcacgttttccgagttctatttttggtcatcctgaagatgaattacgatttcagacaatccgtgaccaactgaaacatgctgtcagtaatggaagaaagaatatagtcatagtgccttcacattggtactacaatggccaagatacaggtcttaaaattagagaactaaatgggatcccgctcaatacaattgaagaaatggaaagtggtatatttgaaatctcatggtgtgaaagatacgaaacagatggttctcttatgcagattctggataaaggcatcgattgccctgacggttattcaaggatcacattaatggaagcgtttgatgaggttaaggagcaattcaatcttggatatgcacaaaggat

SEQ ID NO: 271720 - DNA, 1060 bp, Unknown
  Bacterial polypeptide expressing nucleotide sequence isolated from the Sargasso Sea
atgactagagacccatttataaaaaaaattgatagaggtgagggtaaagagctaattttatttagtaaaaatgacttaaattataagttttttaagggtttaccccctattttagataatcaaacccatcttcggtttcacccaactcgatctgagtgggtgggttattcaacaactagacaaaatagaacctttcttcctaactcacttgattgtcctctatgtcctatgacaaataataaaaatcccacagatattccagttgatcaatatgaagttgctatttttactaatagattcagttctcttcaattagagagatctgaatttccatccttagaaataaatacagatagagcaactggaaattgtgatgtaatctcttatagttcaaatcacaatgatgaattttcaaaattgcctttggagagagttgaattaatcattcaagcattatcttttcggactaaagaattaattaataactctaaaattgaatatattttaccgtttgaaaataaaggaaaagaaattggtgtaacattagaacatccacatggacaaatttatagttttggacatattccagaaataataaaaaaacaatctattgctcaaaaaattaatccactaaataaatatttatttgacatacccgaagaattaattttaaaaaaaaacaatactgcaatatcttttgttccaagatgggcaagatacccttttgagatctgggttgttccatatcgaaaaatatctcatttatttgaactttcagataaggagcaacaggatcttgcagaactaattcttgaagcctctaagaaattagatgcaatatttaattctcctatgccctatacgcttgcatggcagctatcaccaaaaggttatgagaaattccatcatcttcacatttgttttcaaccaattcgcagatcaaaaacaaaacttaaatatttagcaggtgttgaacagattgccggattttttctcgtagatcttcctccagagcgctcagctcgtattttgcggggtgatgaaaagccagatgaatagt

SEQ ID NO: 271721 - DNA, 583 bp, Unknown
  Bacterial polypeptide expressing nucleotide sequence isolated from the Sargasso Sea
catgaaaacgttgattcgtccgctcgtcgtgatctttgtcgtgctgaccgcggtgacggggctcgcttacccggccgtgatgaccgtgatcggccaggccgtgttcccgtctcaggcgaacggcagcctgatcgagaaggacggcaaggcggtcggctccgcgctgatcggccagcagttcgacgcgccgaagtatttctggggccggctgtcggccacgacgccgatgccgtacaacgcgaccggctccggcggctcgaacctgggcccgctgaacccgtcgcttgccgaccaggtgaaggggcgcatcgccgcgctgcgcgacgcgggcaccgacatgtcgaagccggtgccggtcgacctcgtgacggcgtcggcgagcggcctcgatccggaaatcacgccggccgccgccgcgtaccaggtcgagcgcgtcgcgaaggcgcgcaacctggcgcccgacgcggtcgcgcagctcgtcgccgcgaacacgaagggccgccagttcggcgtgctcggcgaaccgcgcgtgaacgtgctgcagctgaacctcgcactcgacgcggcgcaggccgcgcactga

SEQ ID NO: 271722 - DNA, 835 bp, Unknown
  Bacterial polypeptide expressing nucleotide sequence isolated from the Sargasso Sea
atgaaccagcgcgacgtcgagtcgattctcgacatcgtgcgtgagcacgcgcccagcttcaacgccgtgaacgtctcgacggcgctccatcgcatcgcaaagctgtccggtgcggcgttcccgaggcggcggccacttgccttgggaaacgccgattctcgattctcaacgcttttggagatggttctcccgcacgtctgcacttttgactcgcagggtttggcaaacacggcgtggtcgtttgccactttgaagttggagcaggaggagttgtttggcgcgatcggcggcagggcgttggtgaagctcgaggagttcaacccgcaggatttggcaaacacggcgtggtcgttttgccactttgaagttggagcaggaggagttgttgagggcgatcggcgggagggcgttggtgaagctcgaggagttcaacccgcagggtttggcaaacacggcgtggtcgtttgccactttgaagttggagcaggaggagttctttggcgcgatcggcggcagggcgttggtgaagctcgaggagttcaacccgcagggtttggcaaacacggcgtggtcgtttgcctttttgaagttggagcaggaggagttgttgagggcgatcggcggcagggcgttggtgaagctcgaggagttcaacccgcaggatttggcaaacatggcgtggtcgtttgctactttgaagttggagcaggaggagttgttgagggcgatcgccggcagggcgttggtgaagctcgaggagttcaacccgcagggagcgacaaatctgtgctgggcgctcgcagaggcctgtgtgccaaaaagagtccgggttgac

SEQ ID NO: 271723 - DNA, 2620 bp, Unknown
  Bacterial polypeptide expressing nucleotide sequence isolated from the Sargasso Sea
catgaccgacgcccagcgtacccacgacccacgacaccgtcatgccggcggcgccgctccgtgctgcgccgacgcgcacgatacggatacggccaccgtcgccgaggcggcgccgacggccggcgagcacgcgcatggcaaggccgccgcagcgcgcggcgcgcagtcgcatgcccacagccacgaccacgaccacgagcatgatcatgatcatgatcatgatcacgcgcatgcggttcgtgaagagggccatgcccacggcgccggttgcaaccacggcagcggcaaggaacacgaccacgaccaaggtcatggccctgcgcacgagcacggcgacgggcatgtccatggcgccgcctgtgcacacggcagcgccgcgcacgaccacgaccacgaccacgaccacgcggccggcgattgctgcgcgcctgccgcgctgacgctcgcgccgctgccggtcgcgcaggcgaccgcgtcgggccacgtgcgctccgcattccggatcatgcagatggactgcccgaccgaggaaacgctgatccgcaagaagctcggcgggatgagcgaagtgtcggcgctcgaattcaacctgatgcagcggatgctgaccgtcgagcacgtgccggatgcccagcccgcgatcgaaagcgcgatccgctcgctcgggatgacgcccgaggcggcaacggcaggcgcaccggccgcccgcgccgccgacgcgcccgcgaagccgtggtggccgctggcgctggccggcgtcgctgcgatcgcgtccgagggcgcgacctgggcggccctgcccgtgtggctcgcggcggcgctcgcgctcgcggcggtgctcgcgtgcgggctcaccacgtacaagaagggctggattgcgatccgcaacggcaacctgaacatcaacgcgctgatgagcatcgcggtgacgggcgcgatggcgatcggccagtggccggaagcagcgatggtgatggtgctgttcacgatcgccgagctgatcgaagcgaagtcgctcgaccgcgcccgcaatgcgatccagggcctgatgcagctcgcgccggacaccgcgaccgtgcaggacgccgacggggcgtggcgcacgatcgaggccgcacaggtggcgctcggtgcagtcgtgcgcgtgaagccgggcgagcggatcgggctggacggcgaagtcgtcgcgggccgctcgacggtgaaccaggcgccgatcaccggcgagagcctgcccgtcgaaaagacgaccggcgacgccgtgtacgcgggcacgatcaacgaatcgggttcgttcgactatcgcgtgacggccgtcgcggcgaactcgacgctcgcgcggatcattcacgcggtcgaggaagcccaaggtgcgaaggcgccgacgcagcgcttcgtcgaccagttcgcacgcgtctatacgccgatcgtgttcgcggtcgcgctgctggtcgcggtggtgccgccgatcgtcatgggcggggcatggcacgactggatctaccgcgcgctggtgctgctggtgatcgcgtgcccgtgcgcactggtgatctcgacgccggtgacgatcgtgtcgggcctcgcggccgcggcgcgacgcgggattctcgtgaagggcggcgtgtacctggaagaagggcgcaagctcgcgtggctcgcgctcgacaagaccggcacgatcacgcacggcaagccggtgcagaccgacttcgacctgcatgcgaccgacgccgatgcggcacgtgtgcggcacctcggcgcgagcctggcggcgcgctccgatcatccggtgtcgcaggcgatcgcaactgcagcgcgcgacaccggcacgacggcattcgccgatgtgcaggacttcgaagcgatcgtcgggcgcggcgtgcagggcacgatcgacggcacgcgctactggctcggcaaccaccggctcgtcgaggagctcgagcgctgctcgccggcgctcgaagcgaagctcgatgcgctcgagcggcagggcaagagcgtcgtggtgctggtcgacgaagcgcgcgtgctcggcatcttcgcggtggccgacacgatcaaggacacgagccgtgaagcgatcgccgatctgcatgcgctcggcatccgcaccgcgatgctgaccggcgacaacccgcataccgcgcaggcgatcgcgcagcaggccggcatcgacgatgcgcgcggcaaccagttgccggaagacaagctcgcggcggtcgaggaactgtcggccggcggcacgggcgcggtcgggatggtcggcgacgggatcaacgacgcaccggcgctcgcgcgcgccgacatcggcttcgcgatgggtgcgatgggcaccgacaccgcaatcgagacggccgacgtcgcgctgatggacgacgacctgcgcaagattcccgcgttcgtgcggctgtcgcgtgcgacgcatcgcgtactggtgcagaacatcggcttcgcgctcggcgtgaagatcgtgttcctcggccttacggtcgcggggctcggcacgatgtggatggcggtcttcgccgacgcgggcgcaagcctgatcgtcgtggccaacggtttgcggctgctgtcgtcctcgggggcgttcggcagcgcgcaggccaagcgttga

SEQ ID NO: 271724 - DNA, 580 bp, Unknown
  Bacterial polypeptide expressing nucleotide sequence isolated from the Sargasso Sea
catgaaaaatctgttccgtccgctgatcgtgattttcgcggtgctgaccgccgtcaccggactcgcttatcccgcggtaatgaccgccgtcggtcaggcagctttcaacaaccaggccaacggcagcctgctcgagaaggacggcaaggtggtcggctcgaagctgatcggccagcagttcgatgcgccgcagtacttctggggccgtctgtcggccaccagcccgatgccgtacaaccctcagggctcgagcggttccaatctcggaccgaccaacccggcgctgctcgacgaggtcaaaggccgcatcgacgcgttgaaggcggccggcacggatatgtcgaagccggtgccggtcgatctggtgacgtcctcgggcagcggtctcgatcctgagatcagcccggcggccgccgcgtatcagatcgaacgcgtcgccaaagcgcgtaagctcgccgtgaacgatgtgcaggcgctggtcgatcgttatacgactggccgccagttcggcgttcttggtgagccgcgcgtgaacgtgctgcaactgaatctggcgctggacgagatgaagcagggttga

SEQ ID NO: 271725 - DNA, 1444 bp, Unknown
  Bacterial polypeptide expressing nucleotide sequence isolated from the Sargasso Sea
gagcccctcagggattgaaactgaatgggtattaaattataatggtattagttttgttactaatacaatccctactactttaacaaatttatctccaactactgactacagttgcaatgtttctgcaatttgtagccccattgataccagtggcaactctatttccatttcttttactactggatgtgcttttacaatagctccttttactgaaacatttgatagtgtgccatctggagatgctatccctatttgttggagtcaagaacaaattaatgatgattttgattgggaattagaagcaggtgggacaccttctcaaaatacaggtccagatgatgatattaccgggggtggattatatatgtacactgaagcttctgctccaagacaaaatggtgattttgcaattatgtatagtgagcaaattgatttaagtaatatgcctaatgcaaaacttcatttttatacacacatgtatggatcagcaattggcgaattacaaatagatatgtttgatggatctagctacgttccagtttttaacaaaattggagaacaaggagatttctgggttgaggaaaatgttataattaatccaacgtcaaattttgttcattttaagataaccgggattttaggcgtaaattctaatggtgatacatggccaggcgatatagcaattgatgaatttagtgtagtggaagctatatctaatgatttggaattatatagtggtagtatttattcagcatgtgatctttctaatgctgaaacagtttcaattgaattagtaaataccgctttaaatacacaaaataattttgatgtttcttactcagttaatggagcaagccccatcgtcgaaactatttccaatcctattaacccaggagacactatttcttatgattttaatactacagtagaccttagcttggatggcgtatataattttgaattcaaatgcatactgcaaaacgatcaagattcaacaaacaatatttttagtggaatttcagaaaatttattaagcccttctgctcctttgactattgatgatactgtttgttatggtgatactgcatttcttgaagcatctactaatcaaggaataattaattggtatagtgatgtcaatggtgtttctccaattaattacagtaatgttaatccaaccataacaacaacatactatgcagaagttcaagctgcagatttttataaagacgattttgaaagttaccccactggttccttaattgcccaatcttcccctaattggtccacacttagtggcactggtggaggtcaagatgatgcatttatttcaagcgctcaaatgtcatcaggtgctaattctatttatgtaaatcaattgaatgacgatgatatttatctagtttttaattccgttggtaaattctggtactgtagaaataag

SEQ ID NO: 271726 - DNA, 514 bp, Unknown
  Bacterial polypeptide expressing nucleotide sequence isolated from the Sargasso Sea
tatggtaacaataagactttcaagatctggcgcaaagaaaaagcctttttttcacatcacggtcactgattctagaaaacctagagatggaaggtttatagaaagaattggctacttcaatcctattgctaaaggaaaagaacttagattaaaagtagatcatgaaaggattgactattggcttggagttggagcatctttgagtgataaggttgctcttttggttaagcaatctaaattcactccagaagaacaagaaaattatttcaaatttaaagaagaaaaaagattaaaaattctttctaagaaaaaagaaaaagccttcaaagaagctacaccagaagctgaagccgaagccgaagctactccagaagccgaagccgaagccgaagtcgaagctgcaccagaaccagaagccgaagccaaagtcgaagctgcaccagaaccagaagccgaagctactccagaagccgaagctactccagaagccgaagccgaagctactccagaagcg

SEQ ID NO: 271727 - DNA, 751 bp, Unknown
  Bacterial polypeptide expressing nucleotide sequence isolated from the Sargasso Sea
ttttccctacatcattcatactattatcgtttggcttttgccgatgtcttttttttttttcgtaggccggtatctcaacaataaaaaattttcaagaatgcttttgggagtgatgttgatggggtttgttgtaacttgtattcctttaatctatggtgaaatgtccggtaatcccaaactcagcgcaatgggaattgacgcttcactagccaatatggaaggtaaagaggtgcgttttggaacgtattattcgtccttttacagcgcggttaatatgataatcccggccggtacgataacgggtatgcacgatagttatatgccgttgtcttcgatagggatgtttattggaatgcaggtagatgcgttttttggagggctgggtaccggatggatcaatatgtttatttacctgatcatagccacttttattggttcactgatggtaggacgaactccggagttgtttggcaaaaaaatctcgattaaggaagttcaggtagcggttttggttaacctttgtgctttggcaattccattattattttcggcaatagcggttcatgtttatttgtatgttccggaagctgtggaatggctgagcaatacagggccacacggttttaccactatcgtttatgagtatgtgtcttcgatggcgggaaatggaagcgggtttgaagggctggctgataatactcctttttggaatttaaccacttcggttacgatgcttgccggtcgctttatt

SEQ ID NO: 271728 - DNA, 637 bp, Unknown
  Bacterial polypeptide expressing nucleotide sequence isolated from the Sargasso Sea
gatgaatgcccccgtaacggcgcaacgcagcgcccaatcgtccagcagccagccgcagaccggcctcggcgcgctgtggcgcccggccctcaagcaggccttcgtcaagctcgacccacggcaactggtgcgctcgccggtgatgctggtggtggagctgacggcgctggtcaccagcgtgctgtgcttcgtccccaaccctgccgtcagtaccgccctgggcgtgcagatcgccctgtggctgtggttcaccgtgctcttcgccaacttcgccgaggcgttggccgagggccggggcaaggcccgtgccgacagcctcaagtccggcagccaggggctgatagcgcgcaagcaggtcggtgcgcagttccagtccgtaccggccagcagcctgcgcaagggcgatgtggtgcgggtcgaggccggtgaattgatccccggcgacggcgaggtgattgaaggcgtcgcggcggtcaacgaagcggcgattactggcgagtccgcaccggtgatccgcgagtccggcggcgaccgctcggcggtgaccggcaacacccgactggtgtcggactggttgctagtgcggatcagcgccaaccccggcgagtccaccctcgaccgcatgatcgccctggtc

SEQ ID NO: 271729 - DNA, 150 bp, Unknown
  Bacterial polypeptide expressing nucleotide sequence isolated from the Sargasso Sea
gatgcgctggacggccgtgctgcgcgaggcattccgcaagctcgcgccgcgcgtgcagttgaagaaccccgtgatgttcgtcgtgtatctcggcagcatcgtcacgaccgtgctgtggctgcaggcgctgaccggcacggtcgtgacgat

SEQ ID NO: 271730 - DNA, 1286 bp, Unknown
  Bacterial polypeptide expressing nucleotide sequence isolated from the Sargasso Sea
gctggctggaatcgtcgtttttcttgttgcgctacccctttgcatcggaattgcacttgcatcaaatgcgcctccacttgcaggaattgttgcaggaattgttgcaggtctgatcgtcggccctctcagcaacgctcaggttaccatctctggtccagctgccgggctgactgccgtcgtggcagcagagattgcagcaattggttcgttcgaaggattgttagttgcggtagctcttgctggcgtgattcagatcgtgttggggattattcgtggaggcttcatcaagtcgtttgtaccctcgagtgttgtccgcggtttgctttctgcaatcggggtcattctgattctgaaacagatccctcacttgttcggtcatgacaccgacccagagggtgaaatgtcattttttcagccggataagcaaaatacattttcagaacttctgcaaattcttagtgatcttcacccaggcgcgattgttgttggctttgtctctctcgccatcatttacttttggggtagggtgtcttttcttaagaaaactgggattccggccccgctcgttgttgttctctttggtgtgctttgcagccttggattcgaccagctcggtggatcatggattatcacggcgagtcacaaagtagaggttcctttaccagagacaattcgtggttttttcggattactgccgaatccagatttcagtcagattacaaatccagcggtttcttctgcagcacttaccatcgcactagtcgggtcgttgcaggcacttctcactctggaagctgtcgaccgacttgatcgagagaagcgaagcacatcaccgaaccgggagcttattgctcaaggtattggaaacattgtttccgggatggctggggggcttccaatgacatgcgaaatcgttcgatcaagtgtgaatattgatgcaggtgcccggacaaagatttctacgattcttcatggtgctctcctggcaattgcggttgtgcttcttcctcgggccattaacctcataccgctttcagcactcgcagccattctgattgccacaggtctcaaactggccagtccgaaggttgtagcagaactctggcgagctggtaggtatcaattcgttccgtggcttgttactttgcttgccatagttttgactgatccacttattggaattctgattggccttgcagtcagcacaatatttattctctggagcaatcttcgaaggccattgcgattggtagtagagcatcaccttggcggcgacgttacgagaa

SEQ ID NO: 271731 - DNA, 858 bp, Unknown
  Bacterial polypeptide expressing nucleotide sequence isolated from the Sargasso Sea
gctggtgcgcccggcgatcgtggactccttcaagaagctcacgccgcgcacgcagttccgcaatccggtgatgttctgcgtgtacgtcggcagtattctgacgaccattctgtggatcgccgcgctcggcggtcaggccgaggcgcccgcgggcttcattctcgcggtcaccttgtggctgtggttcacggtgctgttcgcgaacttcgcggaggcgctcgccgaaggccgttccaaggcccaggccgcttcgctgcgcagcgcgaagaaagacgtgatggccaagaagctcaacgagccgcatccgaagtcgccgatccgtattctgacggcgtccgatctgcgtaaaggcgacgttgtgctggtcgaaaccggcgacgtgattccggctgacggtgaggtgatcgacggcgttgcgtcggtcgacgaatcggcgatcacgggcgaatccgcaccggtgatccgcgagtcgggcggcgatttttcgtcggtgacgggcggcacgcgcgtgctgtcggactggatcgtcgtgcgggtcacggccaatccgggcgaagccttcctcgaccgcatgatcgcgatggtcgaaggcgccaagcggcagaaaacgccaaacgaaatcgcgctgacgatcctgctggtcgcgctgacgattgtgatgttgctggctaccgccacgctgctgccgttctcgatgttttcggtcgaagcggccaaggcgggtcacgtggtcacgatcacggcgctggtcgcgctgctggtgtgcctgattccgaccaccatcggcgggctgttgtcagcgatcggcgtggccggtatgagccgcatgatgcaggcgaacgtgattgccacctcggg

SEQ ID NO: 271732 - DNA, 464 bp, Unknown
  Bacterial polypeptide expressing nucleotide sequence isolated from the Sargasso Sea
acaagccgatgtgggcctggcgatgaactcaggtacccaggccgcgaaagaggccggcaatatggtggatctggattctgatccgaccaagttgctgtcagtggtggaagtgggcaaacagatgctgatcacccgtggcgccttaaccaccttttcgctggcgaacgacattgccaaatacttcgttatcgtgccggcagtgtttgccagcgccatgcctggcattgctgcgctgaatattatgcagctgccggatccgaaaatagccgtgctgtcagcgctggtatttaacgccctgattattccggcgcttattccgctggcgctaaaaggcgtaaaaattaaagccattagtgcagaaaagttattgcgtaacaatatgttgatctacggcatgggtggtgtggtgctgccttttatcgccatcaaactgattgacgtactactaaacggggtattttaac

SEQ ID NO: 271733 - DNA, 700 bp, Unknown
  Bacterial polypeptide expressing nucleotide sequence isolated from the Sargasso Sea
ccgctgggctttgggctggctcgactgatcaataatacgtccctgccgggcctggctggcgtggaacatatgctgtggcgctctctgggcatctcgcagcaggagatgaactggcggcagtatctgttggcgatcctcgcgctcaatgtactgggcctgctggtcctgttttcgatgctgatggcgcaaaacctgctgccgttaaatccccagcaactgccagggctttcgtgggatctggcgcttaacaccgcggtgagttttgtcactaataccaactggcaatcctatgctggtgaaaccaccttaagctacttcagccagatggtcgggctgaccgtacaaaacttcctgtcagcggcaaccgggattgcggtgatttttgccctgacccgcgccttcacgcgccagagtatgaacaccttgggcaacgcctgggtcgatctgattcgcattacgctgtggatcttgctccccattgcattgctcattgcgctgttcttcattcagcaaggtgtgctgcaaaacgtgttgccttatcagcccatcaccacccttgaaggggttaaacaactgctgccgatggggcccgtcgcctcacaggaagcgattaagatgcttggcactaacgggggcggtttctttaacgctaactcatcacatccgtttgaaaaccctaccgcattgaccaatctggtac

SEQ ID NO: 271734 - DNA, 766 bp, Unknown
  Bacterial polypeptide expressing nucleotide sequence isolated from the Sargasso Sea
cgtgccgaactgccggcgccgctggcgcgcgaggtggagaagatcgcccagagtggtggtacaccgctgctggtggccggggctgggcgcctgctcggcgccatccacctcaaggacgtggtcaagctaggcatccgcgagcgtttcgccgagctgcgcgccatgggcatccgcaccgtcatggtgacgggcgacaacccgctgaccgccgccgccatcgctgccgaggctggtgtcgacgatgtgatcgccgaggccacgccggagaagaaactgtcgcgtatccgcgctgagcaggccgaaggcaagctggtggcgatgtgtggcgacggcgccaacgacgccccggcgctggcccaggccgacgtcggcctggccatgaacgacggcacccaggccgcacgcgaggccgccaacctggtggatctggacagcgacccgaccaagctgatcgacgtggtgcaggtgggcaaggagctgctggtgacccgaggtgcgctgaccaccttctcggtggccaacgacgtggccaagtacttcgccatcctcccggcgctgttcgccggcatctacccgcagcttggcgcgctcaacctgatgcagttgcacagctcgcagagcgcgatcctctcggccatcgtgttcaacgcgctgatcatcgtcgcgctgatcccgctggcgctgcgcggcgtgcgcatccccgcgctggatgccggccaactgctgcggcgcaacctgctgatctacggcctcggcgggctgatcg

SEQ ID NO: 271735 - DNA, 811 bp, Unknown
  Bacterial polypeptide expressing nucleotide sequence isolated from the Sargasso Sea
catgagcggcgtggacttgcccggcccgcgcctgctgcgcaagggtgcggccgatgccatccgcaagcatgtggaggccctgggcgggcgctttcctaccgccgtgcagacggcggtggacgatgtatcgcgccgtggcagcacgccgctggtggtggccgatggcgcgcaggtgctgggcgtggtggagctcaaagacgtggtcaagggcggcatcaaagagcgctttgccgaactgcgccgcatgggcatcaagaccgtgatggtgacgggcgacaaccgactcacggccgcagcgatcgcggcagaagccggtgtggacgactttctggccgaggccacgcccgaggccaagctgcagctcatccgcagctaccaggccaacggccagctggtggccatgacgggcgacggcaccaacgacgcccctgctctggcccaggccgatgtggccgtggccatgaacaccggcacccaggccgccaaggaggcgggcaacatggtggacctggacagcaaccccaccaagctcatcgagattgtggaaaccggcaagcagatgctgatgacgcgcggctcgctcaccaccttcagcatcgccaacgacattgccaagtacttcgccatcatccctgcggcctttgtcaccacctaccctcagctgtcggcgctgaacttcatgcatctggccagcccctcgtcggccattctgtccgccgtggtgttcaacgcgctgatcatcatctttttgatcccgctggccctgaggggcgtggcctaccgcgccgtgggtgcagccgcgctgctgcgc

SEQ ID NO: 271736 - DNA, 898 bp, Unknown
  Bacterial polypeptide expressing nucleotide sequence isolated from the Sargasso Sea
accgcgctttagctgccatgtgattgccaagtcgggtaaagctgttgaagtcgcaggtgatatcgatactttattactggataaaaccggcaccatcacttttggtgaccgtcaggcgaccgcgttttttgcgctgcctggcgtggctcaatctgaactggtgcgtggtgctgtgctttgctcagtgcaggatccaacgcctgaaggtaagtctgtggtgcgtctggcgcaggagcaaggtgttgcggctgaaactctgccagacaatgctcagtttattccattcagcgctcaaacccgcttatcaggtgtacaactggataacggtgaacattgggtcaaaggtgctgctgatgcagtaaaaaaatgggcgcaaagccgaggtctggctgtgcctaacaatctggaccctatagtcactaaggtggcgcaacaaggtgcaacgccattagttgtggccaatcagcaacgtattttgggtgtgatccagttatctgatgtgattaaacctggtgtagctgaacgttttgccgagctgcgtgctttaggtgtgcgcaccattatggtcacaggtgacaaccctattactgcaggcgctattgccgctgctgctggtgtggatgactttgtggctgaagcccggcctgaagacaagctggcgcttattcgccgcgaacaggctctaggccgcttagtggctatggttggtgacggtaccaacgatgcacctgctttagctcaggccgacgtaggcttagccatgaactccggtactcaggccgccaaagaagcgggcaatatggtggatctggattcagacccaaccaagctgctggccgtggtggaagtaggcaaacagttgctgatcacccgtggcgctttaccaccttctctttag

SEQ ID NO: 271737 - DNA, 850 bp, Unknown
  Bacterial polypeptide expressing nucleotide sequence isolated from the Sargasso Sea
gtgcacaccctgctgctggacaagaccggcaccatcacctttggcaaccgccgctgcagcgccatggtcaaggcgccgggggtgtctacgccggagttggccgaggcggcgctgctggcctcgcagggcgacgacacgcccgagggcaagtccatcgtcgagtacctggcagcgctgcacccgatggaggtgcccgagcgtagcggcatgacgctgatcgccttcagcgccgagacgcgcctgtccggtgctgatgtgggtggcgtggcttatcgtaaaggcgcggtggatgcggtgctggcctacctcggcctgggccgtagtgatctgccggcgcccctggcgcgcgaggtggagaagatcgcccagagtggcggcacgccgctgctggtggcctgggacgggcgcctgctcggcgccatccacctcaaggatgtggtcaagccagacatccgagagcgcttcgccgagttgcgcgccatgggtatccgcaccgtcatggtcaccggcgacaacccgctgaccgccgccgccatcgccgccgaggccggtgtcgacgacgtgattgccgaggccacgccggagaagaagctctcgcgcatccgcgccgagcaggccgaaggcaagctggtggcgatgtgcggcgacggcgccaacgacgccccggcgctggcccaggccgacgtcggcctggcgatgaacgacggcacccaggccgcgcgcgaggccgccaacctggtggatctggacagcgacccgaccaagctgatcgacgtggtgcaggtgggcaaggaactgctggtgacgcgcggcgcgctgaccaccttctcggtggccaacgacgtggcca

SEQ ID NO: 271738 - DNA, 1966 bp, Unknown
  Bacterial polypeptide expressing nucleotide sequence isolated from the Sargasso Sea
tatgagtcatgtgattgcgcaggccagtcgggccgcttttgtaaaattacagccgcaattggcgataaaaagcccggtgatgctggtggtttgggtgggcacagtgctggctttgggtttgaccgcccaactggtgctgacccatcagccttatggctttgctctttgctgcagtctgattttgtttttcactttgtggtttgccaactttgccgaagctatcgcagaagcgcgtggccggggtcaggcggccagtttaaaagccacccgccgtgatttaaccgcctggttgctgaattcagctggccagttacatcaggtggcggccagctcgttaaaggccggtgacaaagtgaaagttgaagcaggtcagtttgtaccggccgatggtgaaatagtgttgggtgtggccactatcaacgaatcggcgttaacaggagaatctgcccctgtgctgcgtgaagccggtaccgaccactccggggttattgccggcactaaggtattaagcggcactatcactgtgctggtgacggccgaagctggttttagttttctcgacaaaatgatcagcctggttgaaggcaccaacagacaaaaaacacccaacgagctggcgctgactgtgctgttagccgcgctcactttagtgtttttaattgcggtagccaccttaccggcgatggcggcttttgtcgggatagaacttgatttgttaatgctgatagcgctgctggtttgtttaattccaaccactattgccggtttattacctgccataggtattgctggtatgaacagggcgctctcggccaatgtgattgccaagtccggcaaagccgtggaagtggccggtgatatcgacactttattactggataaaaccggcactattacttttggcgaccgtcaggccacggcttttattgcgttgcctgcggtgacacaaaccgagctggtgcgtggtgctgtgctttgttccattgaggacccgacgccagaaggcaagtcggtggtgcgtttagcacagcagcttggcgctgccgaagaaagcctgccggacaatagcgaatttatgccttttagcgcccagacgcggttatccggcgtgcagctggcgaacggtgaatattgggtcaaaggtgcggccgatgcagtcaaagcctgggcgaaaagccggggtctggcggtgccgaatagtctggatccgatggtcagcaaagtggcgcaacaaggcgcaacgcctttagtggtggctaatcagcaacgtattttgggtgtcattcagttatccgatgtgattaaacccggtgttgccgaacgttttgctgagcttagagctttgggggtgcgcactgtgatggtgacaggtgacaaccctatcactgcgggtgccattgctgccgcggccggggtcgatgactttgtggcagaagcccggccggaagacaagctggcgcttattcgccgtgaacaggcgcagggccggttagtggccatggtgggcgacggtaccaacgatgcgcccgcgttagctcaggccgacgttggccttgccatgaactcaggcactcaggccgccaaagaagccggcaatatggtggatctggattcagatccaaccaaattgctggcggtggtggaagtgggcaaacaactgctgatcacccgcggcgctttaaccactttttcgttagccaatgacgttgccaagtattttgtcatagtgccggctgtgtttgccgccgctatgcccggtattgctgcgctgaattttatgcagctgccggatccaaaaatggcggtattgtcggcgctgatttttaacgcactgattattcctgcccttattccgctggcactgaaaggtgtaaaaatccgcgctgtcagcgcggaaaaactgttacgcaacaatatgttgatcttcggtttgggcggtgtgttgttaccttttgccgcccattaa

SEQ ID NO: 271739 - DNA, 1057 bp, Unknown
  Bacterial polypeptide expressing nucleotide sequence isolated from the Sargasso Sea
atgtctaatattaaattttcaaatgttcataagtcatttggtcaaaataaaattattaataattttaatcttgaaggtaaagaagatgaatttttagttctagttggcccatcaggatgtggtaagtctactttattgagaatgatcgcagggttagaaaaagtcgatgaaggaaaaattcaaattaatgataaaattatcaacgaattacatccctcgaaaagagaaacagcgatggttttccaatcttatgctttgtatcctcatatgaatgtctatgagaatatgtcttttggactcaaaattgaaaaacaaagcaaagaggaaattcaaacaaaagttttaagagcagcaaaaatacttaaaattgaagaacttttagaaagaagacctaaacagttatctggaggtcaaagacaaagagtggctattggaagagcaattaccagaaatcctaaaatatttttatttgatgaaccattgtcaaatctagacgctgcattgagggcggaaatgagagttgagatttcaaagctacatcaacaaatcaagacaaatatgatttatgttacccatgatcaagttgaggcaatgactttagcagatagaatagttattttaaatgaaggtaatatagaacaagtaggtacaccagaagaaatttatagtgatccagctaacatttttgttgcacaatttataggtactccaaaaatgaatattttagaaattgatgaaaaagatattaaatcagaaaaaataataaaagtattaggcaacgaacttactataaaaaatgtaaaattagaaaaaagaaaacattttattggaattagaccagaacatttaaaaataaacaatgaaacaaaatttaaattttcacctgaaatagatattattgagaatttaggaaacgaaaaaattgtttatatgaaaaaagataaccatcaattaagtgccaaaatatctagtggaactgaaattggaaattcattcggttttgatcttcaaaacatttttatttttaatgaaaatggaaaaaggatcaaaagttaac

SEQ ID NO: 271740 - DNA, 860 bp, Unknown
  Bacterial polypeptide expressing nucleotide sequence isolated from the Sargasso Sea
catgaccaacggactccaaccgccggttcatcagccgggcaacatcggccaggcgcgcaatgccgcgcgctcgatgttcgacccggcgattgcccggccggcgctcgtcgattcgttcaggaaactcgcgccacgtcatcaattgcgtaatccggtgatgttctgcgtgtacgtcggcagcattctgaccaccattttgtggatcgccgcgctcgggggacaggccgaggcgcccgccggtttcattctcgcgatcgcgctctggctgtggtttaccgtgctgttcgccaacttcgccgaggcgctcgccgagggccgctccaaagcgcaagcggcttcgctgcgcggcgcgaagcacaacgtgatggcgaagaagctgcaggaggcgcatcccaagtcgccgatccgcatcacgaccgcgaccgaactgcgtaaaggcgatgtcgtgctggtcgaaaccggcgatgtgattccggctgacggcgaggtcctcgaaggtgtcgcgtcggtcgacgaatcggcgatcacgggcgaatccgcaccggtgatccgcgagtcgggcggcgatttctcgtcggtgacgggcggcacgcgcgtgctgtcggactggattgtcatgcgggtcaccgtgaatccgggcgaggccttcctcgaccgcatgatcgcgatggtggaaggtgcgaagcgtcaaaaaacgcccaacgaaatcgcgctgacgattctgctggtcgcactgacgctcgtgctgctgttcgccaccgccacgctgttgccgttctcgatgttttcggtcgaggccgcgaaagcagggcacgtggtcacgatcacggcgctggtcgcgttgctggtatgcctgattc

SEQ ID NO: 271741 - DNA, 1807 bp, Unknown
  Bacterial polypeptide expressing nucleotide sequence isolated from the Sargasso Sea
aatgaacgcgaacaatctcttgcaaacgctgatcttcatcgtcgtgctgctggcggcggccgttccggtcgcccgctatctgtccgcggtcatggacggcagctcgcgcgtcgtgcgcgtgttcgggccgctcgagcgcgcgatgtaccgcatcgccggcgtcgacgccggcagcgagatgaactggaagcagtacgccgtcgcgacgatcgcgttcaacgcgctcggcgcgctgttcctctacggcctgctgcgcctgcagggcttcctgcccggcaatccgcagcagttcggcgcgatgacggtcgacggcgcgttcaacacggcagtcagcttcgtcaccaacacgaactggcaggactacacgccggagcagaccgtcagctacctgacgcagatgctcggcctgaccgtgcagaacttcctgtcggcggcaaccggcatcgtcgtcgtgatcgcgctgatccgcggcttcgcgcgccataccgcgcagacgatcggcaacttctgggtcgacctcacgcgcgtgacgatgtacgtgctcgtgccgatgtcggtgatcatcgccgcgctgctgatgagccagggcgtgatccagaacatgaaggcgtacgaggacgtgccggtgctgcagacgagcacctatgcggcgccgaagctcgacgcgcagggcaatccggtgaaggacgacaagggcaatccggtcacggtgccgaccccgctcacgaagcagacgcttgcaatgggcccggtcgcgtcgcaggaagcgatcaagatgctcggcaccaatggtggcggcttcttcaacgcgaactccgcgcacccgtacgagaacccgacgccgttcgcgaacttcatccagatcttcgcgatcctgatcatcccggcctcgctgtgtctcgtgttcggccgcatgatcggcgaccgccggcagggtatcgcggtgctcgcggcgatgacggtcgcgttcgtgatcgcgatcggcttcgaggtgagcgccgagcagggcggcaacccgacgctcgccgcgctgcacgtcgaccagacggcgagcgcgctgcagccgggcggcaacatggagggcaaggaaacgcgcttcggtatcgcgcagaccggcatcttcacggtcgcgacgacggctgcgtcgtgcggcgccgtcgacacgatgcacgattcgctgacgccgctcggcggcctcgtgccgatgctgctgattcagctgggcgaggtggtctacggcggggtcggctcgggtctctacgggatgctcgtgttcgcgctgctcgcggtgttcgtcgccggcctgatgatcggccgcacgccggaatacgtcggcaagaagatcgaggcgtacgagatgaagatggtgtcgatcgtcgtgctgctcacgccgctgctggtgctggtcggtacgtcgatcgccgtgctcgccgatgcgggcaaggccggcatcgcgaacccggggccgcacggcttctcggaaatcctgtacgcgttcagctcggccgccaacaacaacggcagcgcgttcgcgggcctgacggtcggcacgccgttctacaactggacgaccgcgatcgcgatgtggttcggccgcttcggcacgatcgtgccggtgctggcgatcgccggctcgctcgccgcgaagaagcgcatcgcggtgacgagcggcacgctgccgacgcacggcccgctgttcgtcgtgctgctgctcggcaccgtgctgctggtgggcgcgctgacctacgtgccggcgcttgcgctcggcccgggcgtcgagcacctgatgatgtggctgggcgcgtga

SEQ ID NO: 271742 - DNA, 2086 bp, Unknown
  Bacterial polypeptide expressing nucleotide sequence isolated from the Sargasso Sea
aatgactcaacattccgcaacacggtccatgttcgatccggcgctgctgcgcccggcgatcgtggactcgttcaagaaactcacgccgcgcacgcagttccgcaatccggtgatgttctgcgtgtacgtcggcagcatcctcaccacgatcctgtggatcgcggcgctcgccggccaggccgaggcgcccgcgggcttcatcctcgcgatcgcgctgtggctgtggttcaccgtgctgttcgcgaacttcgccgaagcgctcgccgaagggcgttcgaaggcgcaggcggcgtcgctgcgcagcgcgaagaaagacgtgatggcgaagaagctcaacgagccgcatccgaagtcgccgatccgcatcacgaccgcgaccgagctgcgtaaaggcgacgtcgtgctggtcgaggccggcgacgtgatcccggccgacggcgaggtggtcgatggcgtcgcctcggtcgacgagtcggcgatcaccggcgaatccgcgccggtgatccgcgaatcgggcggcgacttctcgtcggtcacgggcggcacgcgcgtgctgtcggactggatcgtcgtcaaggtcaccgcgaaccccggcgaggcgttcctcgaccggatgatcgcgatggtcgaaggcgcgaagcgcaagaagacgccgaacgagatcgcgctgacgatcctgctcgtcgcgctgacgatcgtgatgctgctcgcgaccgcgacgctgctgccgttctcgatgttctccgtcgaagcgatgaaggccggccacgtggtgacgatcactgcgctcgtcgcgctgctggtgtgcctgatcccgacgacgatcggcggcctgctgtccgcgatcggcgtggccgggatgagccggatgatgcaggcgaacgtgatcgcgacgtcgggccgcgcggtggaagccgccggcgacgtcgacgtgctgctgctcgacaagaccggcacgatcacgctcggcaaccgccaggcatcgacgttcgtgccggcgccgggcgtgaccgaggaagcgctggccgatgccgcgcaactgtcgtcgctcgccgacgaaacgccggaaggccgcagcatcgtcgtgctcgcgaaggaacgtttcaacattcgccagcgcgacatggggcagctgcacgcgacgttcatcggcttctccgcgcagacgcggatgagcggcgtcgacctgccgggccgtgaaatccgcaagggtgcggccgatgcgatccgcaattacgtcgagacgcacggcagccgcttccccgaggaagtgcgccgtgcggtcgacgaagtcgcgcgccgcggcagcacgccgctcgtcgtggccgacctgcaggacggggcggcgcgcgtgctcggcgtgatcgagctgaaggacatcgtgaagggcggcatcaaggagcgcttcgcggagctgcgcaagatgggcatcaagaccgtgatggtgacgggcgacaaccggttgacggccgcggcgatcgcggcggaagcgggcgtcgacgatttcctcgcggaagcgacgccggaaaccaagctcgcgacgatccgcgagcaccaggccgcagggcgcctcgtcgcgatgacgggcgacggcaccaacgacgcaccggcgctcgcgcaggccgacgtcgccgtggcgatgaacaccggcacgcaggcggcgaaggaagccggcaacatggtcgacctcgactcgaacccgacgaagctgatcgagatcgtcgagatcggcaagcagatgctgatgacgcgcgggtcgctgacgacgttctcgatcgcgaacgacatcgcgaagtacttcgcgatcatcccggccgcattcgtgacgacgtacccgcagctgcgcgtgctcgacatcatgcacctgacgtcgccggcgtccgcgatcctgtcggcggtgatcttcaacgcgctgatcatcgtcgcgctgattccgctggcgctgaagggcgtcacgtaccggccgctcggcgcggcttcgctcctgcgccgcaacctgctggtgtacggcctcggcggcgtgctgctgccgttcccgttcatcaagctgatcgacatgacgctcgctgcactcggctgggcctga

SEQ ID NO: 271743 - DNA, 790 bp, Unknown
  Bacterial polypeptide expressing nucleotide sequence isolated from the Sargasso Sea
cccactgctcacatcgctgggcgtggaccaggccgccagcaccctgcatgcgggcggcaacatggaaggcaaggagacgcgctttggcatcgccacctcggccctgttcgccgtcatcaccacggcggccagctgcggcgcgatgattgccatgcacgacagcttcacgcccctgggcggtatggtgccgatggtgctgatgcagatgggcgaggtggtgtttggcggcgtgggctcgggcctgtacggcatgctggtgttcgccatcatggcggtgttcatcgccgggctgatgattggccgcacgcccgagtacctgggcaagaagatcgagacgcatgagatgaagctcgtctccatcgccatcctcgtcacgcccctgctggtgctgctgggcacggccgtggcggtgatgagcgaggcaggccgcgcaggcctctccaaccctggcgcacacggcttcagccaggtgctgtacgcgctgtcttccgccgccaacaacaacggcagcgccttcgctggcctgtcggccaacacgcctttctacaacgtgctgctggcggtgacgatgtggctgggccgctttggcgtgatcgtgcccgtgctggccatggccgggtctctggctgccaaaaagcgcgccaccgccaccgatggcaccttgcccacccacggcccgctgtttgtggcgctgctggcaggcgtggtgctgctggtgggcttgctgaactatgtgcccgccctggcgctgggcccggtggtcgagcacttggtgctgaccacgcgctaa

SEQ ID NO: 271744 - DNA, 1051 bp, Unknown
  Bacterial polypeptide expressing nucleotide sequence isolated from the Sargasso Sea
gatgactcgcaagacattgaccctgttcgaccccgccctcgtgcgccccgcgctgctggacgccttcaagaagctggacccgcgcgtgcaatggcgcaacccggtgatgtttgtggtgtacgtgggcagcgccttcaccaccgcactggccgccagcaagcccgatggcttcaccgctgccgtggcactgtggctgtgggtcacggtgctgttcgccaacttcgccgaggccatggccgagggccgcagcaaggcccaggcagcctcgctgcgtgggctgaaaaagcagacctgggccaagaagctggacggccagtttgaccgcaccaccccacgcacagagctgacctggctgcccctggaggccgcccacctgcgcaaaggcgacgtggtgctggtggaagcgggcgacaccatccctgccgatggcgaggtgatcgatggcgtggcctcggtggacgagagcgccatcacgggcgaatcggcccccgtaatccgcgaatcgggcggagacttcagcgccgtgactggcggcacccgcgtgctgtccgactggatcgtggtgcgcgtggcggtggacccgggcgagaccttcgtcgaccgcatgatcgccatggtcgagaacgccaagcgccagaagacgcccaacgagatcgccctgaccatcctgctggtggcgctgaccatcgtgtttctgggcgtggtggccacgctgctgccgttttccatcttcggcgtcgccgccaccggccagggccagcccgtgggcctggtggtgctggtggcgctgctggtgtgcctgatccccacgaccatcgccggccttctcagcgccatcggcgtggcaggcatgagccgcatgatgcaggccaatgtgatcgccacctcaggccgcgcggtggaggctgcaggtgatgtagacgtgctgctgctggacaagaccggcaccatcaccctgggcaaccggcaggccagccagttcgtgtctgcacccggcgtgaccgatgctgctttggctgacgccgcccagctcgcatcgctcgccgacgaa

SEQ ID NO: 271745 - DNA, 2128 bp, Unknown
  Bacterial polypeptide expressing nucleotide sequence isolated from the Sargasso Sea
catgtctctcgcacccgtgacaggcccgcgccccgcgcagccgggccatgcgcgcacggccgcgcgctcgatgttcgatcccgcactcgtgcgcccggcgatcgcggattcgttccggaaactcacgccgcgcacgcagttccgcaacccggtgatgttctgcgtgtacgtcggcagcatcctgaccacgatcctgtggattgccgcgctgttcggccaggccgaagcgcctgccggcttcatcgtcgcgatcgcgctgtggctgtggttcaccgtgctgttcgcgaacttcgccgaggcgctcgcggaagggcgttcgaaggcacaggctgcgtcgctgcgcagtgcgaaacacaacgtggtcgcgaaaaagctcgtggcgccgcatgcgaaggcggccgtcgaggtgatggcgtcgaccgacctgcgcaagggcgacgtcgtgctcgtcgaaaccggcgacacgatcccggccgacggcgacgtgatcgaaggcgtcgcgtcggtcgacgaatcggcgatcaccggcgaatccgcgccggtgatccgcgaatcgggcggcgacttctcgtcggtcacgggcggcacgcgcgtgctgtccgactggatcgtcgtgcgggttgccgtcaatccgggcgaggcgttcctcgaccgcatgatcgcgatggtcgaaggcgcgaagcgcaagaagacgccgaacgagatcgcgctgacgatcctgctcgtcgcgctgacgatcgtgatgctgctcgcgactgccaccttgctgccgttctcgacgttcgcggtcgaagcgatgaaggccggccacgtggtgacgatcaccgcgctcgtcgcactgctcgtgtgcctgatcccgacgacgatcggcggattgctgtccgcgatcggcgtggccgggatgagccggatgatgcaggcgaacgtgatcgcgacgtcgggccgcgcggtggaagcggccggcgacgtcgacgtgctgctgctcgacaagaccggcacgatcacgctcggcaaccgccaggcatcgacgttcgtgcccgcgccgttcgtgaccgaggaagcgctggccgatgccgcgcaactgtcgtcgctcgccgacgaaacgccggaaggccgcagcatcgtcgtgctcgcgaagcagcgcttcaacctgcgcgagcgcgacatgcaggcgctgcatccggtgttcctgtcgttcagcgcgcagacgcggatgagcggcgtcgacttgcccggccgcgagatccgcaagggcgcggccgacgcgatcaagcattacgtcgagtcccacggcggctgcgtcacgcgcgaagtcgaagccgtcgtgaccgacatcgcgcgtcgcggcagcacgccgctcgcggtggcggagcgtgtcgacggtgtcgcccgcgtgctcggcgtgatcgagctgaaggacatcgtgaagggcggcatcaaggagcgctttgcagagctgcgcaagatgggtatcaagaccgtgatggtgacgggcgacaaccggttgacggccgcggcgatcgcggcggaagcgggcgtcgacgatttcctcgcggaagcgacgccggaaaccaagctcgcgacgattcgcgagcaccaggcggtaggccgtctggtagcgatgacgggcgacggcaccaacgacgcgccggcgctcgcgcaggccgacgtggcggtcgcgatgaacaccggcacgcaggcggcgaaggaagccggcaacatggtcgacctcgactcgaatccgacgaagctgatcgagatcgtcgagatcggcaagcagatgctgatgacgcgcgggtcgctgacgacgttctcgatcgcgaacgacgtcgcgaagtatttcgcgatcatcccggccgcgttcgcgacgacgtatccgcagctgcgcgtgctcgacgtgatgcatctcgcgtcgcctgcatccgcgatcctgtccgcggtgatcttcaatgcattgatcatcgtcgcgctgattccgctcgcgctgaagggcgtgcgctatcgtccgctcggcgcggcgccgctgctgcgcaggaacctgctgctgtacggcctcggcggcgtgctgctgccgttcccgttcatcaagctgatcgacatggtgctggtggcctgcggatgggcgtga

SEQ ID NO: 271746 - DNA, 1846 bp, Unknown
  Bacterial polypeptide expressing nucleotide sequence isolated from the Sargasso Sea
gctggcctggcagctgaccgcctggctctggctgaccctctggtttgccaacttcgccgagaccctggccgaggggcgtggcaaggcgcgggccgacagcctgaaggccggcatgagccagctcaaggcacgtcgggtcaccagcccgcaggatgacaagggcgaatgggtaccggccaccagcctgctcaagggcgatctggtgctggtgcgcagcggcgagatgatcccggccgacggcgaagtggtcgccggcatcgcctcggtcaacgaggcagccatcaccggcgaatccgcccccgtcatccgcgagtcgggcaccgaccgcagcggcgtgaccggcaacaccaccgtcgtctccgaccagatctgggtgcacatcagcaacaaccctggcgaaagcacgctggatcggatgattgccctggtggaaggggccaagcggcagaagacccccaacgagatggcgctggacgccctgctggtggggctgaccctgatcttcctgctggtggtggccaccctgccctggttcctcgactacaacggcacccaggtgccccggctctatctgctggcgctgttcatcaccctgatcccgaccaccatcggcggtctgctctccgccatcggcatcgccggcatggaccggctggtgaagctcaacgtgattgccaagtcgggccgggcggtggaagccgctggcgacgtgcgcaccctgctgctggacaagaccggcaccatcaccttcggcaaccggatggcagacgagctgatcccggcccccggcgtggacccctctttgctggcccaggccgccatgctggcctcgctgggtgacaatacgccggagggcaaatccattctgaccctggcgggcaagagccacaccagaccgagccagctggagagcgacatcctcatccccttcagcgccgagacccggctgagcgggctggatcgcaacggccatcactatcgcaagggggcggtggatgcagtgctgcgctacctctcgctcgatcgcaaggcggtgccggagctcatcctcaagtcggtggacaacatcgcccgccagggcggtaccccgctgctggtctgcacacacgagaagctgctgggggtggtgttcctcaaggacatcatcaagccgggcatcaaggcacgcttccagatcctgcgccacatggggatccgcaccgtgatgatcaccggtgacaacccgctgaccgccgccgccatcgccgccgaggccggggtggatgacttcatcgccgaggcgacgccggagaagaagctggcctacatccgtcaggagcaggccgacggccggctggtcgccatgtgcggggacggcgccaacgacgcaccggcgctggcccaggctgacgtgggcctggccatgaacgaggggacccaggccgccaaggaggcgggcaacctggtggatctcgactccaaccccaccaagctgctggacgtggtgctggtgggcaagcagttgctggtgacccgcggcgccctgaccaccttctccatcgccaacgacgtggccaagtacttcgccatcctgccggccctgttcatcgccgcctatccgcagctgggggtgctgaacctgatgcagctgggcagcccggagagcgccatcctgtcggccatcatcttcaacgccctgatcatcgtagcgctggtgccgctggccctgcgcggggtcagcctgcaaggctcggccgccagcctgctgcgccgcaacctgctgatctacggcgtcggtggcctgatagtgcctttcataggcatcaagttgatcgacctggtcatcaccggcctggggctggtgtga

SEQ ID NO: 271747 - DNA, 907 bp, Unknown
  Bacterial polypeptide expressing nucleotide sequence isolated from the Sargasso Sea
gctggccgccgccatggtctgcaccctgggtcgctacgtgaaggatctggcccacagccgcgccatcctcatcgccatgaccatcatgctggtgctggggctctgcctcgccatcagccaggagctgaaaccggatcccgccctcgcccacctcaccagcgaagccggcaactgggaaggcaaggagagccgcttcggccccgtactgtccagcatctgggaagtggccaccaccgccgcctccaacggctcggtcaacgccatgcacgacagcttcgccccgctcgccggcatggtcgccatgatcaacatgctgctgggtgaagtggtgttcggcggcgtcggtgccggcatctacggcatgatgctgttcgtgctgctgaccgtgttcctgtgcggcctgatggtgggacgcaccccgacctatctgggcaaacggctcggcatcaccgagatgaagtgggtggtcgccagcatgctggtgatgccgatcggggtattggtgatcggcggtattaccctgctgatgccggactccgccaccgtcatcggtcacgacggcccccacggcctgtcacggctgatctatgcctacgcctcggccgccggcaacaacggctccgccttcgccggctttgccgccgccgacagctggcagtgcatcgccatcgggctggccatgctgctcggtcgcttcggctacatcattccggtgctggccatcgccggccagctggcccgcgccccgcgccaggagcgaagcgagggggacttccccgtcagcggcccgcttttcatcaccctgctgatcgtcaccgtgctgctgatgggggggctctccttcctgccggtactggcgctgggcccggtggcggaacacctgagcctgctgggaggtgccttctga

SEQ ID NO: 271748 - DNA, 2026 bp, Unknown
  Bacterial polypeptide expressing nucleotide sequence isolated from the Sargasso Sea
atgcgctggacggccgtgctgcgcgaggcattccgcaagctcgcgccgcgcgtgcagttgaagaaccccgtgatgttcgtcgtgtatctcggcagcatcgtcacgaccgtgctgtggctgcaggcgctgaccggcaccggcgacgcgccggccggcttcatcttcgcggtcgcgtgctggctgtggttcaccgtgctgttcgcgaatgcagccgaggcgctcgccgaagggcgcggcaaggcgcaggccgacgcgctgcgtgcggcgcgcaagcgcgtgtatgcgaaggtgctcgacgagccgaagcaattcggcagcaccagccatcgcgtgccgagcgacgagcttgcggccggcagcatcgtgctcgtcgaagccggcgacacgattccggccgacggcgaagtgatcgacggcgtcgcgtcggtcgacgaatcggcgatcaccggcgaatccgcgccggtgatccgcgagtcgggcggcgatttctcgtcggtgacgggcggtacgcgcgtgctgtccgactggatcatcgtgaagatcaccgcgcaaccgggcgaggcatttctcgaccggatgatcgcgatggtcgaaggcgcgaagcgcggcaagacgccgaacgaggtcgcactgacgatcctgctcgtcgcgctgacgatcatcttcctgctcgtgtgcgtgacgctgctgccgttctcgcagttcagcgtgctgctgaacgcgtcgggcacggcggtgagcctgaccgtgctgatcgcgctgctcgtgtgcctgatcccgacgacgatcggtgcgctgctgtcggcgatcggcatcgcggggatgagccgcatgatgcgcgcgaacgtgctcgcgacgtcgggccgcgcgatcgaggcggccggcgacgtcgatgtgctgctgctcgacaagaccggcacgatcacgctcggcaaccgcgaagccgtgcagttccggccggcgccgggcgtggacgagcgcgcgctggccgaggccgcgcaactgtcgtcgcttgccgacgagactccggaagggcgttcgatcgtcgcgctcgcgaagcagcgcttctcgctggacgtggcggcagtcgccggcagcatcaccgtgccgttcagcgcacgcacgcggatgagcggcctcgatatcggcgagcgtcaggtgcgcaagggcgcggcgtccgcgatccgcgcgcatgtcgatgcgctcggcggcgtgtttcctcaagcggtcgagacggccgtcaacgacatcgcgcgacgcggcggtacgccgctcgtcgtggccgacggtttccgcgtgctcggtgcgatcgagctgaaggacatcgtcaagcacgggatcgccgcgcgtttcgccgagctgcgcaaggtcggcgtgaagaccgtgatgatcaccggcgacaaccggctcaccgcggccgcgatcgcggcggaagccggcgtcgacgactacctcgccgaagcgacgcccgaggacaagctgcggctgatccgcgagcaccaggcgaagggccatctcgtcgcgatgaccggcgacggcaccaacgacgcacccgcgctcgcgcaggccgacgtggcggtcgcgatgcacagcggcacgcaggcggcgaaggaggcggccaacatggtcgacctcgacagcaacccgaccaagctgatgcaggtggtcgaggtcggcaagcagatgatcatgacgcgcggcgcgctgaccacgttcagcgtggccaacgatctcgcgaagtatttcgcgatcatcccggccgcgttcgtcgcgacgtatccggcgctcggcgcgctgaacgtgatggggctgcacagcccgacgtcggcgatcctgtcggcggtgatcttcaacgcgctgatcatcgttgcgttgatcccgcttgcactgaaaggcgtgaagtatcgcgcggagccggccgagaagctgctggggcgcaacctgctgatctacggcgtgggcgggatcgtcgcgccgttcatcggcatcaagctgatcgacatgctgttgacgccgtttatctgac

SEQ ID NO: 271749 - DNA, 565 bp, Unknown
  Bacterial polypeptide expressing nucleotide sequence isolated from the Sargasso Sea
tatgtggcaagagatcatctatcccgtcgcgttcgtgctgctggtgctgctgccggcgcctctgcttggcaactacctgtatcgggtatttgaaggcaagagtcgctggctggccccgcttgagcgcgccaccctggcctgctgcggcacggacgggcgcgagcaggactggaagtcctacgccctcagcctgctggccttcaacggcgccggcttcggcctgctgttcctgatcctgctggcgcaggggctgctgcccctcaacccgcagcagctgcccgggctgaactggcaactcgccttcaacaccgcggtcagcttcatgaccaacaccaactggcaggcctactccggcgaagccagcctctcctacttcagccagatggtggggctcaccacccagaacttcgtctccgccgccaccggcgctgccgtcgccatcgccctgtttcgcggcatcgcccgccagcagaccacccacctcggcaacttctggcaggatctggtgcgtttctgtctctacgtgctgctgccgatggcgctgatcctggcgctgctgctggtc

SEQ ID NO: 271750 - DNA, 1682 bp, Unknown
  Bacterial polypeptide expressing nucleotide sequence isolated from the Sargasso Sea
aatgaactcgaacaatgtcctgcaagcgggccttttcatcgtcgtgctgctggcagccgcggtgccgatgtcccgctacctgagcaatgtgatggacggcagctcgcgcgtggttcgcctgggcggcccgctcgagcgcctgctgtatcgcatcgcgggcgtcgatccgtcggcggagatgggctggaagcattacgcgatcgccacgatcgcgttcaatgcgctcggcgcgctgttcctttacgtgctgctgcgcgtgcaaggctggctgccgggcaatccgcagcagtttggtccgatgacggtggacggcgccttcaatacggccgtcagcttcgtgaccaatacgaactggcaggattacacgcctgagcagaccgttggctatttgacgcagatgctcggcttcaccgtccagaacttcttctcggccgccaccggcattgtggtggtgatcgcgctgattcgcggatttgcgcgtcacaccgcgcaaaccatcggcaacttctgggtcgatctgacgcgtgtgacgctttatgtgttgctgccgatgtcggcgatcatcgccgctgtgctgatgagccagggtgtgatccagaacttcaaggcgtatcaggacgtgccgacgctgcaaaccaccacctacgccgcaccgaagctcgatgcacaaggcaatccggtgaaggacgcgaagggcaatccggtcacggtcgacacgccggtgaagacgcaaaccatcgcgatgggcccggtggcttctcaggaagcgatcaagatgctcggcaccaacggtggcggcttctttaacggcaactcggcgcatccgtacgaaaacccgacgccgttctcgaacttcctgcagatcttctcgattctgatcattccggcggcattggcgctggtgttcgggcgcatgatcgcggaccgcaaacagggcgtcgccgttctcgccgcgatgacgattgcgtttgccgtctgcgtggtcggcgaaatcagcgccgagcaaagcggtaatccggccttcaccgcgttgaacgtggaccaatcggcgaatgcgttgcagtcgggcggtaatacggagggcaaggaaacgcgcttcggtatcgcgcagtcgggcatcttcacggtggcgaccacggcggcttcgtgcggcgcggtggcgaatacgcacgactcgctcacgccgatcggcggactctatccgatgctgctgatgcaactcggcgaagtgatcttcggcggcgtgggttccggcatgtacggcatgctcgtgttcgccctgctggccgtgttcgtggcgggcctgatgatcggccgcacgcctgaatacgtcggcaagaagatcgaagcgtacgagatgaagatggtgtcgatcgtggtgctgctcacgccgctgctggtgctcgtgggcacatcgatcgcggtgctgtccgaggcgggcaaggctggtattgccaaccctggtgcgcacggcttctccgaaattctctacgcattcagctcggccgcgaataacaacggcagcgcgtttgcgggcctgacggtgagcacgccgttctataactggctcacggctatcgcgatgtggttcggccgcttcggcacgatcatcccggtgctggcgattgccggttcgctggctgcgaagaagcgtatcggtgtgaccggcggcacgttgccca

SEQ ID NO: 271751 - DNA, 1114 bp, Unknown
  Bacterial polypeptide expressing nucleotide sequence isolated from the Sargasso Sea
ccgtcaggcatcgcaattcgtgccggcgccgggtttgaccgaagaagcgctggcggatgccgcccagctttcgtcgctcgccgacgaaacgccggaaggccgcagcatcgtcgtgctggcgaagcagcgcttcaatatccgtcaacgcgatatggcctcgctgaaagcggaattcctcgccttcacggcacaaacacggatgagcggtgtggacctgctgggccgtgagatccgcaagggcgcggccgacgcagtgaagaactacgtcgaagcgaatggcggccgtttcccgaacgaagtcagcacggccgtggccgaagtcgcacgccgcggcagcacgccgttggtggtcgccgagaaaggcgagcagggcgcacgcgtgctcggcgtgatcgaactgaaggacgtggtgaagggcggtatcaaggagcgcttcgccgaactgcgcaagatgggtatcaagaccatcatggtgacgggcgacaaccgtctcacggccgcggcgattgcagccgaagcaggcgtggacgatttcctcgccgaagccaccccggaagcaaagctcgccacgatccgttcgcaccaggccgagggtcgtctggtggcgatgaccggcgacggcaccaacgacgcccccgcgcttgcgcaggcggacgtggcggtggcgatgaacaccggtacgcaggccgcgaaagaagccggcaacatggtcgacctcgattcgaatccgaccaagctgatcgagatcgtcgagatcggcaagcagatgctgatgacgcgcggctcgctcaccacgttctcgatcgccaacgacgtcgccaagtacttcgcgatcatcccggcggcgttcgccaccacctatccggcgctgaatgcgctgaacgtgatgcatctggccacgccggcctcggcgatcatgtcggcggtgattttcaatgcgctgatcatcgtgctgctgattccgctggcgctcaagggcgtgaaataccgggcgctgggcgcggcgattctgttgcgccgcaatctgctggtctacggtctgggcgggatcatcgtgccgttcatcggcatcaagctgatcgatatggtgctggccgcgttcggctgggtttga

SEQ ID NO: 271752 - DNA, 678 bp, Unknown
  Bacterial polypeptide expressing nucleotide sequence isolated from the Sargasso Sea
aatgaacctcaacaacctggttcagcccggcgttttcatcgtcgtgctgattgcgctcgccataccgctcggccgttatatgaccggcgtggtggacggttcctcggtggtcgtgcgccggttcgggcggccgatcgaaaccgcgttctacaagctcgccggggtcgaccccagcgccgaaatgtcgtggaagcgctatgcgctggccgtgctggcgttcaataccctcggggtgggcgcggtgtacggatttctgcgtctgcagcaatggctgcctgcaaacccgcaaggcttcggaccgatgacacccgacgccgccttcaacaccgcagtcagcttcgtgaccaacacgaactggcaggactacacgccggaatcgactgtcagctatctgacgcaaatggctgcgctgacggtgcaaaacttcctttcggccgccaccggcattgctgtcgtggtcgcgctgattcggggtttcgcgcgccatacgacggcgacgatcggcaatttctgggtcgatctgacacgtatcacgctgtatatcctcgcgccgctcgctacggtgattgcgcttgtcctgatcagccagggcgtgattcagaacttcaagtcgtacgaagatgtgccgacactgcaggtgacgacgtatcaaacaccgaagaccgacgcccagggcaa

SEQ ID NO: 271753 - DNA, 622 bp, Unknown
  Bacterial polypeptide expressing nucleotide sequence isolated from the Sargasso Sea
gatgggcggcttcgttccgctcctgttgatcgagctcggcgaggtgatcttcgggggcgtcggctcgggtctctacggcatgctcgtgttcgcgttgcttgcggtgttcgtggccggtctgatgatcggacgaacgccggaatacatcggcaagaagatcgagtcgtacgagatgaagatggtgtcgattgccgtgctgctcacgccgctgctcgtgctggtcggtgcatcgatcgccgtgctgacggcagccggcgtggcgggcatcgccaatcccgggccccatggcttctccgagattctctacgcctacagttcggccgccaataacaacggcagcgcgttcgccggcctctcggtcaatacgccgttctacaacagcacgctggccttcgtcatgtggttcggccgcttcggctcgattgtgccggtgctggcgatcgccgggtcgctggctgccaagaaacgcatctccgccaccgccggcacgctgccgacgcacggcccgctgttcgtggtgctgctgctcggcacggtggtgctggtcggcgcactcacgtacgtgccggcgctggcgctcggccctgtggttgaacatctgatcatggtcgcgggacattga

SEQ ID NO: 271754 - DNA, 646 bp, Unknown
  Bacterial polypeptide expressing nucleotide sequence isolated from the Sargasso Sea
atgcaacaatttgaagtttatagaattggtcctgaaattaatttaggatctataaacctttcttttacaaatgctagtctttttatgttaataagtgcaactgcaattttgattctactatttgttggtacaaaaaaaaaattgttggttccttctaaaattcaactgattactgaaatgagttattcgtttgttgcaaaaatgataaatgataccgccggatcaagcgcaaaacctttttttccatttatttttactttatttatgtttgtattattttgcaatatggttggaatgcttccatattcgtttacagttacaagtcatataattattactttcattttagcggcaattatttttattggagttacgataataggatttatgaaacacggtataaaatatcttgaactttttgttccaaaaggtgtgcctattgcgcttttaccgctaataataattattgaaataatttcttatttgagcaggcccataagtttatctgttagattgtttgcaaatatgatggctggacatacaatgttaaaagtatttggtgggtttgtaataagccttggattgctgggtggttggctgccacttggtttttctgtcgcattaacaggacttgaaatactagtaa

SEQ ID NO: 271755 - DNA, 721 bp, Unknown
  Bacterial polypeptide expressing nucleotide sequence isolated from the Sargasso Sea
atgtcccaattcgatgtttatagaattggacctgaaattaaagttggaacattcgatatatcgtttactaacgcaagtttatttatgattttaagtactgtatctattttattaatctttaatttagggtcaaaaaaaaattcaatactaccaaacaaaattcaattattggcagaacttagctatacttttgtgtccaaaatgataagcgatacagcaggatcaaaagctaaaccttactttgcgtttatattttctctattcatgttcgtattgttttgcaacatgtttggtatgataccttatactttcactgtaaccagtcatataattgtaacatttgtgcttgcttcatttatatttattggggtaactgtcattggttttattaaacatggatttagatatttaaaattatttgttccaagtggagtgcctgcagttttacttccattaatagtgataatagaaatcatatcttatttaagtagaccaataagtttatcggttagattgtttgctaatatgatggctggtcatactatgatgaaagttttcggaggcttcgtaattagtcttggaatagttggtggatggcttccactaagtttttcggttgcattaacaggtttggagatcttagttgcttttcttcaagcttatgtttttgcaatcttaacctgcatctatttaaatgatgcattaaatttacaccattaac

SEQ ID NO: 271756 - DNA, 721 bp, Unknown
  Bacterial polypeptide expressing nucleotide sequence isolated from the Sargasso Sea
aatgacacaattcgaagtctatagaattggtcctgaaattaaagtaggtgcttttgacatttcatttacaaacgccagtttgtttatggtcataagttcgctagctattttgattatatttaatctcggatcaaaaaaaaattcattgctaccaaacaaaattcagttgttagctgaattaagttatacatttgtttcaaaaatgattagtgatacggcaggctctaaagctaaaccttatttttcttttatattctctttatttatgtttgtccttttttgtaacatgtttggcatgattccctacacctttacagtcacaagtcatattattgttacctttgttttagcagcttttatttttatcggtgtaacaataattggttttataaaacatggtataggctatcttaaattatttgtaccgagtggggttcctatagtgctattaccattaattgtagttattgagattatctcatatttaagtagacctatcagtttatccgtcaggctctttgctaacatgatggcgggtcacacaatgatgaaagtattcggaggctttgtaataagtcttggggtagtcggtggatggcttccactgagtttttcggttgctttaactggcctggagatattggttgcttttcttcaagcttatgtttttgcaattttaacctgcatctatttgaatgatgcattaaacttacaccattaa

SEQ ID NO: 271757 - DNA, 733 bp, Unknown
  Bacterial polypeptide expressing nucleotide sequence isolated from the Sargasso Sea
catggcaaatcttaaagagattagagatcgaatcgtttccgttaaaaatacaagaaaaataacggaggctatgagacttgttgcagctgcaaaagttaggagagctcaagatcaagttcttaagagtagaccttttgcagataaacttgcacgagtcttagaaaatattcaatctagagtacaatttgaggctgtagactctcctctattatccaagagagaagtaaaaagtatctccttagtttgtataactgcggatagaggcttatgcggtggttacaatacaaatattataaaaaaggtagaaataaggtacgcagaattagttaaaaaagggtatcagccaagcttaattttggtagggaagaaagctattggatattttcaaaatagaaaggacagatatgtaattaaaagtactttcaaagaactagaacaggtacccacactcaaggattctgaaggagttacaaatgagattttagccgaatttctttcagaaaattctgatagggtggaaattatttacacgaaattcatcactttagttagctgtgcccctgtggttcaaacactattgccacttgaccctcaaggaattgctgaggaaaacgatgaaatttttaggttgactacaaaagatagtaagttacttgttgaaaaatcaaatattgaaaaaagtgattcagagaagttgccatcagatattgtttttgaacgaaagtcctcgatc

SEQ ID NO: 271758 - DNA, 370 bp, Unknown
  Bacterial polypeptide expressing nucleotide sequence isolated from the Sargasso Sea
atcatttatatttatgggagtaacagtaattgggtttattaaacatggatttgggtatttaaagttatttgtcccaagtggagtaccagctgttctacttccgttaattgttgtaattgagattatttcttatttaagtagaccaataagtttatcagtaagattatttgctaatatgatggctggacacacaatgatgaaagttttcggaggctttgtaattagtcttggaatagttggtggatggcttccactaagtttttcggttgcattaacgggtttggagatcttagttgcttttcttcaagcttatgtttttgcaatcttaacctgcatctatttaaatgatgcattaaatttacaccattaa

SEQ ID NO: 271759 - DNA, 721 bp, Unknown
  Bacterial polypeptide expressing nucleotide sequence isolated from the Sargasso Sea
atgtcccaattcgacgtttatagaattggaccagaaattaaagttggagcattcgacatatcatttacgaacgcaagtttatttatgattttaagcactgtatctattttgttagtatttaatttaggatcaaaaaaaaattcaatattaccaaacaaaattcaattattagcagaacttagctatacctttgtatccaaaatgataagtgataccgcaggatcaaaagcaaaaccttactttgcatttattttttctctatttatgtttgtattgttttgcaacatgtttggaatgataccttatacctttactgtaactagtcatatcattgtaacatttatgcttgcagcatttatatttattggagtgactgtaattgggtttattaaacatggatttgggtatttaaaattatttgttccaagtggagtaccggctgttctacttccgttaattgtagtaatagagattatttcttatttaagtagaccaataagtttatcagttagattatttgctaatatgatggctggacacacaatgatgaaagttttcggaggctttgtaataagtcttggaatagttggtggatggcttccactaagtttttcggttgcattaacgggtttggagatcttagttgcttttcttcaagcttatgtttttgcaatcttaacctgcatctatttaaatgatgcattaaatttacaccattaat

SEQ ID NO: 271760 - DNA, 895 bp, Unknown
  Bacterial polypeptide expressing nucleotide sequence isolated from the Sargasso Sea
acgcccctgccacgaattttctggtggatggcggatgcgggtggcacttgctgcggtactgttctcacagcccgatctgttgttgctggatgagccgaccaactatctcgatcttgagggtacggtctggctggagaattttctggcaaaatatgcgcgcactgtattggttatttcgcacgaccgcgaattgctcaacaaatctgtcacgtctattttgcatctaaccgatctgaaactgcagtattacacaggaacatatgatcagtttgacgccgaacgccgactgaagcaggaacaacagcaatcaatgaagcgcaagcaggatgcccagcgtgcgcatattcagagctttgtcgacagatttcggtataaggcttcgaaagcgcgacaggcgcaatcccgcctcaaacagctggagaaaatgcagccaattgtcgccctctcagaaaatgcagttgcgtcctttaccttccccacaccacagccattgccgccccctctgatgacgcttgaacagggcagtgtcggttatgatggcaagccggttttgcgcggtcttgatctgcgtcttgatcaggatgacaggatcgcgctgcttggtgccaatggcgaaggcaagtcaacattgtcaaaattgcttgctgacaggctgcccctgattgacggcagtgttgccaaatccagcaagctgcgagttggtttctttgcacagcatcaacttgacgagctggttcccggtgagacgcctctgtggcacatgatgcggctccgcccggcggaagtgccgacaaagatcagagcgggtctcggggcggcaggcattggagcggatattgttgaaaaccctgtcgaacggctctcgggtggtcagaaggcgcgcctattgatggcg

SEQ ID NO: 271761 - DNA, 370 bp, Unknown
  Bacterial polypeptide expressing nucleotide sequence isolated from the Sargasso Sea
agcctttatttttataggcgtgactattattggtttcttaaaacatggcttaggatacttaaaactttttgtgcctagtggtgtaccaatcattcttttacctttaatagttgttatagagataatttcatacctaagcagaccaattagtttatcagttagattatttgctaatatgatggctggtcacacaatgatgaaggtcttcggaggttttgtagtaagtcttggtttagtgggaggttggcttccattaggcttttctgttgcattaacaggtttggaaatattagttgctttccttcaagcttatgtttttgcaattttaacatgtatctatttaaatgatgcattaaatttacaccattaa

SEQ ID NO: 271762 - DNA, 325 bp, Unknown
  Bacterial polypeptide expressing nucleotide sequence isolated from the Sargasso Sea
tggttttggttatttaaaattatttgtaccaagtggggtaccagttgttttattgcctttaattgttgttattgaaatcatttcatatttaagtagaccaataagcctatcagtccgtctttttgcaaatatgatggcaggtcatacgatgatgaaagttttcggaggctttgtaataagtcttggaatagttggtggatggcttccactgagtttttcagttgcacttactggcttggagatactagttgcttttcttcaagcatatgtgtttgcaattttaacatgcatttatttaaatgatgcattaaatttacaccattaa

SEQ ID NO: 271763 - DNA, 572 bp, Unknown
  Bacterial polypeptide expressing nucleotide sequence isolated from the Sargasso Sea
tatggcagcaaatccaatgacacaattcgaggtttatcgaattggacctgaaattaaagttggtgcatttgatatctcatttactaattcaagtttatttatggttgtcagcacacttgcaatcctaattatctttaatttgggttcaaaaaaaaattctctactaccaaataagctgcagctattatctgagttaagttataccttcgtctctaaaatgattagcgataccgcaggatcgaaagcaagaccttactttgcctttatattttctttgtttatgttcgtgttattctgcaatatgttcgggatgataccatatacttttactgtaactagccacataatagtgacttttgtgttagctgcatttattttcattggtgtaacaattgttgggtttattaaacatggttttggatatcttaaattatttgtaccaagtggtgtaccagttgtgctactaccattaattgttattattgaaataatttcttatttaagtagaccagtgagtttatcagtaagactatttgcaaacatgatggctggtcatactatgatgaaagtct

SEQ ID NO: 271764 - DNA, 325 bp, Unknown
  Bacterial polypeptide expressing nucleotide sequence isolated from the Sargasso Sea
ctcacagtttgcatctgatctagatgacgcaacaaaagaacaacttgagcacggtaagcgaattacagagcttcttaaacaaaaacaatattctccaatgagtgttgctgatcaagctatgagtttatatgcagcagataaaggatatatgaaagatgttgatatagataaagtgggcgacttcgaatcagctttattagcttattttgaatcagaaaaacctgatctaaaaaaccaaattaatgataccggagactgggatgacgatattgaaaaccagtttaaggaattagttgaagactttaagaaaacacaaacatattaa

SEQ ID NO: 271765 - DNA, 148 bp, Unknown
  Bacterial polypeptide expressing nucleotide sequence isolated from the Sargasso Sea
tatgagcaaaggaataatcacacaagttattggagcggtagtagacgtgaaatttgatggtgaactaccagaaattttaacagcattggaatgtaaaaatggtgataacagactagttttagaggtagcacaacacttaggtgagact

SEQ ID NO: 271766 - DNA, 721 bp, Unknown
  Bacterial polypeptide expressing nucleotide sequence isolated from the Sargasso Sea
aatgcaccaattcaatgtttatagaattggaccagaaataaaaatagatcagatagatatttcatttactaatgcaagtttatttatggtgataagctccttgataattttaatttttttcaatttaggatctgtcaagaaaaatatcatacctaataaaatacaattacttgctgagcttagctactctttcatttcaaagatgataagtgatacagctggttcaaaaggaaagccatattttgggtttatcttttcactatttatgtttgtactattttgcaacatgttaggaatgttaccttatgcttttacagtaaccagtcacataatagttacttttgtactggcagcgtttatatttattggagtaactgtaataggttttataaaacatggtcttggttatttgaaattatttgtaccaagtggggttccgattgttttattgcctttaattgtagtcatagaagttatttcgtatcttagtagaccaataagtctttctgtaagactttttgcaaacatgatggctggtcatacaatgatgaaggtttttgggggttttgttataagcctcggattagttggtgggtggcttccactaggtttttcagttgcattaactggtttggagatattagttgcttttcttcaagcatatgtatttgcaattttaacatgcatatatttaaatgatgcattaaatttacaccgttaa

SEQ ID NO: 271767 - DNA, 82 bp, Unknown
  Bacterial polypeptide expressing nucleotide sequence isolated from the Sargasso Sea
atgtattttatcttctatagtagattacttgaaagagcagctaaattaagtgacgaacatggaggtggatcacttactgcac

SEQ ID NO: 271768 - DNA, 565 bp, Unknown
  Bacterial polypeptide expressing nucleotide sequence isolated from the Sargasso Sea
aaaattccagttgatgtcagaaatgttatacaattttatttccaaaatgattagtgatactgctggaaagaaagctaagccttacttttcatttatatttagtctttttatttttgtcttattttgcaacatggtagggatgctaccctactcttttacagtaacaagccacattattgttacactagcttttgcaatatttatttttattggagttactattttgggttttgtaatacatggttttaaatatcttaaaatttttgtgccaagtggtgttcccatggttctgttgccaataataacgataattgaaattatatcttatttaagtagaccagtaagtctatctgtaagattatttgcaaacatgatggctggtcatacaatgttgaaggtttttgggggatttgtaattagccttggtttggtcgctggatggcttccacttactttttcagttgctttaactggtttagaaattttagtagcatttttacaagcttacgtatttgcgattttaacatgcatttatttaaatgacgctttaaatttacatcactaa

SEQ ID NO: 271769 - DNA, 760 bp, Unknown
  Bacterial polypeptide expressing nucleotide sequence isolated from the Sargasso Sea
gtgataggtttgattggtgaaagagggcgtgaagtcaaagagtttgtggaaaatacgctgggcgaagaaggcatgaccagggcgatagtagttgccgcgcccgctgatcagtcgcctctattgcgaatcagatcgacgcatttagcccatctctatgcagaacattacagagctcagggtaaagatgtgttgttgctagtcgacagtttgactcgagttgctcacgctcagcgtgaaataggtttagcggttggcgaaccacctactgcgaagggatatccgccctcagtatttagtttattgcccaatctcatagagagaacgggtactggtagagcagatgaaggctccatcaccgcaatttacacgttcttggcagagggtgatgatctaaatgaccccattgttgatttggcgagagcgtcgttagatggacaggtggtgttgtctagagatcttgcggatgcggctcattatccggcaattgacttggcaggttcgatctcacgattaatgccgatcatagtcgaaaatgaaaatctatctttggcaaatcggttccgccggctttggacgctctaccaacaaaatcaggacctgattcaggtaggcgcttatagcgcagggacaaatagagacatagatcgcgcaatcgaattgagagacctgatggagggctttttaagacagcctatgaacgaacgagcaagcctggaggaatcttttgctggcttagtggaatttatagagagtgagtagg

SEQ ID NO: 271770 - DNA, 520 bp, Unknown
  Bacterial polypeptide expressing nucleotide sequence isolated from the Sargasso Sea
aatgattagtgatacagcgggctctaaagctaaaccatacttttcttttatattttctttatttatgtttgtccttttttgtaacatgtttggcatgattccttacacctttacagttacaagtcatattattgttacttttgtattagcagcttttatttttatcggtgtgacaataattggttttataaaacatggtgtaggctatcttaaattatttgtgccaagtggagttcctatagtgctattaccattaattgtagttattgagattatctcatatttaagtagacctattagtttatccgtcaggctctttgctaacatgatggcgggtcatacaatgatgaaagtattcggaggctttgtaataagtcttggggtagtcggtggatggcttccactgagtttttcggttgctttaacaggcctggagatattagttgcttttcttcaagcatatgtttttgcaattttaacctgcatctatttaaatgatgcattaaacttacaccattaa

SEQ ID NO: 271771 - DNA, 445 bp, Unknown
  Bacterial polypeptide expressing nucleotide sequence isolated from the Sargasso Sea
tatggataatttaaatccttcagaaataagtcaaataataaaagaaagaattaataatttagagtcttcaacacaagagtccaacgagggaactatcgtatttttatccgatggtatcgcgaggatccatgggttgagcgaggtaatgtatggtgagttaatagaattcgaaggcggaatcacgggaatggctttaaaccttgaaagagattctgtcggagtagttatttttggagactacaaaaaattagctgaaggggatactgctaaatgcacaggcaagatccttgaagttccggttgggccagaacttattggcagagtcgtagatgctttaggaaacccgatagatggcaaaggtccaatggactgttcgagcacttccccaatagaaaaagttgctcctggagtaatgacgagaaagccagtcgatcaaccagtccag

SEQ ID NO: 271772 - DNA, 379 bp, Unknown
  Bacterial polypeptide expressing nucleotide sequence isolated from the Sargasso Sea
aacttttgcaatgtttatttttgtaggagttacaatcctaggatttattacacatggttttaaatatttaaaaatattcgtacctagtggggtcccgatagtattattgcccatcataagtattatagaaataatttcttacttaagtagaccggttagtttatcggtgagattatttgcaaatatgatggctggacacacaatgcttaaggtttttggtggatttgttgtaagcctgggtctgatcggaggttggttaccgttgagtttctctgtagctctaacaggtttagaaattttggtagcatttttacaagcatatgtatttgcaattttaacatgtatttatttaaacgacgcattgaatttacatcactaa

SEQ ID NO: 271773 - DNA, 424 bp, Unknown
  Bacterial polypeptide expressing nucleotide sequence isolated from the Sargasso Sea
gttgccctactcatttactgtcacaagtcatataattgttacattgacatttgcaatttttattttccttggggtaacaatactgggcttcattattcatggttttaaatatttaaaaatattcgttccaagtggcgttccaatagttttattaccgattatatcgattattgaaataatatcatacttaagtagaccggttagcttgtccgtaagattattcgctaatatgatggctggtcacacaatgttgaaggtttttggaagctttgtgatcagtttaggactaataggaggatggttgcccttaagtttttctgttgctctaaccggtttggaaatattagtagcttttttacaagcttatgtttttgcaattttaacatgcatttacctaaacgatgcattaaatttacatcactaa

SEQ ID NO: 271774 - DNA, 862 bp, Unknown
  Bacterial polypeptide expressing nucleotide sequence isolated from the Sargasso Sea
gaggcagaaaccgcgagggatcccacccgcatctccgagattcataaccgacttgccgacatagatgcccactcagcgccggcccgggcggcgacgatcttatccggcctgggcttcagtgacgaagcccagcaacgaccctgcagcgattattcgggcggctggcgcatgcgggtggcgctggcagccaccctttttctgcggccgacttttctcttgctcgacgaacctacgaaccatctggacctggaagcggtcatgtggctcgaatcccatctcgcacgctggcagggaagcattctgctggtcagccatgagcgcgggctcctcaaccgcgcagttcgcgaaattgttcacctggagaaccaaaaactcgttcgctacaccggcggctacgatgactttgagaggatgcgacgggaaaaactatcccagcaatcgaaaatgcaggcgcgacagatggccgagcgcaaacgcatccaggcattcatcgaccgctttcgttacaaaccgaccaaagcccgacaagcccagagccggatcaagctgttagaaaagatggagccgattgccagcgtcattgagggaacggccataagcttcgcgtttcccaatccggatcctttgtctccacccttgatctcactggaccaggcgaccgccggttatgatgacgtgaccgttttgcgcaatctcaacctccggattgatatggacgaccgcattgccctgttgggcgccaacggaaatggcaaatccacgctcatcaagttgctggcggacaaaatttcggctcagtccggtaaattgactaaatcgcgaaaacttaaaatcggctactttgcccagcaccaaacggaag

SEQ ID NO: 271775 - DNA, 440 bp, Unknown
  Bacterial polypeptide expressing nucleotide sequence isolated from the Sargasso Sea
taatatgtttggcatgatcccatacactttcactgttacaagccatataatagtgacatttgtactagcttcatttatttttattggggtaacagtaattggatttataaagcatggctttggttacctaaaattgtttgttccaagtggagtaccagttatactactccctttaatagtcgttatagaaattatatcatatttaagtagaccaattagtttatctgtaagactgtttgcaaatatgatggctggacatactatgatgaaagttttcggaggctttgtaataagcctcggaattgtcggtggatggcttccactgagtttttcggttgctttaacaggtttggagatcttagttgcttttcttcaagcatatgtttttgcaatcttaacctgcatctatttaaatgatgcattaaacttacaccattaaa

SEQ ID NO: 271776 - DNA, 502 bp, Unknown
  Bacterial polypeptide expressing nucleotide sequence isolated from the Sargasso Sea
tgggtcaaagcaaaaccctattttgcatttatattttctttatttatgttcgttttattttgtaacatgtttggaatgataccttatacattcacagtaactagtcatataatagttacgtttgttttagcggcatttatttttataggagtaacaattataggttttattaaacatggttttggttatttaaaacttttcgtaccaagtggagtacctattgttttgcttccactaattgtggttatagagattatctcatatttaagtagacctataagtttatcagttagacttttcgctaatatgatggcaggtcacacaatgatgaaagttttcggaggctttgttataagtcttggaatagtcggtggatggcttccactgagtttctcggttgcactaactggtttggagatattggttgcttttcttcaagcatatgtttttgcaattttaacatgtatctatttaaatgatgcattaaatttacaccattaac

SEQ ID NO: 271777 - DNA, 721 bp, Unknown
  Bacterial polypeptide expressing nucleotide sequence isolated from the Sargasso Sea
gatgacccaattcaatgtttatagaattggaccagaaattaaagtaggagcatttgatatatcgttcactaacgcaagtttgtttatgattataagtacattagcaattttaattatttttaatcttggatcaaaaaaaaattcactcttgccaaataaaattcaattactagctgagcttagttacacatttgtgtccaaaatgattagtgatacagcgggtttaaaagcaaaaccttattttgcatttatattttctctttttatgtttgtgcttttctgcaacatgttcggaatgataccttacactttcacagttactagtcatattatcgtaacatttgtattggctgcttttatttttattggggtaacagttattggatttatcaaacatggttttggctatttaaaattatttgttcctagtggagtgcccgcagtgctacttccgctaatagtcgtaatagaaattatttcttatttaagtagaccagtaagtttatcagttagattatttgctaacatgatggctggtcatacaatgatgaaagttttcggaggctttgtaataagtcttggaatagttggtggatggcttccactaagtttttcggttgcattaactggtttggagatactagttgcttttcttcaagcatatgtttttgcaatcttaacctgcatctatttaaatgatgcattaaatttacaccattaa

SEQ ID NO: 271778 - DNA, 284 bp, Unknown
  Bacterial polypeptide expressing nucleotide sequence isolated from the Sargasso Sea
aatagttttgttacctatcattagtattattgaaataatatcctatttgagccgaccagttagtttgtctgtaagattgtttgcgaatatgatggctggacacacaatgttaaaagtttttggtggatttgttattagtttgggtcttgtaggaggttggttgcctttaagtttttctgtagcgcttactggtttagaaattttagtagcctttttacaggcttatgtttttgcaattttaacatgcatatatttgaatgatgcattaaatttacatcactaac

SEQ ID NO: 271779 - DNA, 238 bp, Unknown
  Bacterial polypeptide expressing nucleotide sequence isolated from the Sargasso Sea
catggatataaacccatccgaaataactaaaattttaaaagaacaaataaaaaaccttggggacaaaaccgaagtttctgagattggtaaagttctgtctgttggagatggtatagcaagagtgtatggacttgataatgttcaggctggagaaatggttgagtttaaggatggttcaaaaggaatggcattaaatttagaaagtgacaatgttggaattgtaatttttggtgacgat

SEQ ID NO: 271780 - DNA, 670 bp, Unknown
  Bacterial polypeptide expressing nucleotide sequence isolated from the Sargasso Sea
ggcgcgcgacattaagcgtgccggcctgatcgtggtgacgacggacaaaggcctgtgtggtggcttgaacaccaacgtgctgcgtgccgtcaccacccaactgcgcgatctgcagaacaagggcgttgagacgcaaaccaccgccatcggtaccaagggtatgcagttccttggccgcgtcggtgccaaggtcgtctcgaatgtcgtgcatctgggcgacacgccgcatctggaaaagctgatcggtgcaatcaaggtgcagctggacgcgttcaacgcaggtcagatcgatgccgtgtacctggcgtacacccgcttcatcaacacgatgaagcaggagccggtggtcgagcagctgctgccgctgaccgccgacaagctcgcgcagagcgacgccgagaagcaggcctactcgtgggattacatctacgagccggacgcgcaaacggtggtcgacgagctgctgatccgctacgtcgaggcgctggtgtaccaggcggtggccgagaacatggcgtccgagcaatcggcccggatggtggcgatgaaggcggcttcggacaacgcgaagaacgtgatcggcgaactgcaactggtctacaacaagacccgtcaggcagcgatcacgaaggaactgtccgagatcgtcagcggcgcagctgcagtctga

SEQ ID NO: 271781 - DNA, 277 bp, Unknown
  Bacterial polypeptide expressing nucleotide sequence isolated from the Sargasso Sea
tctgcttccttaattgtagttattgagattatttcgtatttaagtagaccaattagtttatcagtaagattatttgctaatatgatggctggtcacacaatgatgaaggtatttggaggctttgttataagcttaggaattgtaggtggatggcttccacttagtttttcggttgcacttacaggtttagagatactagttgcttttcttcaagcatatgtatttgcaattttaacatgcatttatttaaatgatgcattaaatctacaccattaat

SEQ ID NO: 271782 - DNA, 235 bp, Unknown
  Bacterial polypeptide expressing nucleotide sequence isolated from the Sargasso Sea
gatttaaaaaaaagaatttcaactgttaaatctacacaaaaaattaccaaagccatgaaaataattgcaacagcaaaattaagaagacctcaagaaaatgctgaaaaacgaagaccttattctgaaaaaatgaataatattattcttaatctttcaagccgaatatctgacaaagagaattctccccgacttcttactgtcactagagaagaaaaaactcacttgtgtgttgtta

SEQ ID NO: 271783 - DNA, 398 bp, Unknown
  Bacterial polypeptide expressing nucleotide sequence isolated from the Sargasso Sea
ggattacggcggcaaggtcgagctcgaggagatcggcaaggtgctcgcgattggtgacggcattgcgcgcgtccacggcctgcagcgcgtgcaggccggggagatggttgagttcgactcgggcctccgcggtatggcgctgaacctcgagaatgacaacgtcggcgtcgtcgtctttggtaacgatcgcgcgatcaaggagggagacacggtcaagcgtaccggcgcgattatcgacatccccgtcggcgagggcatgctcggccgcgtcgtcgatggcctcggtaagtctcttggcccgctacacacgactctccccgcacgcgcgcgcatgcggcgactcccccccccctcgctcctttttatccctcctcggcggcccctccccgccccttcct

SEQ ID NO: 271784 - DNA, 412 bp, Unknown
  Bacterial polypeptide expressing nucleotide sequence isolated from the Sargasso Sea
ttcacagttacaagtcatattattgtaactttaattatggctttatttatttttgttgcagttactattataggatttgccaaacatggctttaaatatttaagtatatttgttccaagcggtgttcctgcagtattattacctttgattacagtaattgagatcatctcatatttaagtagaccagtaagtttatcagtaagactatttgcaaacatgatggcgggacatactatgttaaaagtttttggtggatttgtcataagtttaggattactaggtggttggttaccacttagtttttcagtagcattaacaggtttggagattctcgtggcttttcttcaagcttatgtttttgcaatattaacctgcatctatttaaatgatgcattaaatttacatcattaat

SEQ ID NO: 271785 - DNA, 427 bp, Unknown
  Bacterial polypeptide expressing nucleotide sequence isolated from the Sargasso Sea
atgagcggactaaacccatctgaaatttcaagtgttctcaaggacaaaatttcagggcttgatctaaaggctgaaaccaaaaacgaaggaaccgttgtcaatgtttctgatggaattatcagaatacacggaatgggcgatgttatgtatggtgagctcgtagagtttgaaaatggtgtttttggacttgcacttaacttagagcaagactctgtcggtgttgttgtccttggtgattaccttgggctaagtgaagggcaaaaagttacatgtacaggtaagatcttagaggttcctgttggtgaggaaatgctcgggcgagttgtagacgctctaggaaatccaattgatggaaagggtgaacttaaaagaaaacaaactgcccctattgaagtagttgcgcccaggggttatgccagacaatcag

SEQ ID NO: 271786 - DNA, 158 bp, Unknown
  Bacterial polypeptide expressing nucleotide sequence isolated from the Sargasso Sea
ctctccaggtaagttagttgatttagagtctacgataaaaggatttgatgcgatttgtaaaggcgattacgatcatttacctgaggctgcgttttatatggttggctctatagaggaagtagtcgaaaaagcagacaaactttctaaagataattaaa

SEQ ID NO: 271787 - DNA, 688 bp, Unknown
  Bacterial polypeptide expressing nucleotide sequence isolated from the Sargasso Sea
tctgatcagcctccgcttctcaggatgcgaggagcttacgtggccacttcaatagctgaatattttcgaagcgaaaaaaaagatgtcctgctctccatggattctcttaccagatttgccatggcacagcgcgaaataggactggccgcgggagaacctccaacaacaaaaggctttcctccgtccgtctttgccttgctaccaggtttactggagagaactggcacacatgacggtgaaggctcaattacaggattttacacagtacttgtagagggagatgacgcaaatgaccctatagcggacgctattcgagcaattgttgatggccatatctttctaagccgtgatattgcagaaaaaggcatttttccagcaattgatttactggcatcaacaagtagggttatggttgacgttgtagatcaaaaacacctagatttaaacctgataatgcgacgtactctggctacataccgcgaagcggaagacctgattaatattggagcttatgtccagggaagtaatcctgagatagactatgcaataacaaaaaatccgttgattcatgaattcgttcagcagggtatgaatgaacagacttcattaaatgtttgtaaagagcgtcttcagaatatttttggcgacagaatagaagaaaaatctattgaagatgttagttcataag

SEQ ID NO: 271788 - DNA, 184 bp, Unknown
  Bacterial polypeptide expressing nucleotide sequence isolated from the Sargasso Sea
tatgagtaccggcaacattgttgaaattatcggcgcggtggtcgatgttgagttcccgcgcggcgcggtgccccgggtctacgacgcgctgacggtcagcgaaaacggcctgacccttgaggtccagcagcaactcggtgacggggtggtccgcagtatcgccatgggttccagcgatgactca

SEQ ID NO: 271789 - DNA, 526 bp, Unknown
  Bacterial polypeptide expressing nucleotide sequence isolated from the Sargasso Sea
ttgcggatatcaattccgaggactgcaccatcccgtgcagcgcgtattctagccggcctaggttttgatgagcatgctcaacagcgaccgtgttccgaatactctggcggttggcgcatgcgggtggctttagcggcaacgttgttcgcgaaccccgacttccttctcttggatgaacccaccaaccacctggacttggaagccgccctttggctagaaaactaccttctcaactggcccggcacaatgatggtgataagccatgaccgaacgctcttgaataaagtggtgacggaaatcattcatttagagaacctaaagctcagccgttacgctggtggctacgacagatttgaacgaaccagacgcgaacggcaagagttgaattcgaaaatgcgcgccaaacaggcggttcagaaacgacatatccaggcctttgtcgaccggttccgctacaaggcgtcaaaggcccgccaagcccaaagccgtcttaagatgttggagcgcatggagcccatcgcttctg

SEQ ID NO: 271790 - DNA, 181 bp, Unknown
  Bacterial polypeptide expressing nucleotide sequence isolated from the Sargasso Sea
atggaaattaaagctgcagaaatatcttctgtaattaaagaccaaatagctaattttgaaactaaagcggatgttgctgaggttggaacagtactaagtgttggagatggaattgcacgtgtatatggtcttgatcaagtacaagctggagagatggtagaattcccaggcggcattaaag

SEQ ID NO: 271791 - DNA, 466 bp, Unknown
  Bacterial polypeptide expressing nucleotide sequence isolated from the Sargasso Sea
ctctatttatgtttgtttttattttgtaacatgtgttggaatgataccttacactttcactgtaaccagtcatatcattgtaacatttgtgctagcagcatttatatttattggagtgactgtaattgggtttattaaacatggatttgggtatttaaaattatttgttccaagtggagtgcctgcagtcttactccctttaattgttgttatagaaattatttcttatttaagtagacctataagtttatcagttagattatttgccaatatgatggctggtcatacaatgatgaaagttttcggaggctttgtaattagccttggaatagttggtgggtggcttccactaagtttttcggttgcgttaactggtttggagatcttagttgcttttcttcaagcttatgtttttgcaatcttaacctgcatctatttaaatgatgcattaaatttacaccattaa

SEQ ID NO: 271792 - DNA, 893 bp, Unknown
  Bacterial polypeptide expressing nucleotide sequence isolated from the Sargasso Sea
tttggtctcatccatgctaaaaattcaaaatttatccttttccatccagggcaaaccgctttttgaaaacgcctctgcggttattcctaccggacacaaggttggtattgttggacgaaatggcagcggcaaaacaaccctgtttcgcctgattcgaggcgagtgggaagtcgactcaggtgagattgagcatccaccgcatttccgcgttggtggggttgatcaagaagcccctgccagtaatgtcagcctattagacatggtaatgactgccgatgttgaacgtagtcatctgatggcccaagctgaaaccgcaacggaacctgaccgcattgctaaaattcacacacgtcttgccgatattgatgcctattcagctgagtctagagctgcttcaattttatctggacttggttttaacgcctcggctcaagcaagggcttgtcatgaattttctggtggatggcgaatgcgtgtggcccttgcggcggttctgttttcccagccagatttgctgttgctcgacgagccaactaactatcttgacctggaaggtgtggtttggcttgagtcatttttggccaaatataggcataccagtctggtgatttcccatgatcgaaagttattaaatcggtcagtggctggaatcctgcatttaaccaattataaactggcctattacgcaggcaactatgaccagtttgataccgaacgccgaatgaagctcgaacagcggcaatcaatggcgctcaaacaagaggcgcagcgcaaacatattcaatcctttgtcgaccgctttcgttacaaagcgtcaaaggcacgccaggcacaatcacgtttgaagcagttggaaaagatgcagcctattcttgcattgtctgaacaggctg

SEQ ID NO: 271793 - DNA, 943 bp, Unknown
  Bacterial polypeptide expressing nucleotide sequence isolated from the Sargasso Sea
agaagtaccaaaaacttttaaagttggttctgtatcacaagaagctccatcaactgaagaaacgttgttgcatactgttttatctgcggatattgaaagatcaaaacttttacacgaatctcaagttgaaaaagatccaaacaaaattgcagaaattcttactagattgtctgatattaatgcatactctgctgaagcaagagcttcctcaattttaaatgggttaggttttaacaaagatgatctgttaaaaccatgctctaatttttcaggtggttggagaatgcgtgttgcgcttgcaagtgttttgttttctaatccagaattacttttacttgatgaacctacgaactatctagattttgagggttctgtatggttagaaaattacttacaaaaatttaaaaatacagctttgataatttcgcatgataggaatttacttaataaatcagtaactagcatactacatttaacacaaaagaaattaattttttacaatggtaactatgatttttttgataatgaaagaagagttaaattagaacaaaaaatttctcaaaaaaataaacaagatgctcaaagagctcatctagagagctttgttaatcgttttaaagctaaagcatctaaggctaaacaggctcaatctagaattaaaattttagaaaaaatgaaacctattttaattgaagaaaaccagaaagttcctacattcaaatttgaaaaggttacaaaattttctccaccactagttactattgaacaggcgtatgttggatataataataatccaattttaaaaaatataaatttgagtatagacccagatgatcgaattggtcttttaggagttaatggagaaggaaaatctactttttctaaactgatagcaaaaaaaataaatttaatgaaaggaaagttaaattttcctataaattaa

SEQ ID NO: 271794 - DNA, 736 bp, Unknown
  Bacterial polypeptide expressing nucleotide sequence isolated from the Sargasso Sea
atggcatcaaatccaatgtatcaattcaatgtatatagaattggtccagaaataaagataggtgaagtagatttatcttttactaatgctagtctatttatggtaattagctctttggcagtattaattatatttaatttaggttcaaagaaaaattctttaataccaaacaaaattcaactgctcgctgaactcagttacacttttgtatccaaaatgataagtgatacagctggatctaaagctaagccttatttttcgttcattttttctttattcatgtttgtattattttgcaacatgtttgggatgataccttatgcattcacagtaactagtcatattattgttacttttgttttagcagcatttattttttttggtgttaccataattggttttattaaacatggatttgggtacttaaaactatttgtaccaagtggagttcctgttgttcttttaccattaatagtggtaattgaagtgatttcttatttaagtagacctgtaagcttatcagttagattgtttgctaacatgatggcgggtcatactatgatgaaagtattcggaggttttgttattagccttggaatagtcggcggatggttaccgcttggcttttcggtagctttaacaggtttggagatattagttgcttttctacaagcttatgtttttgcaatattaacctgcatctatttaaatgatgcattaaatttacaccattaac

SEQ ID NO: 271795 - DNA, 576 bp, Unknown
  Bacterial polypeptide expressing nucleotide sequence isolated from the Sargasso Sea
tatggcagcaaacccaatgcaccaattcactgtatacagaattggacctgaaataaacctaggtggagttgatatctcttttacaaacgccggattgtttatgttaataaatgtttttttaattttaggatttttatttttagcagccaaaaaaaaatccatggtaccatcaaaaattcaaatactttccgaattaacgtatacttttgttgcaaaaatgattaacgaaacagcgggatcaaaagctaaacctttttttccttttgtatttacgttatttatgtttgttctcttttgcaatatggttggaatgctaccatacgcttttactgttaccagtcatattatagtaacctttgttttagcaattgctatttttattggagtaacaattttaggttttgtaaaacacggaatgggatatttaaaactttttgtaccaagtggtgttccagtttttttactaccaataattattgtaattgaaataatatcatatttgagtaggccagtaagtttatctgttagactatttgctaatatgatggcgggacacacaatgcttaaagtttttgg

SEQ ID NO: 271796 - DNA, 640 bp, Unknown
  Bacterial polypeptide expressing nucleotide sequence isolated from the Sargasso Sea
atggcatcaaatccaatgtaccaattcaatgtatatagaattggcccagaaattaaaataggtgatgttgatttatcttttacgaacgcaagtttgtttatggtaattagttccttggcagtattaattatatttaatttgggttcaaaaaaaaattctttaataccaaataaaattcaactacttgctgagctaagttatacttttgtatccaaaatgataagtgataccgctggctctaaagctaaaccttatttttcattcatattttctttattcatgttcgtattattttgtaacatgtttggcatgattccttatgcatttactgtaacaagccatattattgttacttttgttttagcagcatttattttttttggtgttaccataataggttttattaaacatggatttgggtacttaaaactatttgtaccaagtggagttccagttgttcttttaccattaatagtggtaatagaagtgatttcttatttaagtagacctgtaagtttgtcagttagattgtttgctaacatgatggcaggtcatacaatgatgaaagtattcggaggttttgtaattagccttggaatagtcggcggatggttgccgcttggcttttcagtagctttaa

SEQ ID NO: 271797 - DNA, 790 bp, Unknown
  Bacterial polypeptide expressing nucleotide sequence isolated from the Sargasso Sea
gatattgaggccatcgttaaaattgcaaatgaagtaggagtgcccctcgttgtagacaatactctggcaactcccttcttgtcgcagccgtttgaatggggtgcagacctaattgttcattctacaacaaaatatctttccggacagggaaacgcgataggtggagtagtaatagactcgggtaaattcccatggctgggaaatcccaaatatccgagtttgagtgccccttctgtagaatataacggacttatctttgctgaaacattcggtgatcttgcatacacaatgtacagccacgctgtgagtttgcgcgatttgggttgtactcaatcacccatgaatgcctggataacacttaacggagtagaaacccttcccctgcggatggaaaggcattgttcaaacgggctggcagttgcagaatttcttgaaaaacatcaaaacgtggagtgggtttctcatgccggacttaaatccagtccctactataagctgggaaaaaaatattttccgaacggaacaggttctttgtttgcttttggagtgaaagggggttatgaaagcggattgaaactgctggagtcagtcgaattgttcagtcatgttgccaatcttggtgatactcgctctcttattctccatccggcctcaactactcatcgtcagctaacagaagaacagcgtattgctgcgagtgcgggtcccgaagtagttcgtctttcggttggaattgaatgtgctgaagatcttattgccgatctggaccaggctctaaataaattgtgat

SEQ ID NO: 271798 - DNA, 703 bp, Unknown
  Bacterial polypeptide expressing nucleotide sequence isolated from the Sargasso Sea
gttgttgtggctacttctgatcagcctcctcttctgagaatgcgaggagcttatgtggccacttcaattgctgaatattttcgtagtgaagggaaagatgttttactctctatggattctcttaccaggtttgctatggcacagcgcgagattggactagcagcgggagaaccaccaacaaccaaaggctttcctccttctgtctttgccttgctaccaagccttctggagagaacaggaactcatgaaggggcagggtcaattacaggattttatactgtgctagttgaaggtgatgacgcaaatgaccccattgccgatgcaattcgtgcaattgttgatggacatatatatctcagtcgtgatatcgcagaaaaaggtattttcccagcaattgacctactggcatcaacaagtcgggttatggttgacgtcgtagatcaagaacaccttgatctgaacatgattatgcgccgaactcttgcaacctatcgtgaagctgaagacctgatcaatattggggcttatgttcagggaagtaatcatgagatagactatgcaatcactaaaaaaactttgattcaggaattcgttcagcagaacatgaatgaacacacttcattagatgagtgtaaaaaaagacttaagcagatttttggagaaagactggaggaaaaaaaagctgaagaaaataattcctgag

SEQ ID NO: 271799 - DNA, 343 bp, Unknown
  Bacterial polypeptide expressing nucleotide sequence isolated from the Sargasso Sea
atgccgaacctcaagtcgctttcgctgcgcatcaagtcgatcaattcgactagcaagattaccaaggcgatgaagatggttgctgcatctaagctgggtaaggcagaaaggctcatgaaaggagcccgtccctttgtcgtcggcgctcagggctccctcctcgatatcctgacgccagcgccagaagacgagaagcccgcgacctcgttgctggttgcaatttcatcagacaagggcctctgcggtggtctcaactcgaagtgcgcaaaagaggtgcgcttcactcacatgcacgcaagcacagtgtatctcgcctcatttttgtctcgcttgcggccttgaa

SEQ ID NO: 271800 - DNA, 391 bp, Unknown
  Bacterial polypeptide expressing nucleotide sequence isolated from the Sargasso Sea
tattgttactttcggcttagcagttttatttttttagcagttactcttataggtatagtaaaacatggaataggttttttaaagttctttgtacctagtggtgttccttacgcactattaccaattttaatacctatagagataatttcttattttgttagacctattagcttgagtttgagactatttgccaatatgatggcagggcatactatgttaaaagtttttgcctcatttatagtattattgggttttataggtggctgggcaccattgttgctagtaataatacttactgggtttgaaattatgatagctgtgctgcaagcctatgtatttactatattatgttgtttatatttaaacgatgcattacacttacatcattaat

SEQ ID NO: 271801 - DNA, 376 bp, Unknown
  Bacterial polypeptide expressing nucleotide sequence isolated from the Sargasso Sea
tgttagcacgattgtttttgtaggagttacaattataggatttttaaaacatggattaaaatatctgggactttttgttccaaagggagtacctgtaatacttttacctttaatagtagttattgaaattatatcttatttaagtagaccggtaagcttatcagttagattgtttgctaacatgatggcaggacatacaatgttaaaagtattcggtggatttgtaataagcttgggattgctaggtggttggttaccacttggtttttctattgcattaacagggcttgagatactagttgcttttcttcaagcttatgtttttgcaattttaacatgcatttatttaaacgatgcattaaatttacaccattaa

SEQ ID NO: 271802 - DNA, 637 bp, Unknown
  Bacterial polypeptide expressing nucleotide sequence isolated from the Sargasso Sea
atgcatcaatttaaagtttatagaattgggcctgaaattaaattaggtaacgtagatttatcgtttactaatgctagtttgtttatgttgattagtgcattaacaatttgtttatttttatattttgggtctaaacaaaaaaatattataccagggagattacaacttattgcagagcttttttataattttatagcaaaaatgattagtgatacagctggatcaaaagctaaaccatattttccatttatatttactttgtttatgtttgttttgctttgtaacatgattggtatgctaccttactcatttacggtgactagccacattattgtgaccttagtgatggcattatttatattttttgctgtgacattaattggttttatcaaacatggtttcaaatatttatcaatatttgtaccaaaaggagttccgattgtcttattgcccttgattacaattattgaaattatttcctatttaagtagaccggtaagcctctcagtaagattatttgcaaatatgatggctggtcatacaatgttaaaagtttttggaagttttgttattagtttaggattattaggtggatggttaccacttagtttttctgttgcattaaccaggtttagaa

SEQ ID NO: 271803 - DNA, 303 bp, Unknown
  Bacterial polypeptide expressing nucleotide sequence isolated from the Sargasso Sea
ttgtcccaagtggagtgcctgcagtattgctccctttaattgttgtcatagaaattatttcttatttaagtaggcctataagtttatcagttagattatttgccaatatgatggctggtcatacaatgatgaaagttttcggaggctttgtaattagccttggaatagttggtgggtggcttccactaagtttttcggttgcgttaactggtttggagatcttagttgcttttcttcaagcttatgtttttgcaatcttaacctgcatctatttaaatgatgcattaaatttacaccattaat

SEQ ID NO: 271804 - DNA, 361 bp, Unknown
  Bacterial polypeptide expressing nucleotide sequence isolated from the Sargasso Sea
tttattggtgttacgatactcgggtttgtaatgcatggatttaaatatttaaaaatttttgtcccaagtggagttcctatagttttacttcctataataagtattatagaaataatttcgtatctaagtagacccataagcctatcagttagactttttgctaatatgatggctggacacacaatgttaaaagttttcggagggtttgtgattagtcttggtttagttggaggttggctccccttgagtttttcagtagctttaacaggtttagaaattttagttgcttttttacaagcttatgtatttgcaattttaacatgcatttatttaaatgatgcattgaatttacatcactaac

SEQ ID NO: 271805 - DNA, 820 bp, Unknown
  Bacterial polypeptide expressing nucleotide sequence isolated from the Sargasso Sea
atgggggcatgtaatacaatgaatgatagcgaaaagaaaattaaaaaaatacaagatatggctaaacgcatgagaaaaaaagtactagatatggcattgattgcgggtacaaatagttcacattttggtgggggtctttcaataattgatataaccgcaacactttacggagagataatgaatttagatcccaaaaacccaatatgggaaaatagagatagatttattttgagtaaaggtcatggtgtacttggatactatacggcattatctgaaattggatatatctctgaagaggatctaaaaacattcgaaaaagatggcacctatctttttggtcatccggttatgaaacgttctaaaggtattgaattttccaacgggagtctaggaatgggtttatctttgggcataggtgtagcactggcaggtaaaagaaataataaggactataacgtttatgtcttaatgggtgatggtgaatgcaatgaaggatctgtttgggaagcagcaatggccggtccacattacaaattagataacttggttgctatactagataaaaataatttgcagcaaacaggtaccaacagtgaaattatgagtgtcggtgatttatcttctaaatggaaaagttttggttggaaagtatttgaaattgatggacataatgtaactgagatttacaatacttttttaagtgcaaaagatttaaattgtccagttgcaattgttgccaatactatcaaaggtaagggctttactttcgcaaagaataataatgcttggcatcacgcaccattaagttcatcacaataga

SEQ ID NO: 271806 - DNA, 648 bp, Unknown
  Bacterial polypeptide expressing nucleotide sequence isolated from the Sargasso Sea
aatgcatcagtttgaaattaaaagattattagatatcaatattgcaggtttcgatatttcctttacaaattcagctttatttatgctgattgcggtctttattataagctttacaactattatttctgttcgaaaaaactcaataattccttcaagaatgcagtcaattgttgagttatcttacgaatttgttgcagatatggttagacaaaatgttggttctcaaggaaagaattatttcccctttatttttactttatttatgttcgtgctctttttgaatatgcttggaatgataccatatggttttactgttactagtcatatagccgttacatttgctttagcaatgttaatatttataggtgttactattatagggtttgttaagcatggtttagggttttttggtttctttgtacctaagggtgtcccaatttttatgcttccattattagttgtgattgaagtaatttcgtattttacaagaccgattagcctatctgtgagattatttgccaatatgatggcaggccacactatgttaaaagtattttctggatttgttattttaatggggtttttaggtggctggcttcccctagccgtcatggtagcattcacaggtttagaaattttaattgcatt

SEQ ID NO: 271807 - DNA, 421 bp, Unknown
  Bacterial polypeptide expressing nucleotide sequence isolated from the Sargasso Sea
tccttacacctttacagttacaagtcatattattgttacttttgtgttagcagcttttatttttattggtgtgacaataattggttttataaaacacggtattggctatcttaaattatttgtaccgagtggagttcctatagtgctattaccattaattgtagttattgagattatctcatatttaagtagacctatcagtttatccgtcaggctctttgctaacatgatggcgggtcacacaatgatgaaagtattcggaggctttgtaataagtcttggggtaatcggtggatggcttccactgagtttttcggttgctttaactggcctggagatattagttgcttttcttcaagcatatgtttttgcaattttaacctgcatctatttaaatgatgcattaaacttacaccattaa

SEQ ID NO: 271808 - DNA, 651 bp, Unknown
  Bacterial polypeptide expressing nucleotide sequence isolated from the Sargasso Sea
atgcaagtctatttatggcaataagtgctacattaattttatcattattgtttttcggaaccaaaaaaaaatcactaataccttccaaaatacaattggtaacagaaatgagctatacgtttgtagctaaaatgataaatgacactgctggttctagtgccaaatctttttttccttttgtttttactttattcatgttcgtattgttttgtaacatggttggaatgttaccctattcatttacggtaactagtcatattatcgttacattcatgcttgctgcagtagtatttataggtgtcacaattataggttttgcgaaacacggaattagatatttggaactttttgttccaaaaggagttccttttgttcttttgcctttaataattattattgagattatatcttatttatccaggccagttagtttatcggtaagactatttgcaaacatgatggccggacacaccatgctgaaagtatttggcgggtttgtaataagtttgggattgctgggtggatggttgccacttggtttttctgttgcattaacagggcttgaaatacttgttgcttttctgcaagcttatgtttttgcaattttaacatgcatttatttaaacgatgcattaaatttacatcactaac

SEQ ID NO: 271809 - DNA, 736 bp, Unknown
  Bacterial polypeptide expressing nucleotide sequence isolated from the Sargasso Sea
atggcatcaaatccaatgtaccaattcaatgtttacagaattggccctgaaataaaattgggagaaattgatttatcatttactaatgcaagtttatttatggttatcagttctttagctgttttaattatatttaatttgggttcaaaaaaaaattcactaataccaaataaaattcagctacttgctgaactcagttatacattcgtgtctaaaatgataagtgatactgctggttctaaagcaaaaccttatttttcatttatattttcattgtttatgtttgtattattttgcaacatgttcggcatgataccttatgcatttactgtaacgagccatattattgttacttttgttctggctgcatttattttttttggtgttactgtaattggttttattaaacatggatttgggtacttaaaactatttgtaccaagtggggttcctgttgttcttttaccattaatagtggtaattgaagttatttcttatttaagtagaccggtaagcttatcagtaagattatttgcaaatatgatggcaggtcacactatgatgaaagtattcggaggttttgtaataagccttggaatagtcggcggatggttaccgcttggcttttcagtagctttaacaggtttggagatattagttgcttttctacaagcttatgtttttgcaatattaacgtgcatctatttgaatgatgcattaaatttacaccattaac

SEQ ID NO: 271810 - DNA, 680 bp, Unknown
  Bacterial polypeptide expressing nucleotide sequence isolated from the Sargasso Sea
aatagcaggcatagatttgtcttttacaaatgctagtttgtttatggtgattagcgcaactttaattatattatttttatttttaggatctaaagaaaaaaaaattattcctgataaattgcaattgattgttgaaatgttttacacttttgtagtaaaaatgataagcgatactgctgggtcaaaggcaaagccttattttccatttatattcagtttatttatgtttgtgttattttgtaatatggttggaatgcttccatactcttttacggttacaagtcatattattgtaactttaattatggctttatttatattcatagctgtaacaataattggttttataaaacatggttttaaatacttaagtatatttgtgccaagcggagttccagctttgcttttacctataattattattatagaaattatttcatatcttagtagaccagtgagtttatcagtaagattgtttgcaaacatgatggcaggtcacacaatgttaaaggtttttgggggtttcgttgtaagtttgggaatattaggtggctggttaccacttggtttttcagtagcattaacagggctagagattcttgtagcttttctacaagcctatgtttttgcaatattaacctgcatctatttgaatgatgcattgaatttacaccattaaa

SEQ ID NO: 271811 - DNA, 566 bp, Unknown
  Bacterial polypeptide expressing nucleotide sequence isolated from the Sargasso Sea
aatggcatctaacccaatgtaccaatttaatgtttacaggattggtcctgaaataaaaataggcgaaattgatttatctttcacaaatgcaagtttgtttatggtaattagctctatagcaattctaatagtttttaatttaggatcaaaaaaaaattcattaattccaaataaaattcaattattggctgaattgagctattcttttgttgccaaaatgattaacgatactgcggggtctaaagcaaaaccatatttttcatttatattttctttatttatgttcgttttattttgtaacatgtttggcatgattccttatgcatttactgttacaagtcatataatcgtaacgtttgttttagcggcatttatttttattggagtaacagtaattggtttcataaaacatggtttaggatatttaaaactttttgttccaagtggtgtaccaataattcttttgccattaattgtagttattgagatcatttcctatttaagtagacctataagtttatcagtaagattatttgcaaacatgatggctggtcatacaatgatga

SEQ ID NO: 271812 - DNA, 281 bp, Unknown
  Bacterial polypeptide expressing nucleotide sequence isolated from the Sargasso Sea
ccaactagcacgtggtcaacgtctgcgtgaattactgaagcaaccacaaggttctcctctttcagtagcagagcaagttgcaatagtttacgccggtattaacggtctaattgatgacttagaagtttcacaaattaagacatttagtgcaaacttaatttcttacttaggttcatctaagccagagtacggttcgagtatcgcatcatcaggtaaatttgatgacgcagcagaagctactcttaaagctgctgtagaaacagttaaagcaggtctttaat

SEQ ID NO: 271813 - DNA, 577 bp, Unknown
  Bacterial polypeptide expressing nucleotide sequence isolated from the Sargasso Sea
atggcagcaaatccaatgactcaattcgaagtttatagaattggtcctgaaattaaaataggtacttttgacatatcttttacaaatgcaagtttgtttatggttgttagttgcgtagcgatcttatttatatttaatcttggctcaaaaaaaaaatcaatattacctaataagatccagcttttagcagaactcagctactctttcgtatcaaaaatgattaatgatactgcgggatctaaagcaaaaccctatttttcatttattttttcattattcatgtttgtacttttctgcaacatgtttggaatgattccttacactttcacagtaacaagtcacataatagtaacttttgttcttgctgcgtttatttttataggagtaactataattggttttattaaacatggttttggatatttaaagctttttgtaccaagtggcgttccaattattttacttccattaataattgttattgaaattatttcatatttaagtcgacctataagcttgtctgtaagactttttgcaaacatgatggcaggtcatactatgatgaaagttttcggag

SEQ ID NO: 271814 - DNA, 517 bp, Unknown
  Bacterial polypeptide expressing nucleotide sequence isolated from the Sargasso Sea
gattagtgatacagctggaagtaaagctaaaccatattttgcttttatattttcgctttttatgtttgtactattttgtaacatgtttggcatgataccttatgcatttacagtaaccagccacataattgttacttttgttttagcatcaattatttttattggtgttacggtaataggatttatgaaacatggatttggatatttgaaattatttgtgccaagcggagtgcctattgttttgttgccacttatagtggtaatagaaattatttcttatttaagtagacccatcagtttatctgtaaggcttttcgcaaatatgatggcaggtcatactatgatgaaagttttcggaggctttgtaataagtctcggaattgttggtggatggcttccactgagtttttcagttgccttaacaggtttggagatattggttgcttttcttcaagcttatgtttttgcaattttaacatgcatctatttaaatgatgcattaaatttacaccattaa

SEQ ID NO: 271815 - DNA, 172 bp, Unknown
  Bacterial polypeptide expressing nucleotide sequence isolated from the Sargasso Sea
atggcaaaaactaaatctggaaagattactcaggttattggagctgtagttgatgtaaagtttgaagaagatcttcctccaatattaaatgctcttgaagttgataataatggaacaaggcttgtacttgaaattgctcagcatcttggtgaaaatactgtcagatgcattg

SEQ ID NO: 271816 - DNA, 721 bp, Unknown
  Bacterial polypeptide expressing nucleotide sequence isolated from the Sargasso Sea
atgacacaattcgaagtttatagaattggtccagaaattaaaataggtacatttgacatttcttttacaaatgcaagtttatttatggttattagctctttagcaattttgattattttcaacttgggttcaaaaaaaaattcgatattgccaaataaaattcaactgttggctgagctcagctactcttttgtctctaaaatgataagtgataccgcgggttcaaaagcaaaaccatatttttcatttattttttcattatttatgtttgtacttttctgtaatatgtttggcatgatcccatacactttcactgttacaagccatataatagtgacttttgtgctagcttcatttatttttattggggtaacagtaattggatttataaagcatggctttggttacctaaaattgtttgttccaagtggagtaccagttatactactccctttaatagtggttatagaaattatatcatatttaagtagaccaattagtttatctgtaagactttttgcaaatatgatggctggacatactatgatgaaagttttcggaggctttgtaataagcctcggaattgtcggtggatggcttccactgagtttttcggttgctttaacaggtttggagatcttagttgcttttcttcaagcatatgtttttgcaatcttaacctgcatctatttaaatgatgcattaaacttacaccattaaa

SEQ ID NO: 271817 - DNA, 528 bp, Unknown
  Bacterial polypeptide expressing nucleotide sequence isolated from the Sargasso Sea
ttgctaaaatgattagcgataccgctggatccaaggctaaaccttattttcctttcatatttagtctttttgcatttgttttaatatgtaacatggttgggatgttaccttactcttttactgtcacaagtcatattatcgtaaccttaataatggctttatttattttttttgctgttacagtgatcggctttttaaaacatggttttaaatatttatcaatatttgtacccagcggggtaccagtagtgcttttaccattaattactgttatagaaattatatcttacttaagcagacctgtaagtttgtctgtaagattatttgcaaatatgatggctggtcacactatgttaaaagtatttggaggatttgtgattagcttaggtttattaggtggttggttaccacttagtttttcggttgcattaacaggcttagaaatattagtggcgtttcttcaagcttatgtttttgcaatattaacctgtatctacttaaatgatgcattaaatttacaccattaat

SEQ ID NO: 271818 - DNA, 123 bp, Unknown
  Bacterial polypeptide expressing nucleotide sequence isolated from the Sargasso Sea
aaaccatccggggatttcgtgaaatactggacggaaagcatgacaaactcccggagcaagccttctatatggtaggcaccatcgagcaggtcctggaaaaagccagtaaaatggcatcctgaa

SEQ ID NO: 271819 - DNA, 157 bp, Unknown
  Bacterial polypeptide expressing nucleotide sequence isolated from the Sargasso Sea
aatggaaataaaagcagctgaaatttcatcagtaattaaggatcagattgcaaattttgaaactaaagcagatgttgctgaggttggaactgtgctaagtgttggagatggtatagcgcgtgtatatggtcttgatcaagttcaagctggtgagatg

SEQ ID NO: 271820 - DNA, 322 bp, Unknown
  Bacterial polypeptide expressing nucleotide sequence isolated from the Sargasso Sea
aatgagtagtggacgaatcgtatcggtgattggtgcggtaatagacgtcgagttcccacgagacgaagtaccacaggtttttgacgcgttaaaggtggacgaagttgatttgacgttagaagtgcagcagcaattgggtgacggtgtcgttcggaccattgctatgggtagctctgaaggaatcgcccgcggcttacctgtaagtaataccgaggcaccaattcaggttcctgttggcgacgagaccttgggtagaatcatggatgttcttggaacaccgattgatgagaaaggaccgatcggtgagaaggatcgtatgcca

SEQ ID NO: 271821 - DNA, 628 bp, Unknown
  Bacterial polypeptide expressing nucleotide sequence isolated from the Sargasso Sea
atggcaacaaatccgatgcatcaattccaggtctatagaataggacctgaaatcaagttaggtagcttagatttctcttttacaaatgcaagtttatttatgcttataagtgctttgtcaatttgtttatttttgtttttaggaacaaaacaaaatagattaattccaggtcgattgcagctaataacagagcttttttacaacttcatatctaaaatgataagtgatactgcagggtcgaaggccaaaccatatttcccttttattttcacattatttatgttcgttttgctctgtaatatgatcggaatgctaccctattcatttacagtaacaagtcatattattgtaactttggttatggctctatttatatttgtggctgttacaataattggttttataaaacacggttttaaatatttaacaatctttgttccaaagggagttcctgttgttttattgccgcttataactatcattgagatcatttcttacttaagtagacctgtgagtctatcagtaagattatttgctaatatgatggcaggtcatactatgcttaaggtttttggaagttttgttatcagtttaggtttattaggtggttggttaccacttagttttt

SEQ ID NO: 271822 - DNA, 483 bp, Unknown
  Bacterial polypeptide expressing nucleotide sequence isolated from the Sargasso Sea
atttttcatttattttttcattatttatgtttgtacttttctgtaatatgtttggaatgatcccgtatacttttactgttacaagtcatatcatagtgacttttgtactggctgcatttatttttattggcgtaactgtaattggatttattaagcacggctttggttatctaaaattgtttgttccaagtggggtgccagttatactgctacctttaatagtgattattgaaattatatcatatttaagtaggccaattagtttatctgttagactatttgcaaatatgatggctggacatactatgatgaaagttttcggaggctttgtaataagccttggaattgtcggtggatggcttccactgagtttttcggttgctctaacaggtttggagatcttagttgcttttcttcaagcatatgtttttgcaatcttaacctgcatctatttaaatgatgcattaaacttacaccattaaa

SEQ ID NO: 271823 - DNA, 352 bp, Unknown
  Bacterial polypeptide expressing nucleotide sequence isolated from the Sargasso Sea
gtaacagttattggttttattaaacatggatttggttatttaaaactttttgtacccagcggagttccaattgttttacttccattaatagtagttatcgaaataatttcgtatcttagtaggccggttagcttatccgtaagattatttgcaaacatgatggctggtcatactatgatgaaggtattcggaggctttgtaataagccttggaattgttggtggatggcttccacttagtttttctgttgcattaactggcttggagatattagttgcttttcttcaagcatatgtttttgcaattttaacatgcatctatttaaatgatgcattaaatttacaccattaac

SEQ ID NO: 271824 - DNA, 780 bp, Unknown
  Bacterial polypeptide expressing nucleotide sequence isolated from the Sargasso Sea
tttgagcgacttatttaataatgaaaatggcttggatgccttggaggcccccttagctgatagaatgcgccctcaatctttggatgaagtaattggccaaaatcatttgcttggggaagaagggccacttcaaaatatgctaacttcgggtattttcagttcgattatattatggggtccacctggtgttggtaaaactacgattgctcgattattagcggatcatagtaatagtcattttgaacagttaagtgcaatttttactggtgttggtgacttaaaaaaagtttttgaagcagctaagtttcggcgcacgaatggccataaatctgtcatttttgttgatgaaattcatcgttttaataaatctcagcaggatagttttttaccttttttagaggatggcacaataattttaattggtgcaacaactgaaaacccatcttttgaacttaacccagctattttatccagagttcaagtgttggtcttagaaagattaaataatacagaccttaagaaattattagagcgagcagaacgtgttttagggtcgaaaattaatttagatttggatgcaaaaatagagttgctgaaagtagcagatggcgatggacgagctttattgaatttaattgaaaatattatttcgtgggaaatttctaaccctataactgtaaaagatctgtcggtccgtttatcaaaacgattaaaaaaatatgataaaaaaggtgaagagcattacaatttaatttcggcactacataaatctatccgcgg

SEQ ID NO: 271825 - DNA, 454 bp, Unknown
  Bacterial polypeptide expressing nucleotide sequence isolated from the Sargasso Sea
ttggcttcagcacaacaattaaaacgcagaattaagagcgtagataatacttcgaaaataacaaaagcgatgtctatgattgctgcttcgaaaatgactcgagctcagcaaatggctttgcaaggtcgtccatatgctgaacgtatgatgagtttattatcagatttggcggctcaaccacaattcgaagatgacccacatccgcttttgacacctcgagaaataaaaaggattggcgttatcgttataacgcctgatcgtggtcttacaggcggtttgaataccgctgttaatcggttcgctgctcagcacatactaaattctgggcatgaagctgaagtagttgctgttggcaagaaagccagagacttctttggacgaacatctaatcttaaagcagtattcaccgatatgggtgaccgaccatctgtagacgctagacaccgatcaccaa

SEQ ID NO: 271826 - DNA, 721 bp, Unknown
  Bacterial polypeptide expressing nucleotide sequence isolated from the Sargasso Sea
aatgcaccaatttgaggttcatcgaattggcccaaagatagaaatttctggaatagacctctctttcacaaatgcaagcttttttatgtttgtgagtggcgcattaattactttatttttattgtttggaacaagagagaaaaaactgataccaagcaaaatacaattaattgcagaaattctttacaattttattgcaaaaatgattagtgatactgcgggaaagaaagccaaaccttatttcccctttatattcagtttgtttgtttttattttattttgcaacatggttggtatgttgccctactcttttacagtgactagtcatataattgtaactctaacttttgcaatatttatttttgttggtgtaacaattttgggtttctttattcatggttttaaatatttaaaaatatttgtaccaagtggtgttccaatagttttattgccgattatatcaataattgaaattatttcttacttgagcaggcctgtaagtctgtctgttagattgtttgccaatatgatggctggtcatacaatgcttaaagtatttggtggatttgtgattagcttaggtttagtggggggctggttgcctttaactttttctgttgcacttactggtttggagattttagttgcgtttttacaagcttacgtttttgcaattttaacatgcatatatttaaatgatgcattaaatttacatcactaa

SEQ ID NO: 271827 - DNA, 421 bp, Unknown
  Bacterial polypeptide expressing nucleotide sequence isolated from the Sargasso Sea
ccctattcgtttactgtaactagtcacattattgttacatttacattggcagcatttatttttattggagtaacgattattggatttattaaacacggtctaggatatttaaaactatttgttcctagtggagttcctataatattacttccattgattgtagtaatagaaataatttcatatcttagtaggccagttagcttatctgtaagattatttgcaaacatgatggctggtcatacaatgatgaaagtattcggaggttttgtaataagccttggaatcgttggtggttggcttccacttagtttttcagttgcattaactggattggagatattagttgcttttcttcaagcttatgtttttgcaattttaacctgcatctatttaaatgatgcattaaatttacaccattaac

SEQ ID NO: 271828 - DNA, 136 bp, Unknown
  Bacterial polypeptide expressing nucleotide sequence isolated from the Sargasso Sea
gatgaccgctatggataatgcaacgagaaatgcaggagatttagtagataaattaacaataaactataatagaagcaggcaagcttcgattactaaagagttaatagagattatatcaggagcagaaagtttatag

SEQ ID NO: 271829 - DNA, 625 bp, Unknown
  Bacterial polypeptide expressing nucleotide sequence isolated from the Sargasso Sea
atggcagcaaatccaatgtcccaattcgatgtttatagaattggacctgaaataaaaattggagcatttgatatatcttttacaaacgcaagtttgtttatgattataagtacagtttctattttattaatttttaatttaggatctaagaaaaattcagtcttaccaaataaaattcaattattagcggagcttagttacacctttgtttctaaaatgataagtgaaacggctggttctaaagcaaaaccatattttgcttttattttttcattgttcatgtttgttttattttgcaatatgtttggaatgataccctatacattcactgtaactagtcatattattgttacatttgttcttgctgcatttatctttgttggcgtaacagtaattggatttattaaacatggttttggatatttaaaattatttgtaccaagtggagtaccagcggtactacttcctttaatagtagtaattgagattatttcttatctaagtagaccaataagtctatcagttagattatttgcaaatatgatggctggtcatacaatgatgaaagttttcggaggctttgtaattagtcttggaatagttggtggatggcttccaacttagt

SEQ ID NO: 271830 - DNA, 514 bp, Unknown
  Bacterial polypeptide expressing nucleotide sequence isolated from the Sargasso Sea
aaaaattctttaatacctaataaaatacaattattagctgaacttagttacggatttgtatccaagatgatcagtgatactgctggcagcaaagataagccatatttttcatttattttttcgctttttatgtttgttttattttgcaatatgtttgggatgataccttatgcatttactgtaactagccatattattgtaacatttgtacttgcggcctttatttttatagctgtaacaattattggatttatgaaacatggttttggatatttaaaattatttgtaccaagcggtgtaccgattgttttattaccattaatagtaataattgaaattatttcttacttgagcagacctataagcttatctgtgagactttttgcaaacatgatggcgggtcatactatgatgaaagttttcggaggctttgttataagtctcgggatagttggtggatggcttccactgagtttttcagttgcactaacaggtttggagatattagttgctt

SEQ ID NO: 271831 - DNA, 280 bp, Unknown
  Bacterial polypeptide expressing nucleotide sequence isolated from the Sargasso Sea
atgcctagcttaaaagacttaaaaatacgaattgatagtgtaaagtccactagaaaaattaccaaagctatgcagatggttgcagcagcaaagcttagaaaagcccaggaggcagctgaaagaggtaggccatatgctgaaaaaatgcgatccatagtttccaatttagcatcaagtgttagaaatatcgatgtggacaacaagtttttgcgagatggtagcagtaacaataagtttctactgatagtagcaaccgctgagagaggtttatgtggtggat

SEQ ID NO: 271832 - DNA, 545 bp, Unknown
  Bacterial polypeptide expressing nucleotide sequence isolated from the Sargasso Sea
tcatgcgcagcgggagataggtttggctattggtgaaccaccaacggctaaagggtatccgccttcagtatttgcagtcttgcctaaatttatagagagggcaggcgtgggacgtcatggctatggctcaattactgctgtttatactgtgttagcagagggggatgataaatctgatccggtggttgatattgcgagggcttcattagatggtcaagtgatgttgtcaaggcaaatggccgatgccgcgcactatcctgcgattgacctcgcagggtcaatctccagagtcatggcgagtattctcagcccagagcaattgaatgcttccaatcgattcaggcgactatggacgctttttcaacagaaccaagacctgattcaggtgggtgcatatgagcccggcactaatttagatctcgatgaggccattcgcattcgtccggcgatggagagcctcctccagcagcttggtgatgaaagcgtttcgctagctgactcccaagaattgctgattcagctgacgggggcgccagcacaatgaa

SEQ ID NO: 271833 - DNA, 337 bp, Unknown
  Bacterial polypeptide expressing nucleotide sequence isolated from the Sargasso Sea
cttgaatcgttttcacagtttgcgtcagatctagacgatgcaacaaaagaacagctagaaaatggccaaagaattacagagctattcaagcagacacagttctcaccaagatcagttgcttgcatttctatagttttatacgcaatagaaaacaaatatttaatcaatatagaaaaagataaaatgcaatcttttgaagagaatctaagaacttacttcaaagcaaatcataaagacgtgtgggaagaagttaacaaaacaggcgactggaatgatgatcttgaaaaaaaatataaaaaaattactgatagttttatgaaggaagggtcttggtaaa

SEQ ID NO: 271834 - DNA, 793 bp, Unknown
  Bacterial polypeptide expressing nucleotide sequence isolated from the Sargasso Sea
catggcaagtctcaaggatctaagggttcggattaatagcgtccgttcaactcagaagattacccgcgctatgcagatggttgcggcgtcgaagctccgtcgggcccaggagcaggccgaggcgggacgtccttatgctaaccacatgcggagaatgatttcttccttgatgtcggcgttgaccaatcctgacgacgcaccggatctcatggtcggtcgaggtgaggcaaccgtccaccttctagtcgtggcgacctcagaacgcggattgtgcggaagtttcaacaccaacattgtgcgaagggctcgactgcgcatatcgacgcttcttcattctggtcacgaagtgaagatcctatgcatcggtaaaaaaggtcgcgatatgctgcgtcgcgactatgacgtgcacatcatcgacaccatagatatgtcggaggtacggcgtctcggtttctcggatgtggcgccgatcgcagagcggattacggacatgtttgctgcgggtgaattcgatgcgtgttccctgtttttcagccagtttaaatcggtgttgtctcaagaggtgacggagcatcagctcattccggtcagtgttccagaagtatctgaggaggacgttccgcttgagggagtcgacgcgatgtacgagtacgaacccgaagaggacgagatcttggctgaattgctgccacgtaatctcgcagtccaagtctactcagctctgttggagaacgcagccagcgaacagggtgcacgtatgaccgcgatggataacgcaacccgaaatgccggg

SEQ ID NO: 271835 - DNA, 562 bp, Unknown
  Bacterial polypeptide expressing nucleotide sequence isolated from the Sargasso Sea
aatgttttttaattccttgctaacaaattttgcagcattagaagttggtcaacatctttattggcaaattggaaatatcagacttcatgggcaggtatttttaacatcttggattttattaggagcgttattaatttttatttctttaggaactaaaaaaatggaaaatgatcctaaaggacttcaaaacctgcttgagttcctctgggattacataagagatcttgctaggacgcaaataggtgaaaaagtttatagagattggatgccttttatagggactttatttttattcgtctttgtgagtaattggggaggggctttaattccttggagattgattaagttaccaagtggagaattaggagcacctactgcagatatcaatacaactatagccttggctttattggtttcactctcttatttctatgctggtttaagcaataagggttggagatacttcgaatactatgttcacccaactccgattatgcttcctttcaaaattctagaggactttaaaaaacctttatcactctctttcaggctattggaaata

SEQ ID NO: 271836 - DNA, 221 bp, Unknown
  Bacterial polypeptide expressing nucleotide sequence isolated from the Sargasso Sea
tttgtctgtaagattgttcgcaaacatgatggccggtcatactatgttaaaagtttttggtggatttgtcgtcagtttaggtttaattggaggttggttgccactaagtttttcagttgcactcacgggcttagaaattttagttgcttttctacaggcttatgtttttgcaattttaacatgcatttacttaaatgatgcattaaatttacatcactaat

SEQ ID NO: 271837 - DNA, 631 bp, Unknown
  Bacterial polypeptide expressing nucleotide sequence isolated from the Sargasso Sea
tatggcagcaaatccgatgactcaattcgaagtttacagaattggtccagaaattaagataggttcttttgatatttcatttacaaacgcaagtttgtttatggtaataagttctttagcaattttgattatttttaatttaggttcaaaaaaaaattcgatgttgccaaacaaaatccaacttttagcagaacttagttattcatttgtatcgaaaatgattagtgatacagctggatctaaggcaaaaccttactttgcatttattttttctttatttatgtttgttttattttgcaatatgtttggcatgataccctatacctttacagtaactagccacataatagttacattcattttggcagcatttatttttataggagtaacaattataggttttattaaacatggatttagttatttaaaactttttgtaccaagtggagtgccagttgtattactccctttaattattgtaatagagataatctcgtatttaagtagacctataagtttatcagttagactttttgctaacatgatggcaggtcatacaatgatgaaagttttcggaggctttgttgtaagtcttggaatagtcggtggatggctaccactgagtttttcg

SEQ ID NO: 271838 - DNA, 166 bp, Unknown
  Bacterial polypeptide expressing nucleotide sequence isolated from the Sargasso Sea
tatggctaataatttaactggaaaaatatcacaagttcttggagctgttgtggatgtagagttcgatggtgaacttcctgcaatcatgaatgctttagaagttgataataatggaacaagattaatgctcgaggttgctcagcatttaggtgaaaatgcagttcgt

SEQ ID NO: 271839 - DNA, 721 bp, Unknown
  Bacterial polypeptide expressing nucleotide sequence isolated from the Sargasso Sea
tatggccactaatccaatgcaccaatttaaagtatacaaaattggtccaaaaatagaaatttctggaatagacttatctttcacaaatgcaagtttatttatgcttattagtggagcaataattggtttattttttttattaggtactaaagaaaaaaaaattattccaagtaaaatacaactaatatctgagatgatttataattttattgctaaaatgataagtgatactgctggaaaaaaagccaaaccttattttccatttattttcagtttgtttatttttattttagtttgcaacatggttgggatgttgccttattcatttactgttaccagtcacataatagttacattaacttttgcgttatttatttttattggggtaacaattttaggttttataatgcatggttttaaatatttaaagatatttgttccaagtggtgtaccattggttttgttaccaataatatcaattattgaaataatttcatatttaagtagaccagttagtctttctgtaagattatttgcaaatatgatggctggtcatactatgttaaaagtatttggaggatttgtaataagtttaggtttaattggtggatggctacctttaagtttctctgtggcacttacaggtttagaaattttagtagcttttttgcaagcatatgtttttgcgattttaacatgcatctatttgaatgatgcgttg

SEQ ID NO: 271840 - DNA, 574 bp, Unknown
  Bacterial polypeptide expressing nucleotide sequence isolated from the Sargasso Sea
ttcctgggaaaaattcaattaatatccgaaatgctttacaactttattggaaaaatgattaatgatactgctggtaaaaaagcaaagccatattttccttttatttttagtctgtttatttttgttttattctgcaacatgattggtatgttgccttattcattcacagttaccagccacattattgtaactttggcttttgcaatgttcattttcattggtgttactattttgggttttgttattcacggatttaaatacctaaaaatatttgtacctagcggtgttcccatcgttttgttgccaataataatgataatagaaattatatcttatttaagcagaccgattagcctttcagttagattgtttgctaatatgatggctggtcatacaatgctaaaagtttttggtggatttgtaatcagtcttggtctggttgctggctggttgccattaactttttcagttgcattaaccggtttggaaattttagtagcttttttgcaggcttatgtttttgcaattttaacatgtatttatttgaacgacgcattaaatttacatcactaac

SEQ ID NO: 271841 - DNA, 292 bp, Unknown
  Bacterial polypeptide expressing nucleotide sequence isolated from the Sargasso Sea
aatggaaataaatccttcagaagttacgaagatattaaaagaacagataaaaaactttggagacaaagcagaagtatcagaggttggacaagtactctctgtaggtgatggtattgcaaggatatacggattgaacaatgttcaagctggagagatggtagaattttctgatggatcgaaaggaatggctctaaacttggaaagtgataacgttggtgtagtaatatttggagatgatagagctgtaaaagaaggagacacagtaaaaagaactggagcaattgttgatact

SEQ ID NO: 271842 - DNA, 409 bp, Unknown
  Bacterial polypeptide expressing nucleotide sequence isolated from the Sargasso Sea
atggccctgactctgagggttctctgccccgatcagaacgtgttcgacggtcaggcggatgaggtgatcctgcccagcaccaccggccaactcggtgtgctcccaggtcacgtctccctgctgaccgcccttgatgtgggtgtgctgcgcgttcgcgacggcaactcctggtctgccatcgccctgatgggcggttttgcagaaattgatgaggacgaagtcaacgtcctcgtcaatgcagcggagccagccagcagcattaataccgacatcgctcagcaagacctgagcagcgcccagcaggcctgggacagctttgacggcaagcccaacagccctgagaagatcaaggcccagcaagcctttcagaaggctcgtgcacggcttcaagccacccgcgccaactgac

SEQ ID NO: 271843 - DNA, 175 bp, Unknown
  Bacterial polypeptide expressing nucleotide sequence isolated from the Sargasso Sea
tatggaaataaacccctcagagataactaagttattaaaagaacaaattaaaaactatggtgataaagctgaagtatctgaaattggaaaggttctaacagttggagatggtatagcgagagtttatggtcttgataatgttcaagcaggagaaatggtagaattcaatgacggt

SEQ ID NO: 271844 - DNA, 240 bp, Unknown
  Bacterial polypeptide expressing nucleotide sequence isolated from the Sargasso Sea
aatggaaattaaagctgcagaaatatcgtctgtaattaaagaccaaatagcaaattttgaaactaaagcggatgttgctgaagttggaacagtactaagcgttggagatggaattgcacgtgtgtatggtcttgatcaagtacaagctggagagatggtagagttcccaggtggcattaaaggtatggccctcaaccttgaaatggataacgttggtgtttcaatcttcggcgatgatac

SEQ ID NO: 271845 - DNA, 669 bp, Unknown
  Bacterial polypeptide expressing nucleotide sequence isolated from the Sargasso Sea
ctttagatatttctttaaccaattcatcactttggatgattttgatagtaatttgctcaactttactattcggtttgggtattagaagaggagcactaatcccaaatagacttcaatcaattgctgaaataacatatgagtttgttgctaatatggttcatgataatgcaggaaaagaaggtaaagtatattttccgtttatatttacactttttatctttattctatttgctaatgttttgggtctaataccatatagttttactgtaacaagccatattatagttacttttgctatggctatagttgtttttattggagtaactattattggcttagttaaacataagcttaaattttttacattatttgtaccaaaaggaattcctgttttccttgctccattacttatattaattgaacttatttcttatttagttcgacctattactctcagcgtgagactcttcgctaatatgatggcaggacatacgttgctgaaagtttttggtggatttgtagttgcacttggtttccttggaatagggccactaattgttactgtagcactatatggtcttgaattaatagtagcaggtttgcaagcatatgtattcgctgtgcttacctgtttataccttaatgatgctcttcatttacatcattaaa

SEQ ID NO: 271846 - DNA, 108 bp, Unknown
  Bacterial polypeptide expressing nucleotide sequence isolated from the Sargasso Sea
gtttccagggcattatcaacggtcaatacgacgatattccggagcaggccttctacatggtcggcgggatcgaagaagccgttgaaaaggcaaaaactgtcacctaat

SEQ ID NO: 271847 - DNA, 768 bp, Unknown
  Bacterial polypeptide expressing nucleotide sequence isolated from the Sargasso Sea
catgctgaacctgaacaacatcacagcccgcctcggcggcgaaactattctcgccggcgcctcggccatgttgcccacgggcagtcgtgttgggctggtgggacgcaacggtgctggtaagtcgacactgctcaagatcatcgccggattgctcgaggccgatgacggcacggtcgagacgccacgcggcacccgtattggctacgtcgcccaagaggtgcccggcgggaacgcgaccccattcgagatggtgattgccgccgacattgagcgtacggacctaatgactgaagcggacgccgcgaccgacgccgatcgcatcgcatctatccatgagcggctcggcataatcgacgcccatggtgctcccgcgcgggcggcacgtattctcgccgggctgggtttcgacgagacggatcagcacaggccactttcggacttctctggcggttggcgcatgcgcgtagccctagccggacttttgttctcacgaccggacttgctactgctcgacgagccgtcgaaccatctagacctcgaggccgcgctctggctcgaaaatttccttaagagctacccagcctccatggtgatagtcagccatgagcgcgacctactcaacaacgtcgttgaccatatcctgcacgtgcagggcggcaaggtaacgctctatacgggcggctatgacgcattcgagaagattcgtgccgatcggcttagccaggttgccgcgatgcgggctaagcagcaggaaaaacgcgccaagct

SEQ ID NO: 271848 - DNA, 162 bp, Unknown
  Bacterial polypeptide expressing nucleotide sequence isolated from the Sargasso Sea
atcaagggcatctaccatacttgctggactaggttttgatcataatgaccagaaaagaccttgtagagagttttctgggggaaggagaatgagagtggcattagcttcaactttattctcaaaccctgatttacttttacttgatgagccaactaactactt

SEQ ID NO: 271849 - DNA, 288 bp, Unknown
  Bacterial polypeptide expressing nucleotide sequence isolated from the Sargasso Sea
agctgtcatcagaggacagggggcttgggatggttggtggctccccttacattgatgagtctgctgatgcttactcgctgctggttgagaaagtggtcaaagcggcggaaatggaagctaccctcaagagactattggaggaaattgaagctacgaagagaagagtcaatgctctagagtttaaggtcattccagaaatggaagaggcgcagaccttcattcaattgagacttgaagaaatggaaagagaggagacgtttcgccttaagcgcttcaaaaataagtgat

SEQ ID NO: 271850 - DNA, 313 bp, Unknown
  Bacterial polypeptide expressing nucleotide sequence isolated from the Sargasso Sea
ggattaaaaaggggtgatgaagtatcacatacaaatgcaccaatacaggttccagttggacccgaaacccttggaagaattattaacgtgattggtgaaccaattgacgaaagaggtgacgttaatactaaagaaagttggccaattcatagagccgcacctgaatttaatgatcaatcaactgaaaccgaaatacttgtaactggtattaaagtaatagacctactcgaccccttatgcaaaaggaggaaaaattgggttgtttggtggtgctggtgttggaaaaacagttttgatcatggaattaattaat

SEQ ID NO: 271851 - DNA, 499 bp, Unknown
  Bacterial polypeptide expressing nucleotide sequence isolated from the Sargasso Sea
ccgcactcttctatctgagatgattgaagctcgcgagggtttggtcgggacctatagacaagcggttcaatcgattagccttgcaggtgcgattgaaggtggcttggcagtcaagagtgctgcaattgcaatttccaaccgtcctgaagttgaggtcagccctcgaaacatcatgggtgtagttgttccgagcgtacaaggaaccaatttgacaagtacgattagcgagcgcggcgtaggactgattggaggttcagcttacattgatgaggctgcagattcatactctgcactgattgagaacatcgtcaaggctgcagagatggaagcaacactgaagcgccttttagtcgaaatcgaagcaacaaaacgtcgtgtcaatgcattggaattcaaagtcatccctgagatgcaagaagcacaatcattcatccaacttcggcttgaagaaatggagcgtgaagagacgttccgcctcaagcgattcaagaacaaatga

SEQ ID NO: 271852 - DNA, 583 bp, Unknown
  Bacterial polypeptide expressing nucleotide sequence isolated from the Sargasso Sea
aatgattcgtcttgaaaaattatccaaatctttccctgatggagatctgtttaataatgtaaatgtatctatcaaaccggggatgcgtatcggccttattgggccgaatggatccggaaaaactacattgctccgtataatgttggggaaagaatcgccggattctggaaatgtacacgttgataaatccaccacaatcggatatcttgcacaggatattgtggccggtactggccgatccatattagaagaagtgttggtttcttatccggaagtccgtgagttggaaggaaagatgcttgctttatccgaagctatttccaaagaccataacaatatggatttggtgaataaattgggcgatgcacagcatcggtttgaagctttgggtggttggaatcttgaagataaggcaaaaaagattttaagtggacttgggtttgccgatgaaaaatttactgaacctatggatgtttttagtggtggttggcgaatgcgcgtagctttggcatctattctcttacagcaaccggatattctttttcttgatgagcctacaaaccatttagatttggaagcaacc

SEQ ID NO: 271853 - DNA, 610 bp, Unknown
  Bacterial polypeptide expressing nucleotide sequence isolated from the Sargasso Sea
attggaattaaaaggtagagtagctttcggacggatggaggcagtaacttttggccgtcctgctaatgaagcgttgctggaagatataaagaattacgatgccaatcgtgtttttctattagctagtggtactttaaaccgcaatacagatgaaatagacaaaatccgcacaagccttggaaataaatgcgttggtgaatttttcgaaatgtctccgcatacaccgcggaaggacgtcgtcgcggcaacaaaactggcaatggacaaaaaagcagacctgatcgttacatttggtggcgggtctttaacagatgctgccaaggctattacgctttgtatttcaaataatataaccgaagtaagcaagctcgatgagctgcgtaatggtaacagtgtagacggcggtacactaattggcccgtcaattccacaaatcacaataccaaccactctatcgggtggtgaatttagtgcaatttctggcgtaacagacgagtcttctaaaacaaaagaattatttaggcaccctggtatcatgcctaaagtcgttatccttgatccagctcccacaattcacacacccgaatggttgtttttgtcgactggaatc

SEQ ID NO: 271854 - DNA, 877 bp, Unknown
  Bacterial polypeptide expressing nucleotide sequence isolated from the Sargasso Sea
atggtttccagctcacgtaggcactctttgcaaagtagaaattaacaagaatgaaaccgtatttgcggaagttattggatttagcaatggccaaaatgttttatctctttatgaaactggatcccacttaagagtcggagctactgtgtctgtttttgatgaaggtcgagaaattcctgttggaccgcagcttctcggcagagtagtagatgcaatggggaaccctctagacagtaacggacccgttcaagcgcaagattcttggcctataaaaggtaaacagagcaacccattatcaaagaaacctattgacacgccactagatgtaggagtccgagcaataaacagcctgattaccgtggggcaaggacaaagaataggcataattgcaggctctggggttggtaaatccgtccttttaggaatgatgagtaaatttacgagtgccgatgtagtagtagttggcctaattggtgaaagaggaagagaggttggatcatttgtaaagtcaatttttactggtgagtcgaaaaaaaaaacctgcattgttgctgtacctgctgacagatcccccctcttgagaataagaggcgctaatacagccaccgctattgctgaatattttagatcaatcggtaaaaacgtcttgcttatcatggattccctgacccgagtcgcacacgctcagagagaaattggcttggctctcggtgagcaacccacagcaaaaggttatcccccgtctgtaatttccttgcttccaaaactgattgaaagatctggaaccggtgactataacgagggttcgatcacatctttttataccgtattggccgatagtgacgatacgaacgatccagtagtagatactgcaaga

SEQ ID NO: 271855 - DNA, 358 bp, Unknown
  Bacterial polypeptide expressing nucleotide sequence isolated from the Sargasso Sea
tataggtgttactgtgattggttttttaaagcacggatttggttatcttaaattatttgtacctagtggggtgcctattgtattattacctttgatagtaattattgaaataatttcatatttaagtagacctattagtctttctgtaagattatttgccaacatgatggcaggtcatacaatgatgaaggtttttggaggctttgtgattagccttggtattgtaggtggatggcttccactaagtttttctgttgctcttacgggtcttgagatattagttgcttttctacaggcttatgtatttgcaattttaacatgcatttatttaaatgatgcattaaatttacaccattaa

SEQ ID NO: 271856 - DNA, 616 bp, Unknown
  Bacterial polypeptide expressing nucleotide sequence isolated from the Sargasso Sea
atgacactaaatccaatgcatcaatttgaagtttataggataggtcccgaaattaaattgggaacgattaatctttcatttactaatgctagcctttttatgttgataagtgctttattaatattgcttttgcttttcatgggtagcaaaaaaaaattattagttccaacaaagatacagttaattacagaaatgagctactcgtttgttgctaaaatgattaacgaaaccgcgggaaataatgcaaaagctttttttccatttatttttactttattcatgtttgttcttttttgtaatatggttggaatgctaccttattcatttacggtaaccagtcacattatcgttacgtttgttttggctgccttagtttttattggagtcacaattataggatttgttaaacatggtataaaatacttagagctttttgtgccaaaaggtgtaccaatgttgcttcttcctttaataatagttattgaaattatatcttatttaagcagaccagtaagtttgtcagtaagactatttgcaaacatgatggccggacataccatgcttaaagtgttcggcggatttgtaataagcttaggattgctgggtggttggttgc

SEQ ID NO: 271857 - DNA, 715 bp, Unknown
  Bacterial polypeptide expressing nucleotide sequence isolated from the Sargasso Sea
atggcagcaaatccaatgactcaattcgaagtttatagaattgggccagaaataaaaattggttattttgatatctcgtttacaaacgcgagtttatttatggttgtgagctccttagcaattttaattatttttaatttagggtcgaaaaaaaattcaatgttacctaataaaattcaacttttagcagaactaagttacacatttgtatcaaaaatgattagtgacactgctggatcaaaagcaaaaccttattttgcgtttatattttctttatttatgtttgttttgttttgtaacatgtttggcatgataccttatactttcacagtaactagtcatataatagttacttttgtattagcagcatttatttttataggggtaacaattataggttttattaaacatggttttggttatttaaaacttttcgtaccaagtggggtgcctattgttttgcttcctctaatagtaattattgagataatctcgtatttaagcagacctataagtttatcagtaagactttttgctaatatgatggctggtcatacaatgatgaaagttttcggaggctttgtaataagtcttggaatagtcggtggatggcttccactgagtttctcggttgcactaactggattggagatattggttgcttttctcctaagcatatgtttttgcaatcttaacatgcatctatttaaatgat

SEQ ID NO: 271858 - DNA, 457 bp, Unknown
  Bacterial polypeptide expressing nucleotide sequence isolated from the Sargasso Sea
tatgtttgttttgctttgcaatatggttggaatgttaccttattcatttactgtaactagccatatcatagttacgcttataatggctttattcatttttattgcagtaacaattatcggttttttaaaacatggtttcaaatatctttcaatttttgtaccaaaaggtgtacctgcacttttattgcctttaataacaattattgagattatttcatatttaagcaggccagtgagtctttcggttagattatttgcaaatatgatggctggtcacactatgttaaaagtatttggtgggtttgtaattagtttaggggtactaggtgggtggttaccacttagtttttcagtagcattgacgggtttggaaattttagttgcatttttacaagcttatgtttttgcaatattaacctgcatctacttaaatgatgcattaaatcttcaccattaa

SEQ ID NO: 271859 - DNA, 223 bp, Unknown
  Bacterial polypeptide expressing nucleotide sequence isolated from the Sargasso Sea
atggatataaatccttctgaaataactaaaattttaaaagagcaaataaaaaatctaggagaaaaaaccgaagtatctgaaattgggaaagtcctttctgttggtgatggaatagcaagagtttatggacttgataatgttcaggctggagaaatggttgagtttaaagatggcttaaaaggaatggctttaaatttagaaagtgacaatgtaggaattgtaa

SEQ ID NO: 271860 - DNA, 347 bp, Unknown
  Bacterial polypeptide expressing nucleotide sequence isolated from the Sargasso Sea
catggcaaatcttaaagagattagagatcgaatagtttccgttaaaaatacaagaaaaataacggaggctatgagacttgttgcagctgcaaaagttaggagagctcaagatcaagttcttaagagtagaccttttgcagataaacttgcacgagtcttagaaaatattcaatctagagtacaatttgaggcagtcgactctcctttattaaccaagagagaagtaaaaagtatctccttggtttgcataactgcagatagaggcctatgcggtggttacaacacaaatattattaaaaaggtagaaataagatatgcagaattagtcaaacaaagttatcagccaa

SEQ ID NO: 271861 - DNA, 130 bp, Unknown
  Bacterial polypeptide expressing nucleotide sequence isolated from the Sargasso Sea
ttttcacttgaagacagcatcaagggcttcaatggaatcctaaatggagactatgatgacctccctgaacaagcattctacatggtgggaactatagaagaagctgttgagaaagcaaaaacaatgtaat

SEQ ID NO: 271862 - DNA, 351 bp, Unknown
  Bacterial polypeptide expressing nucleotide sequence isolated from the Sargasso Sea
gatgaattggaattatccaacaaatatttggtttggtgaaaaaagaattaatgaaatcaataatgcttgtgagattttaaatataaaaaacccactaattgtaactgatccgggtattttgaaaacaaacatagttgaaaaaataacaaaagctatgaataacaaagtcagtatttttagtgatgttcaatcaaatccaaccggtacaaatgttgagcaaggagttttagctttcaactctaattctcatgatggtgtaatagctgtaggtggaggatcaggtatggatgttgggaaaggtatcgcctttatggctggacaaaaaagacctctatgggactttgaagacat

SEQ ID NO: 271863 - DNA, 766 bp, Unknown
  Bacterial polypeptide expressing nucleotide sequence isolated from the Sargasso Sea
atgatctatcctgccgttgctatcgcactccttccatacaacacccttattgttgctgctggtgttgcagcagttgggtgtgccgcaggagtgattggtacgtttggcgtcctacgaaagagagcgcttgtcggtgatgctgcagcgcatgcaacgcttgtgggagttgcatcagccttactcattacagggcatcgtgatctcgccgtgcttcttgttggtggtctcctctcagcaatatttgctattgttctcttggttcttattcgaaagtttacccgcacacgtgatgatgcagcgactgcgattgtgctgagtgtttcgttcggtcttgggataacgttgatttcggggatggtgagtcgtgggattcctggaagtggtggcttggagcgattcctgcttgggcacaccgcatcgctgacagctcatgacgcactcttgcttggaattgtttcaatcattggtgttttgtgcatcgtggtcggcttgaaggaagcgacaatggtcgcgtttgatccaggttttgctgcggcggccggatggccagcagcgacaatagatcttgtgttgatcgctctgattgcggtgatggttgttgttggactgcctgcagccggggcagtcttggtcacggcacttgttgttattcctccagctgttgctaggcaatggactgatcggcttattcccatgcttgtcattgccggggcagtcggattactcagcgcgctggcgggagtggtactcagtagcctcgccgtgc

SEQ ID NO: 271864 - DNA, 736 bp, Unknown
  Bacterial polypeptide expressing nucleotide sequence isolated from the Sargasso Sea
taatctaggtgaagaaggtatgcgccgatcggttgtggttgtggcaacttctgaccagcctcctcttctcagaatgcgcggggcttatgtggccacttctattgctgaatattttcgaagcgtagaaaaagatgtcctactctccatggattctctcaccagatttgctatggcacagagggaaataggactggccgcgggtgaaccaccaacaacaaaaggctttcctccttctgtctttgccttgctgccaggtctgctggagagaacaggcacacatgagggtgcaggctcaattacaggattttatacagttcttgttgagggggatgacgcaaatgaccccatcgctgacgctattcgagccattgttgatggtcatatctatctcagccgtgatatcgcggaaaaaggactttttcccgcgattgacctgctggcatcaacaagtcgggttatggttgacgttgtagatcaaaaacaccttgatttgaacctgataatgcgacgtactctggcaacataccgtgaagctgaagacctgatcaatattggagcatatgttcagggaagcaatcctgagatagactatgcaatcactaaaaaccctttgattcaggaattcgttcagcagggaatgaatgaacagacttcattaaatgagtgcgaagaacgacttcagcagattttcggagataaactggagggaaatgtagttgaagaagatagttcctga

SEQ ID NO: 271865 - DNA, 589 bp, Unknown
  Bacterial polypeptide expressing nucleotide sequence isolated from the Sargasso Sea
aaaaaaaattctttaatacctaataaagtacagctacttgcagaacttagttttagttttgtctcaaaaatgatcagtgatactgcgggcagcaaagctaaaccttatttttctttcattttttcactcttcatgttcgtcttattttgtaacatgtttggtatgatcccttatgcgtttaccgtaactagtcatattatcgttacttttatattggcatcttttatttttataggggttacaataataggatttgcaaaacatgggtttggatatttaaaattatttgtaccgagcggggtaccaattgttctattgccacttatagtagtaatagaaattatttcttatttaagtagaccgattagtttgtctgtaaggctttttgctaatatgatggctggtcatactatgatgaaagttttcgggggctttgtaataagcctcgggattgtcggtggatggcttccactgagtttttcagttgcgctaacaggtttggagatattagttgcttttcttcaagcttatgtttttgcaattttaacatgcatatatttaaatgatgcattaaatttacaccattaaa

SEQ ID NO: 271866 - DNA, 203 bp, Unknown
  Bacterial polypeptide expressing nucleotide sequence isolated from the Sargasso Sea
catgcagattaatccatcagaagtaacaaaaattttaaaagaacaaattaaaaaatttggagaaaaagcagaaatatctgaagtaggacaagttctttccgtcggggatggtattgcaagagtttatggtttggataacgttcaagcaggagaaatggttgagtttatgggcggcataaaaggtatggctctaaatttagaga

SEQ ID NO: 271867 - DNA, 722 bp, Unknown
  Bacterial polypeptide expressing nucleotide sequence isolated from the Sargasso Sea
aatgcaacagttcacagttcataaaattggacctgaaattaaaattgcaggaatagatttatcttttacaaattcaagtttatttatggttatcagtgcctcaacagtccttttatttttatttttgggctctaaagaaaagaaaattattccaaataaaattcaattaatagctgagatgtcctatgctttcgtagctaaaatgataagtgatactgctggctcaaaagctaaaccttactttccatttatattcagtctttttatgtttgtgttattttgtaatatggttggtatgcttccgtactcatttacagtaacgagtcacataattgttactttaattatggctttatttatattcatagcagtcacaattattggttttttaaaacacggatttaaatacttaagtatatttgtgcctagcggtgtcccggtcgtgcttttgccattaattacaatcattgaaattatttcttatttgagtagacctgtaagcttatcggtgcgtttatttgcaaatatgatggcaggacatacgatgttaaaagtttttggtggttttgtagtaagtttaggaatattaggtggatggttaccacttagtttttcagtagctctaacaggcttggaaattttagtagcatttttacaagcttatgtttttgcaatattaacctgtatctatttaaatgatgcattaaatttacaccattaat

SEQ ID NO: 271868 - DNA, 436 bp, Unknown
  Bacterial polypeptide expressing nucleotide sequence isolated from the Sargasso Sea
ttgtctgctgtgaagattcgcatgcgatcggtcggtaacattcaaaagatcaccaaggcgatgaagatggtcgccgcgtcccgtctcaagggcgcgcaaaccaagtgcgaaaagtctcgcgctttggtgcaacccttcacgcgcttgctcggtgataccccgggtgcgaacacggaatcggcgctcgtcgtgccgatctcgtccgataagggtttgtgcggtggtatcaacaccgcggtggtgaagtactcttcggttttgaacaccatgaacgagtctaccaagttcagtattgtcggtgataaggcgcgggcgcagctcacgagaatgttcccggaacaagtgtcgaacgttgtcgtcgacaccaccaagcagccgttgacattcagcacggcgtccgcgatcgcggacaccatcatggaggacaatcctgcga

SEQ ID NO: 271869 - DNA, 574 bp, Unknown
  Bacterial polypeptide expressing nucleotide sequence isolated from the Sargasso Sea
atggcaacaaatccaatgtaccaatttaatgtaaataaaattgggcccaaaatcgagatagtaggtattgatctatcctttacaaattctagtctttttatgatcatcagcgccactttaataacaatattactttttttaggaacaaaagaaaaaaaaattattccaggaaaatttcagctaatttcagagatgttgtacaattttatatcaaaaatgattagtgatactgcggggaaaaaagcgaagccctatttccctttcatatttagtttatttatttttattttattttgtaatatggtcggaatgttgccttattcattcactgtaacaagtcacattatagttactttgacttttgcaattttcatatttattggggttacaattcttggtttctttatgcatggatttaaatatttaaaaatatttgttccaagcggtgtaccgattgttttgcttccaataataagtataattgaaataatttcttatttaagtagacctgttagtttgtctgtcagattatttgcaaatatgatggctggacatacgatgttgaaagtttttg

SEQ ID NO: 271870 - DNA, 531 bp, Unknown
  Bacterial polypeptide expressing nucleotide sequence isolated from the Sargasso Sea
ttatagcaaaaatgattagtgatacagctgtaagaaaggcaaaaccttacttttctttcatttttactttatttgtattaatattgttttgtaacatgcttggtatgctaccgtattcatttaccgtaacaagtcatattatagtaactttaactttcgctatatttatttttattggagtaacaattttaggttttgcaatacatggttttaaatatttgaaaatatttgtgccaagtggcgttccaatattacttttaccaattataacaattattgaaattatttcctacttaagtagaccaattagcttatcggtaaggttattcgccaatatgatggctggtcatactatgttgaaagtttttgggggatttgtgattagtcttggcttggttggaggttggttgcctttaactttttctgttgcattaactggcttagaaattttggtagcttttcttcaggcatatgtttttgctatattgacttgtatttatttaaatgacgcacttaatttacatcactaac

SEQ ID NO: 271871 - DNA, 118 bp, Unknown
  Bacterial polypeptide expressing nucleotide sequence isolated from the Sargasso Sea
attggagcagtagttgacgtaaaatttgacggagagcttccagaaattctaacagcattggaatgtaaaaatggggataacaggttagttctagaagttgctcaacatttaggatgaa

SEQ ID NO: 271872 - DNA, 268 bp, Unknown
  Bacterial polypeptide expressing nucleotide sequence isolated from the Sargasso Sea
atggaaataaaagcagctgaaatttcatcagtaataaaagatcagattgccaattttgaaactaaagcagatgtagctgaggtcggaacagtgttaagtgttggagatggtattgcacgtgtctatggtcttgatcaagtacaagctggtgagatggtagaattcccaggcggcattaaaggtatggccctcaatcttgaaatggataacgtcggtgtttcaatttttggtgatgatacaggaattaaagaaggtgataccagttaaa

SEQ ID NO: 271873 - DNA, 622 bp, Unknown
  Bacterial polypeptide expressing nucleotide sequence isolated from the Sargasso Sea
tatggctagtaacccaatgcaacaattcagcgttcataaaattggacctgagataaatatagtaggcattgatttatcattcactaacgcaagtctttttatggttataagcgccactttaattttattatttttatttgttggaacaaaagaaaaaaaaattattcctagtaaggtccaactagtcactgaattgacctacacttttgtagcgaaaatgataagtgatactgctggatcaaaagctaaaccttattttccctttatctttagtctttttatatttgttttattttgtaacatggtgggaatgttgccctactcatttacagtaacaagtcatattattgttactctaataatggctttgtttatctttattgcagtaacaataattggatttgctaaacatggatttaaatatttaaatatatttgttccaagcggagttcctgtagttcttttacctttaattacagtaattgaaataatttcatatttaagtaggcctgtgagtttatctgttagactgtttgcaaatatgatggccggtcatacaatgttaaaagtttttgggggatttgtgataagtttaggattattaggtggtggttaccactta

SEQ ID NO: 271874 - DNA, 876 bp, Unknown
  Bacterial polypeptide expressing nucleotide sequence isolated from the Sargasso Sea
cggcattgacacatcggctgccctcgaatcaccaggtgtattggccgtctatacgggcgctgatattgaggcggatggcacagttcagcatcttgatactcctggtgccagtgccgtcgcacccgcccccatcgtcgtgccgccgcgcgaacttctcgcttccgatactgttcgattcgtgggcgataacattgcctttgtagtagctgagtcgttggatcaggctcgagatgcggccgatctcattactgttgactatgaggatttaccggtcgttacggatcccgaagcagcagttgaggatggcgctccactgatctgggacggcgcagccaataacgtatgttgtacgtggaccaaaggtgatgagactggtgtagaaagtgcgttttctagggcgcaccacatcacgactgtgagactcattaacaatcgcttggttgttaattcaatggagacaagaggcgcgctcggggactacgacccggggatggataagtacaccttgtacgccacgacccaaggcgccaatctcgcccggaactggctggcgccgtccctcaaggtgccgatcagcgatctccgcgtcatcacgccggacgtcgggggtggcttcgggatgaaggtcatggtgtatcccgagtatattctggtctgctgggcggcgcggcgtcttggccgaccggtaaaatggattggtgatcgatcagatgcctttctctctgactctcattccagagatcatgtaaccaccgttgagcttgctctggacgagaatgccaagttcctcggtattcgggccaataccattgccaacatggggggatgtttatctacgatggcacccttggtttcaaccgccgcaagttcgaatct

SEQ ID NO: 271875 - DNA, 115 bp, Unknown
  Bacterial polypeptide expressing nucleotide sequence isolated from the Sargasso Sea
agccgaaattacagaagttggacaggttttgtccgttggagatggtatagcaagagtttatggtttagacaatgtccaagcaggtgaaatggtagagttcgtagatggatctaaa

SEQ ID NO: 271876 - DNA, 511 bp, Unknown
  Bacterial polypeptide expressing nucleotide sequence isolated from the Sargasso Sea
gatacagctggttctaaagctaagccttatttcccattcatatttagcctatttatgttcgttcttttctgcaacatggttggtatgcttccatactcattcacagttacaagtcatattattgtgacacttataatggctttattcatttttgtagctgtaacaattattggttttgctaaacatggttttaaatacttaagtatttttgtgcctagcggtgtcccagctgttttattacctttgattactatcattgaaattatttcatatttaagtaggcctgttagtttgtctgttcgtttatttgctaacatgatggcaggacacacaatgctaaaagttttcggaggatttgtggtaagtttaggaatattaggtgggtggttaccacttagtttttcagtagcattaactggcttggaaatattggtagcgtttttacaagcttatgtttttgcaatattaacctgcatctatttgaatgatgcattaaatttacaccattaaa

SEQ ID NO: 271877 - DNA, 129 bp, Unknown
  Bacterial polypeptide expressing nucleotide sequence isolated from the Sargasso Sea
gggaaatccaatagacggcaagggagcactcgataaaggggtgaaaaaaagtagaagagaagtaaaagctccaggaataatccccagaaaatcagtcaatgaaccaatgcaaactggacttaaatcagt

SEQ ID NO: 271878 - DNA, 319 bp, Unknown
  Bacterial polypeptide expressing nucleotide sequence isolated from the Sargasso Sea
atggcaaatcttaaagagattagagatcgaatagtttccgttaaaaatacaagaaaaataacggaggccatgagacttgttgcagctgcgaaagttaggagagctcaagatcaagttcttaagagtagaccttttgcagataaacttgcacgagttttagaaaatattcaatctagagtacaatttgaggctgtagactctcctcttttatcaaagagagaagtaaagagtatcaccttggtatgtataactgcggatagaggtttatgcggtggctacaacacgaatattataaaaaaggtagaaataagatacgcag

SEQ ID NO: 271879 - DNA, 163 bp, Unknown
  Bacterial polypeptide expressing nucleotide sequence isolated from the Sargasso Sea
tatgacaactaaattaggaaaaataacacaagtaattggtgccgttgttgatgttcaatttgaaggtcatttaccagaaattttaacagcattggaatgtgacaattctggaaataaattagtgttagaagttgctcagcatttaggagagtcgacagttaga

SEQ ID NO: 271880 - DNA, 310 bp, Unknown
  Bacterial polypeptide expressing nucleotide sequence isolated from the Sargasso Sea
atgaaatatataaaatatttttttcaatttttactagcaattataagtttcatattttttaaaattttaggtgttaataattcatcaaatttaagtggtaaaatatttgaatttataggtccatattttagatctaaaaaattaatatactctaatatatctaaagcttatccaaactcagatgaaaaagaattaaaaaaaataacaaaagcgatgtggaataattatggaagagttttttcagagtatatgtttataaaagattttagaagcggaaaactatcagataaaattgaaatagtggaaaaga

SEQ ID NO: 271881 - DNA, 783 bp, Unknown
  Bacterial polypeptide expressing nucleotide sequence isolated from the Sargasso Sea
gatgagtaaaaatactgatgctgatgtaatagtagttggtctgattggggaaagaggccgagaagtaggtaagtttgttaatgaaattcttacaagtaaatcaaaaaatcgaacagtagtagtcgcagtacctgccgatagatctccacttctaagaattagaggagcaaacagagcaactgcaattgctgaattttttagaagcttaggaaaaaatgttttattaatcatggactctcttactagagtagctcatgctaggagagagataggtttagcactaggcgaacaaccaacagctaaaggataccccccttctgttgtttcattaattcctaaactagtagaaagatcaggaacaggaattggaaaacaagggagtgtaactgcattttatacagtcttagcggatggtgatgatgctaacgatccagttgttgatactgctagagcaatacttgacgggcacattttactatcaagagaaaatgctgaactcggaatttatccagctcttgacattccaaaatctattagtcgagttatgacagaaataacttctaaagaacatcaggaacttgctaataaattcaaaaagttggtttctatttatttagaaaatagagatttagtactaatgggaggatattctccaggtcaagatttggatcttgatgaagccgtaaaccaatggcccaacttagtttcatttttaaagcaaaccgaagataccaaagcagattttttaagttcattaaatgaattaaaaaaaataatggctgg

SEQ ID NO: 271882 - DNA, 772 bp, Unknown
  Bacterial polypeptide expressing nucleotide sequence isolated from the Sargasso Sea
tttttaagcattaaaaacggtaataaacaaaattcagttttctcttctaaagagatggaaaatcgtctcagtaagctccgatcaaatatggagaaagagaatattgatttaatcttatttacgtctattcacaacattaattattacaatcactttgtttattgctcttttggaagactttacggtcttatagttaaaaaggataagcttaaatcaatatctgcaaatatcgatggagggcagcccaggagaagaggttttggggacaacattatttatactgattgggaaaaggataattttttcaaagtagtaaaaaatgaaataaagaataaggggcgaattggcatcgaatatgatcatattaattatgaaaatcttaaaaaactgcagtatttatttccggaagtagaatttgttgatatctcaaaaatgtctatgcggcaaagaatggtgaaatctaatgaagaaattgatcttatcagaaatggtgcgcaagtggctgatattgggggtgcagcatgcgtggaagcaattggagaaggtgtccctgaatacgaaattgcaattcattcaacaagtgttatgattcgggaaattgcacataggtatccggaaagtgacatcatggatacatggacatggttccagtccggaataaatactgatggagcgcataaccctgttacaactagaaaaataaaaaaaggtgatattctaagtctgaactgtttcccaatgattgcaggctactacacagccttagaaagaa

SEQ ID NO: 271883 - DNA, 198 bp, Unknown
  Bacterial polypeptide expressing nucleotide sequence isolated from the Sargasso Sea
aatggaaattaaagcagctgaaatttcatcagtaataaaagatcagattgccaattttgaaaccaaggcagatgtagcagaggttggtaccgtgttaagtgttggagatggtatcgcacgtgtctatggtttagatcaagtacaagctggtgagatggtagaatttccaggtggaattaaaggtatggcccttaatct

SEQ ID NO: 271884 - DNA, 397 bp, Unknown
  Bacterial polypeptide expressing nucleotide sequence isolated from the Sargasso Sea
tcatattatagttacatttgtattggcagcatttattttcattggagtaacaattattggatttatgaaacacggattgggatatttgaaattgtttgtgccaagtggagttccaatggttctgctaccattaatagtcattattgagattatttcatatttaagtagaccaattagtttatcagtaagattatttgctaatatgatggctggtcacacaatgatgaaggtatttggaggctttgttattagcttaggaattgtaggtggatggcttccacttagtttttcggttgcacttacaggtttggagatactagttgcttttcttcaagcatatgtatttgcaattttaacatgcatttatttaaatgatgcattaaatctacaccattaa

SEQ ID NO: 271885 - DNA, 129 bp, Unknown
  Bacterial polypeptide expressing nucleotide sequence isolated from the Sargasso Sea
tatggcaagtttagatgatctaaaaaagagaatttcgagtgttataatcacacaaaaaataacaaaagctatgaagatggtagcagccgccaaactaagaagagcacaagaaagtgctgaaaaagggag

SEQ ID NO: 271886 - DNA, 187 bp, Unknown
  Bacterial polypeptide expressing nucleotide sequence isolated from the Sargasso Sea
attcttctctcagccgttcttcgtcgcggaacaattcaccggtaactcaggcaagtttgttagccgtgaagaaactgtacgcagctttaaagcaattcttgatggcgagtacgacgatctaccagaggatgctttctatatggtgggcagcattgaagatgccattgagaaagcgaaaacgatttaa

SEQ ID NO: 271887 - DNA, 474 bp, Unknown
  Bacterial polypeptide expressing nucleotide sequence isolated from the Sargasso Sea
ttatattttctctattcatgtttgttttattttgtaacatgtttggaatgataccttatactttcactgtaaccagtcacatcattgtaacatttgtgctcgccacgtttatatttattggagtgactgtaattggttttattaaacatggatttgggtacttaaaattatttgttccaagtggagttccagcagttttacttccattaatcgttgttatagaaattatttcttatttgagtagaccaataagtttatcagttagattatttgctaatatgatggctggtcatacaatgatgaaagttttcggaggctttgtaattagccttggaataattggtggatggcttccactaagtttttcggttgctttaacaggtttggagatcttggttgcttttcttcaagcttatgtttttgcaatcttaacctgcatctatttaaatgatgcattaaatttacaccattaat

SEQ ID NO: 271888 - DNA, 130 bp, Unknown
  Bacterial polypeptide expressing nucleotide sequence isolated from the Sargasso Sea
gtttcattagaagacactataagggcttttaaaggaatattaaatggtgattatgatgatcttccagagcaagctttttatatggttggaacgattgaagaagcagtagaaaaggctaagactttataac

SEQ ID NO: 271889 - DNA, 898 bp, Unknown
  Bacterial polypeptide expressing nucleotide sequence isolated from the Sargasso Sea
ctgtctgacctgcggtcgaggacaacgtatcggaatcatggccggttctggagttggtaaatcagtactgctgggcatgatggcccgatatacggatgcggacataaacgtaatttctcttgtgggagagagaggcaaggaggttctggaatttattgaagacaatctcggtgaagaaggtatgcgccgttccgttgtggttgtagcaacttctgaccagcctcctcttctcagaatgcgcggtgcttatgtggcaacttcaattgctgaatattttcgcagtgaaggaaaagatgtgctgctctccatggattctcttaccagatttgccatggcacagcgcgaaataggactggccgcgggtgaaccaccaacaacaaaaggctttcctccttctgtctttgccttgctgccaagtctgctggagagaacaggcacacatgggggtgctggctcaattacaggattttacacagttcttgttgaaggggatgacacaagtgaccccatcgccgatgcgattcgagctattgttgatggacatatctatctcagtcgtgacattgcggaaaaaggcctttttcccgcaattgacctgctggcatcaacaagtagggttatggttgacgttgtagatcaaaaacaccttgatttgaacctgataatgcgccgtactctggcaacataccgtgaagctgaagacctgatcaatattggagcatatgttcagggaagcaatcctgagatagactatgcaatcacaaaaaaccctttgattcaggaattcgttcagcagggtatgaatgaacagacctcattaaatgagtgcgaagaacgacttcagcagattttcggagacagactggaggaaaaagctgttgaggaagatagttcctga

SEQ ID NO: 271890 - DNA, 208 bp, Unknown
  Bacterial polypeptide expressing nucleotide sequence isolated from the Sargasso Sea
atggaaattaaagcagcagaaatatcgtctgtaattaaagaccaaatagctaattttgaaactaaagcagatgttgctgaggttggaacagtattaagtgttggagatggtattgcgcgtgtatatggtcttgatcaagtacaagctggagagatggtagaattccctggcggcattaaaggtatggccctaaaccttgaaatggata

SEQ ID NO: 271891 - DNA, 505 bp, Unknown
  Bacterial polypeptide expressing nucleotide sequence isolated from the Sargasso Sea
ggtttttttcagaggatcggtggagaggtaatatctcaatctactcatttgggtgatcgcccgcaaatagaagacctccttggtactattaaatctaccattgataagtttctatcaaaagaagttgacgaggtatatattgcatataatagattcatcaataccgttagccaggttccaacgattgataaaatattgccaatttcacctgatgctgcagatgagacacaaaaagaatattcacattattgggattatctatatgagcctgatgctgaagaggttttagaatctttattcaccagatatatagaatcacttacatatagatcagtagttgaaaacatagcttgcgagcaggcctctcgtatggtggcaatgaaatcttcatcagataatgccgctgatctcattggcgagctacaaataatttataacaaaaatagacaagcagcgataacacaagaaatatctgaaattatttcaggtgcagctgcattataat

SEQ ID NO: 271892 - DNA, 124 bp, Unknown
  Bacterial polypeptide expressing nucleotide sequence isolated from the Sargasso Sea
tctgggctttaaagcaatttgtaatggtgaatacgatgaccttccagaggcagcattttatatggttggtggtatcgatgaagtaattgagaaagctaaacaaatggcggccgaagcagcttag

SEQ ID NO: 271893 - DNA, 325 bp, Unknown
  Bacterial polypeptide expressing nucleotide sequence isolated from the Sargasso Sea
atggaaataaatccttcagaagtaacaaaaatattaaaagaacaaattaaaaagtttggagataaagctgaggttacagaggttggtcaagttttatcagtaggagatggtatagcaagaatttatggattagataatgttcaagctggagaaatggtagagttttctgatggctctaaaggaatggcattaaaccttgagagtgaaaacgtaggtgtagtgatttttggtgatgatagagcagttaaagaaggtgatactgtaaaaagaactggtgcgattgttgatacaccatgttgggaaatgaattgcttggtagagtagt

SEQ ID NO: 271894 - DNA, 178 bp, Unknown
  Bacterial polypeptide expressing nucleotide sequence isolated from the Sargasso Sea
catgttgggaaatgaattgcttggtagagtagttgatggtttaggaaacccaattgacggaaaaggtgcgttagataaaagtttaaaaagaagtagggttgaagttaaagctcctggtataattccacgtaaatctgtaagtgaaccgatgcagactggtcttaaatcaattgatagt

SEQ ID NO: 271895 - DNA, 721 bp, Unknown
  Bacterial polypeptide expressing nucleotide sequence isolated from the Sargasso Sea
atgtaccaattcaatgtttataggattggtcctgaaattaaattaggctcagttgatatctctttcactaatgcaagtttatttatggtcattagttctttagctattttgataatttttaatctaggagcaaagaaaaaaactctaatacctgataaactacaattactatcagaactaagttattcctttgtcgccaaaatgattagtgatacagcaggatcaaaagcaaaaccgtacttttcatttattttctcactttttatgtttgtgcttttttgcaacatgtttggaatgataccttacgcatttacagtcactagtcatattatagttacatttgtgcttgcagcatttattttcattggagtaacaattattggatttatgaaacacggattgggatatttaaaattgtttgtaccaagtggggttccaatggttctactgcctttaatagttgttattgaaattatttcttatttaagtagaccaattagtttatcagtaagattatttgctaatatgatggctggtcacacaatgatgaaggtatttggaggctttgttataagcttaggaattgtaggtggatggcttccacttagtttttcggttgcgcttacaggtttggagatattagttgcttttcttcaagcttatgtatttgcaattttaacatgcatttatttaaatgatgcattaaatctacaccattaat

SEQ ID NO: 271896 - DNA, 610 bp, Unknown
  Bacterial polypeptide expressing nucleotide sequence isolated from the Sargasso Sea
atggcagcaaatcctatgtctcaattcgatgtctatagaattggaccagaaattaaagttggaacgtttgatatatcatttacgaacgcaagtttatttatgattttaagcactgtatctattttggtagtctttaacttgggatcaaaaaaaaactcaatactaccaaacaaaatacagttattggcagaactcagctatacctttgtatctaagatgataagtgatacagcaggatcaaaggctaaaccgtactttgcatttatattttctttatttatgtttgttttattttgcaatatgtttggaatgataccttatactttcactgtaacaagtcatatcattgtaacatttatgcttgcagcatttatatttattggagtaactgtaattgggtttattaaacatggatttgggtatttaaaattatttgttccaagtggagtaccagctgttctgcttccgttaattgtagtaatagagattatttcttatttaagtagaccaataagtttatcagttagattatttgctaatatgatggctggacacactatgatgaaagtttttggaggctttgtaattagtcttggaatagttggtggat

SEQ ID NO: 271897 - DNA, 267 bp, Unknown
  Bacterial polypeptide expressing nucleotide sequence isolated from the Sargasso Sea
gatgcattgtgaaatagtgagcgcagaaaaggagcttttttctggtgaaatagagatgttatccgctcgtggaaccataggagagttggggatcatgcctggtcacgcgccattgctgactggtattcagcccggcactgtgattttaaggcttgcagatggtactgaagagattttttttgcgtcaggcgggtttttggagatccagccgggatttgtcactgtgctagcagatgtagcggctcgggctgaagatttggacgaggc

SEQ ID NO: 271898 - DNA, 256 bp, Unknown
  Bacterial polypeptide expressing nucleotide sequence isolated from the Sargasso Sea
atagaaattatttcttacttaagtagaccaattagtttatcagttagattatttgctaatatgatggctggtcatacaatgatgaaagttttcggaggctttgtaataagccttggaataattggtggatggcttccactgagtttttcggttgctttaacaggtttggagatcttggttgcttttcttcaagcatatgtttttgcaatcttaacctgcatctatttaaatgatgcattaaatttacaccattaat

SEQ ID NO: 271899 - DNA, 406 bp, Unknown
  Bacterial polypeptide expressing nucleotide sequence isolated from the Sargasso Sea
atgtcaatttctcttaaagttttagctccgaataaaaatgtttatcaaggagaagctgaagaagtaatccttcccagtacctcggggcaaattggtgttcttccaggacatatttctttagtcacagctatagatattggcgtcttaaggctaagaatgaattctcagtggaaatcaatagctttaatggggggcttcgctgaaattgaatcagatgaagtaatagttttggtaaacaatgcagaaattggatccgaaattaatgttcaaaatgctgagcaagatcttaaagaagctaaattagcaattagcaaattttctgaaaatgaaaaaaatccacaaaagataaaagccttgaaagagatttcgaaggctgaggcgaggattcaagctgcaaaaaactaat

SEQ ID NO: 271900 - DNA, 569 bp, Unknown
  Bacterial polypeptide expressing nucleotide sequence isolated from the Sargasso Sea
aatgatttcactaaaaactaactacgacgccatagtaatcggaggcggacctgctggctcctcaactgctgcattattagctgagaaaggacatgatgtactgatcgtggaaaaagagaaatttccacgctatcatgtgggtgagtctctcatgccattttgttattttccccttgaaaaacttggtctggtagaaacattgaaggaatctgccaaccctcgtaagtattgcgtacaatttgtccgagaggatggttttctctcacagcccttttatttctttcagcactttgaccatccatcctctactacatggcaagtttggcgttcggattttgacaagatgattatggacaaagcccgtgagaacggagcttccgttctggaggaaacgaaagcaaaaaatctgattaaaaaaggggatacctgcgttgcgggagttaaggtagtttccaaagatttgggggagcttgaattaaaagcccctatcgttgtggatgcatccggacgtgattgctttgctgcccacaacaaaactggatggttcgagatccggattaaaaaagtgg

SEQ ID NO: 271901 - DNA, 226 bp, Unknown
  Bacterial polypeptide expressing nucleotide sequence isolated from the Sargasso Sea
aatgtctataaacccttcagaagttactaaattacttaaagaacaaattaaaaattttggtgacaaagctgaagtttcagaaattggaaaagttttatcagttggtgacggaattgcacgagtttacggtttggataatgttcaggctggagaaatggttgagtttgaagatggctctaaaggtatggcgttaaacttagaaaacgaccaatgttggagttgtaat

SEQ ID NO: 271902 - DNA, 831 bp, Unknown
  Bacterial polypeptide expressing nucleotide sequence isolated from the Sargasso Sea
aatgattaatgaaactaatatacataagcatgtcataaattcaattaactttccaattttaataattgataagaataagtttatattaatggtaaatccagctaccgaagatttttttaaattaagctctaaagttttaataaagaaatcaatcgaggaaattcttcctttttcgtccccagttttatctcttatagatagctctattaaaaaagaatcgacatttaaagaatataaagttgatttatcaactcccatttccggatctcataaagatgtagatgttgaggtaaccccagtaatagggttagaaaattattatcaaattattttagcagaggattttcatgaaaagaaattagtacttcaaaatgaaaatcaaaaaaataaaatagcgatgtcaaatatgtctcaaattcttgcgcatgaggttaaaaatcctctctccggcattagaggggctgcgcaaatcttagaaaaaaatgttgaaagtcatgaaactattatgactgatcttataataactgaagtagatagaattagaagacttgttgataatcttcaaatttttgacgcatctactcctattgatctgagaccaattaatatacattcaattctacgtcatgttaaagatgttatgataaattcaagtaataaggaaatcaaaataaaagaagtatttgatccttcaattccagatgttattggcaatgaagatcaattaattcaagtatttattaatcttattaaaaattcaattgaggcattcagtaatgaaccagattccgataatgagattatattatcaactaattatgagcacggata

SEQ ID NO: 271903 - DNA, 322 bp, Unknown
  Bacterial polypeptide expressing nucleotide sequence isolated from the Sargasso Sea
ggtttggctatttaaaattatttgttccagtggagtgcctgcagttttactcccactaattgtagtcatagaaattatttcttatttaagtagaccaataagtttatcagttagattatttgctaacatgatggctggtcatacaatgatgaaagttttcggaggctttgtaattagtcttggaatagttggtgggtggcttccacttagtttttcggttgctttaacaggtttggagatcttagttgcttttcttcaagcttatgtttttgcaatcttaacctgcatctatttaaatgatgcattaaatttacaccattaa

SEQ ID NO: 271904 - DNA, 193 bp, Unknown
  Bacterial polypeptide expressing nucleotide sequence isolated from the Sargasso Sea
attgagtaatcaaggcggagttcaatacagcaagattgctgaaattaaaggaccacttgtaatagttgatggtgtcgacaatgcagcatttgatgagcttgtagaaattgaaacaactgatggtgaaagacgtttaggtaaagtcttagaggttggaaacggcaaagcagttgttcaagtttttgaaggtaca

SEQ ID NO: 271905 - DNA, 337 bp, Unknown
  Bacterial polypeptide expressing nucleotide sequence isolated from the Sargasso Sea
tttataaaacatggtttcggctatcttaaactttttgttccaagtggagttcccgttgtattgttacctttaattactgttattgaagtgatttcttatttaagtaggccagttagtttatcagtacgtttatttgcaaacatgatggctggccatacaatgttaaaagtttttggaggctttgtaataagtttaggattattaggcgggtggttaccacttagtttttcagtagcattaacagggttagaaattcttgtagcgtttctacaagcctatgtttttgcaatattaacctgcatctatttaaatgatgcattaaacttacaccattaaa

SEQ ID NO: 271906 - DNA, 721 bp, Unknown
  Bacterial polypeptide expressing nucleotide sequence isolated from the Sargasso Sea
aatgcaccaattcaatgtttatagaattggcccagaaataaaaatagatcaaatagatatttcatttactaatgcaagtttattcatggtaataagctctttaattatcttgattatatttaatttagggtctgtgaaaaaaaatatcataccaaataaaattcagttgcttgctgagctaagctattctttcatttcaaaaatgataagtgacactgctggttcgaagggaaaaccatatttcggttttatattttcgttatttatgtttgttctattttgtaacattttaggaatgttgccttatgcttttacagtaactagtcatataatagttacctttgtcctagcagcattcatatttattggagtaacagtaataggttttataaaacatggtcttggttatttgaaattatttgttccaagtggtgtccctgttgttttattgcctctaattgtggtcatagaagttatttcgtatctaagtagaccaataagcctttctgtaagactttttgcaaatatgatggctggtcatacaatgatgaaggttttcgggggttttgttataagcctcggattagttggtggatggcttccactaggtttttcagttgcattaactggtttggagatattagttgcttttcttcaagcatatgtatttgcaattttaacatgcatatatttaaatgatgcattaaatttacaccattaa

SEQ ID NO: 271907 - DNA, 306 bp, Unknown
  Bacterial polypeptide expressing nucleotide sequence isolated from the Sargasso Sea
catgggatttaaatatttgaaaattttcgttcccagtggcgtcccagttttacttttgccattaattactgttatcgagataatttcttacttaagcagaccagtaagtttatctgtaagattatttgccaacatgatggctggtcatactatgttaaaagtttttggaggatttgtcataagtttaggtttaataagcggttggttacctcttactttttccgtagcccttactgggcttgaaattcttgtggcttttttgcaagcttacctatttgcgattttaacatgtatttattttaatga

SEQ ID NO: 271908 - DNA, 628 bp, Unknown
  Bacterial polypeptide expressing nucleotide sequence isolated from the Sargasso Sea
atgtaccagttcaatgtttatcggattggtccggaaataaagttaggcgcagttgatatttcttttactaatgcaagcttgtttatggtcattagttctttagctattttgataatttttaatctaggagcaaagaaaaaaactctaatacctgataaacttcaattactgtcagaattaacttattcctttgtagccaaaatgattagtgacacagcaggatcaaaagcaaaaccgtacttttcatttattttctcactttttatgtttgtacttttttgtaacatgtttggaatgataccttacgcatttacagtgactagccatattatagttacatttgtgttggcagcatttattttcattggagttacaataattgggttcatgaaacatggattggggtatttaaaattgtttgttccaagtggagttccaatggttctacttccactaatagttgttattgaaattatttcgtatttaagtagaccaattagtttatcagtaagattatttgctaatatgatggctggtcacacgatgatgaaggtatttggaggctttgttataagcttaggaattgtaggtggatggcttccacttagtttttcggttgcacttactg

SEQ ID NO: 271909 - DNA, 280 bp, Unknown
  Bacterial polypeptide expressing nucleotide sequence isolated from the Sargasso Sea
tattttacttccattaatagtaataattgagataatttcatatttaagcagacctatcagcctttctgttcgtttatttgctaacatgatggctggtcacacaatgatgaaggtatttggaggctttgttataagccttggaataattggtggatggcttccactaagtttttctgttgcattaactggtttggagatattagttgcttttcttcaagcatatgtttttgcaattttaacatgcatctatttgaatgatgcattaaatttacaccattaa

SEQ ID NO: 271910 - DNA, 691 bp, Unknown
  Bacterial polypeptide expressing nucleotide sequence isolated from the Sargasso Sea
gatgggtttgttttttattggcgtctcgatcttgacggctccggccgtagacgtgggtgcctcgatattggatgtttcagtcgtggactcgaactcctcgatcttgactgttccagccgtggcttcaggcgcttcaatcttgactgtttcagctgctgatttgggcacctcaaccttcattatcccactcgtgagctcgggttcctccatcttgactgttccagtcgttgatttgggcgcctcgatctctattgtttcagtcgtggactcgagctcctcgaccctgactattccagccttgagtttggacgctttggttttgactgctccagccttggatttgggcttctcgatctttaccgtgccagcctcagattcgggctcctcgatcttgactgttccagttgtgggtttggacgctttaatctggactgttccagccttggatttgggcgcttcgattttgactgttccaaccttggattcgggcgctttgattctgacgggtccagctttggattcgggcgcggcgattttgacggctccagtcgtcgattcgggcgctgtgatcttgactgccccagccgcgggcccttgcgctgcgattttgactgtcccagtcatagatacgggcgctcctattccctgcatctttccagcaggtctgctgcgagtcctgcacggacagtaa

SEQ ID NO: 271911 - DNA, 736 bp, Unknown
  Bacterial polypeptide expressing nucleotide sequence isolated from the Sargasso Sea
tatggcaagcaatccaatgcaacagttcacagtccataggatcggacctgaaattaaaatcgctgatattgatttatctttcactaatgcgagtttatttatggtgattagtgcatcagtaattcttttacttttattttttggttccaaagaaaagaaaattattcctgataaaattcaactaatttcagaaatgttatatatctttgttgcaaaaatgattagtgacactgctggatcaaaagcaaagccttattttccttttattttcagtttatttatgtttgttttattttgtaatatggttgggatgcttccctactcttttacagttacaagtcacattattgtaacacttattatggcattgtttatttttatagctgtaacaatcattggatttataaaacatggttttaaatatttaagtatttttatcccaagtggagttccaacaatacttttgcctttaataaccgttatagaaattatttcatatttaagtagaccagtgagtttatcagttcgtttgtttgcgaacatgatggctggtcatacaatgttgaaagtttttggaggatttgttgtgagtttaggaatattaggcgggtggttaccgcttagtttttcagtagcattaactggcttggaaattttagtagcatttttacaagcttatgtttttgcaattttaacctgcatttacttaaacgatgcattaaatttacaccattaa

SEQ ID NO: 271912 - DNA, 220 bp, Unknown
  Bacterial polypeptide expressing nucleotide sequence isolated from the Sargasso Sea
tttatctgttagattgtttgcaaatatgatggcgggccatacaatgatgaaagtttttggaggtttcgtagttagcttaggaattgttggaggctggctaccactaggtttttcagttgcattaacaggtttggagatattagttgcttttcttcaagcatatgtatttgcaattttaacatgtatctatttgaatgatgcattaaatttacaccattaa

SEQ ID NO: 271913 - DNA, 676 bp, Unknown
  Bacterial polypeptide expressing nucleotide sequence isolated from the Sargasso Sea
aatgacgagagaattctataaaactggtcaattagttcctgtaactgtacttaaggtcgaaaaagctagggttattcaagttatagaggaagaaaaaagaggatataaagcagttcagcttggatatggaaaagttaaaaattcaaaaataacaaaagctatgaaaggtgtttttgctaaaaaaaatactgaggcaaagaaaaaattaaaagagtttagagtacaagacacatctgcctataaagagggaaacgagtttggtttggaaatatttaaagatattaaatttgtagacacaagatcaaaaacaattggtaaaggttttgctggagctatgaaaagacataattttggtggtttgagagccagtcacggtgtttcaatatctcatagagcacacgggtcaacaggacacagtcaagatccaggaaaagtttttaaaggaaaaaaaatggcaggtcacatgggtgacaagttaagaacaatgcaaaacatagaaataataaaagctgatttggaaaatgaattgctttatttaaaaggatctattccaggttcaaaaaattcagaggtaatggttaaaaaatctgtaaaaaatataaataaaatgacaattagtgaaaaacaagcagctgctgaagaggccaaaaaaacaccagataagaagaaaaaataa

SEQ ID NO: 271914 - DNA, 802 bp, Unknown
  Bacterial polypeptide expressing nucleotide sequence isolated from the Sargasso Sea
catggcaaatcttaaagagattagagatcgaatcgtttctgttaaaaatacaagaaaaattacggaggcaatgagacttgttgcagctgcaaaagtaaggagagctcaagatcaagttcttaagagtagaccttttgctgataaacttgcgcgggtcttagaaaatattcaatctagagtacaattcgaagctgtagactctcctctattatccaagagagaagtaaagagcataaccttggtttgcataactgcagatagaggtttatgcggcgggtacaacacaaatataataaaaaaggtagaaataagatatgcagaattagtcaaacaagggtatcagccaaatttaattttagtaggaaagaaagctattggatattttcaaaatagaaaggatagatatgtaattaaaagtactttcaaagaactagaacaggtacccacagtcaaagattctgagggagttacaaatgagattttagctgaatttctttcagaaaattctgacagggtagaaattatttacacgaaattcatcactcttgttagctgcgcccctgtcgttcaaacattactaccacttgatcctcaaggtattgctgaggaaaatgatgaaatttttaggttgactacaaaagatagtaagttacttgttgaaaaatctaatatggagaaaactgattcagagaagttgccatctgatattgtttttgaacaaagtcctgatcaactattagattcgatattaccattatatttacagaatcaggtactaagagctctacaagagtctgcagct

SEQ ID NO: 271915 - DNA, 223 bp, Unknown
  Bacterial polypeptide expressing nucleotide sequence isolated from the Sargasso Sea
tatgagtaaaggaataatcacacaagttattggagcagtagttgatgttaaatttgagggagaacttccagaaatattaactgcattggaatgcaaaaacggaggtaatcgtttagttttagaagttgcacaacatttaggagagtcgactgctaggactatcgcaatggatgctacggaaggattaaaaagaggagatgaagtagttaatacaaatgcccca

SEQ ID NO: 271916 - DNA, 772 bp, Unknown
  Bacterial polypeptide expressing nucleotide sequence isolated from the Sargasso Sea
ggagagaggcaaggaagttctggaatttattgaagacaatctaggagaagaaggtatgcgccgttccgttgtagttgtggcaacttctgaccagcctcctcttctcagaatgcgcggggcttatgtggccacttcaattgctgaatattttcgcagcgaagcaaaagatgttcttctctccatggattctctcaccagatttgccatggcacagcgcgaaataggactagccgcgggtgaaccaccaacaacaaaaggctttcctccttctgtctttgccttgctgccaggtctactggagagaacaggcactcatggtggtgctggctcaattacaggattttatacagttcttgttgagggggatgacgcaaatgaccccatcgccgacgcaattcgagccattgttgatggtcatatttatctcagtcgtgatattgcggaaaaagggctatttcccgcaattgacctgctagcatcaactagtcgagttatggttgacgttgcagatcaaaaacatcttgatttgaacctgataatgcgccgtactttggcaacataccgtgaagcagaagacttgatcaatattggagcatatgttcagggaagcaatcctgagatagactatgcaatcacaaaaaaccctttgattcaagaattcgttcagcagggtatgaatgaacatacttcattaaatgagtgcgtagaacgacttcagcaaatttttggagacaggctggaggaaaatgctgttgaggaatatagttcctga

SEQ ID NO: 271917 - DNA, 481 bp, Unknown
  Bacterial polypeptide expressing nucleotide sequence isolated from the Sargasso Sea
ggggaaaccgctggcattaactatatgaaggtttttccaactaccgatcccaatattactcttgggatgtctattagtgtttttattctgatgattttctatagcattaaaatcaaaggcgttggtggttttgcgaaagagctttttttgcatccatttggcaaatggatgataccgttcaattttcttttgaaggttgttgaggagttagcaaagccggtttctcttgcgcttcgattatttggaaatctttatgctggtgaactgattttcattctgattgctgtatttacattatctgcaggcgtaaactctttaggagagaatttcacgtcgctaggaaccattacattatttatcatccaggtcattcttgggcttgcctgggcgatttttcacatactgatcattactctgcaggcattcatatttatgatgttgacgattgtctatctgagtatggctcacgaggaacattaac

SEQ ID NO: 271918 - DNA, 730 bp, Unknown
  Bacterial polypeptide expressing nucleotide sequence isolated from the Sargasso Sea
tcccttgtatcctgaagttatcaaccccatgaaacgtaagcgtattaagaaaccgctagatgtaggtataaggtcaattaattcttgtctgacttgtggtcggggacagcgaatcggcatcatggctggttcgggagttggtaaatcagtattgctgggcatgatggctcgatacaccgatgctaacattaacgttatttctcttgtgggggagagaggcaaagaagttctggaatttattgaagacaatctcggtgaagaaggtatgcgccgttccgttgtggttgtagcaacttctgaccaacctcctcttctcagaatgcgtggcgcttatgtggccacttcaattgctgaatattttcgaagtgaagaaaaagatgtgctgctctcaatggattctcttaccagatttgcaatggcgcaacgtgaaatagggttggcagcgggtgaaccaccaacaacaaaaggattccctccatctgtatttgctttgctgcctagtctgctggaaagaacaggcacacatgagggtgcaggctcaattacaggattctacacagtacttgttgagggagatgacgcaaatgaccctatctccgactcaattcgtgccattgttgatggccatatctacttaagccgggatatcgcagaaaaagggatttatccagctattgatctactggcatcaacaagtcgggtcatggtcgatgttgtagaccaaaaacac

SEQ ID NO: 271919 - DNA, 129 bp, Unknown
  Bacterial polypeptide expressing nucleotide sequence isolated from the Sargasso Sea
cgatggataacgctacgagaaatgcaggcgacatgatagacaagttgactattgaatttaataggtctcgtcaggctgtcattactaacgagttaattgaaattatttcgggcgctgaagcgctctgag

SEQ ID NO: 271920 - DNA, 317 bp, Unknown
  Bacterial polypeptide expressing nucleotide sequence isolated from the Sargasso Sea
ttacttaaagttatttgtgccaaaaggcgttcctgctattcttttgccattgatagtagtaattgaagtgatttcttatttaagtagaccagtaagcctatcagttagattatttgctaacatgatggcaggtcatacaatgatgaaagtattcggaggttttgtaattagccttggaatagtcggcggatggttaccgcttggcttttcagtagctttaacaggattggagatattagttgcttttcttcaagcttatgtttttgcaatattaacctgcatctatttaaacgatgcattaaatttacaccattaac

SEQ ID NO: 271921 - DNA, 741 bp, Unknown
  Bacterial polypeptide expressing nucleotide sequence isolated from the Sargasso Sea
tatgatttcttttgaaaatatatctttttcagttgcgggccgtacacttgtcaaaaatagtaccgtgaacatacccagtggacacaaagttgggctcgtggggaaaaatgggacaggaaagacttcactatttagattgatctacggcgaaattaccttggaccagggaaacctgaagttgaataaaaacgctcgtgttggcggagtatcacaggaagtgcctgggagcagcgtaacgttactagatactgtacttgccgctgatagagagaggactgatttactacaaaaagctgaagaagaaacagatccatttaaaatttcggaaattcaaacacgtttagctgatatagatgcttggtctggagaagctagggcatcgacaattttaaacgggttaggatttgatacgcacaaacaaaaacttgcgtgctctgaattttccggtggatggcgaatgagagtggctcttgcggccgttctcttttcaaaacccgatctattattactcgatgagccaagtaactatttagaccttgagggaaccatatggcttcaagcatatatctcaaaataccccagcaccattatattaattagtcatgatcgagccttactaaataattctgtaaactcaattttgcatctggaggacaaggaacttcatctgtactctgggaattatgaatctttcgccaaaacaagagctgcaagactggcacacaaacaggctgaagcaaa

SEQ ID NO: 271922 - DNA, 763 bp, Unknown
  Bacterial polypeptide expressing nucleotide sequence isolated from the Sargasso Sea
catggcaaatcttaaagagattagagatcgaatcgtttccgttaaaaatacaagaaagataacggaggcaatgagacttgttgcagctgcaaaagttaggagagcacaagatcaagttcttaagagtagaccttttgcagataaacttgcacgagtcttagaaaatattcaatctagagttcaatttgaggctgtagactctcctctattatccaagagagaagtaaagagcattgccttggtttgcataactgcggataggggtttatgcggtggttacaacacaaatataattaaaaaggtagaaataagatatgcagaattagtcaagcaagggtatcagccaaatttaattttggtagggaagaaagctattggatattttcaaaatagaaaggatagatatgtaattaaaagtacttttaaggaactagaacaggtacctacagtcaaggactctgaaggaattacaaatgagattttagctcaatttctttcagaaaattctgatagggtggaaattatttacacgaaattcatcactctagttagttgcgcccctgttgttcaaactttattgccacttgaccctcaaggaattgctgaggaaaatgatgaaatttttagattaactacaaaagacagtaagttacttgttgaaaaatcaaatattgaaaaaagtgattcagagaagttgccatcagatattgtttttgaacaaagtcctgatcaactattagattcgttattaccattatattta

SEQ ID NO: 271923 - DNA, 917 bp, Unknown
  Bacterial polypeptide expressing nucleotide sequence isolated from the Sargasso Sea
gaggaataccttggaagagttgtaaatgcttatggacagtctttggatgatggaagcgttataaaaaatgacgaaaaatggccttcaagaggtaaagcttcaaatccattacaaaggtctcaaataaatcaacctttagatgttggagttagggcaattaatggactttttacaataggcagggggcagagaatggggattatagctggctcaggcgtgggtaagagtactttactgggaatgatggcaaaatatacagatgcagaggttgttgttgttggccttgtaggggagcgtgcaagggaggttaggtcttttgttgaagatgtcattctaccagaaactaaagaaagaacagtaattgttgcagaaccagcgggtacagctccattattaagaataagagcagcattaagggcaacttctattgcagaatattatagggaaaaggggaagcaagttttgttgattatggactctttaacaagggtagctcatgcacagagagaaattggcctagctttgggtgaacaggcaacaacaaaaggttaccccccatctgttatggcattaatttctcacttggttgaaaggactgggccaggttcaaaagatgagggctcaataacctctttttataccattcttgctgatggagatgacgtaaacgatccagttgttgatagtgctaaggcaattttagatggtcatattgtgctttcaaggcaattagctgagatgggtgtttacccgtctattgatattgcttcttcaattagcagggtaatgaatcaaattgttgatgaaactcatattaatgctgcggtttcttttaaacgtgccatggctatttacatggaaaacagagatttaattatgatgggtggatacaaacctggtactgacaatgctcttga

SEQ ID NO: 271924 - DNA, 167 bp, Unknown
  Bacterial polypeptide expressing nucleotide sequence isolated from the Sargasso Sea
tatgagtatagaagtaacaacaggtagtgtaatcgaagtaattggggctgttgttgatgtggagtttccacgcaatgcggttcctaaaatatacgatgcactgcggatcgaatcaaataacttaacattagaagttcagcagcaattaggtgacggtattgtccgat

SEQ ID NO: 271925 - DNA, 297 bp, Unknown
  Bacterial polypeptide expressing nucleotide sequence isolated from the Sargasso Sea
aatggaaataaatccgtcagaagtaacaaagatattaaaagagcaaattaagaaatttggagataagactgaagtaaccgaagtaggtcaggttttatcagtaggagatggtattgctagaatttatggtttagataatgttcaagctggtgaaatggtagaattttctgatggttcaaaaggaatggcattaaatttagaaagtgagaacgtaggtgtcgttatttttggtgatgataaatcagtaagagaaggcgatactgtaaaaagaacaggtgcgatcgttgatactccagt

SEQ ID NO: 271926 - DNA, 423 bp, Unknown
  Bacterial polypeptide expressing nucleotide sequence isolated from the Sargasso Sea
ttctcagatccgaaagttctctgcttcaggtagcaggtagggcggctagaaatgtctcaggcttagtaatattgtatggagataaaattacaaaggcaatgaagaacttaattgatgaaacaaatcgaagaagaaatatgcaaattgagcataatgaaaagctaggtttaaaaccgaaaacaatcagaaaatcagtagaggaaattttgacttccacatcggttgcggattctgtagttgatgaaaaagaaaactttaagatcgatgatttcattaaatacgatatttcagaacaaaatagtgaaatgattgtattagaacttcataaaaaaatgatggaatatgctgatggtcttgattttgaaaatgcggcaaaagtaagagatgaaattgaaaaaattcagaaatcattagaggtttaat

SEQ ID NO: 271927 - DNA, 736 bp, Unknown
  Bacterial polypeptide expressing nucleotide sequence isolated from the Sargasso Sea
atggcaacaaatccgatgcatcaatttaaagtttataaaattggtccagaaattgagatatttggaataaatctttcttttacaaatgctagcttatttatgattataagtgctttgcttgtatttgttttgctgatgttaagtactaaagaaaaaaagttaatacctagtaaaatgcaatttattgcagagtctttgtataattttatagctaaaatgataagtgacacagctggaaaaaaagcaaaaccttattttccttttatatttagcttatttatttttatactcttttgtaacatggtgggaatgctaccctactcatttactgtaacaagtcatattatagttactttgacatttgctatatttatttttataggtgtcacaattttaggtttttttattcacggttttaaatatttaaagatttttgttccaagtggtgttccaatagttttgcttcctataattagtatcatagagattatttcctatttgagcagacctgtgagtttatcagtgagactttttgcaaatatgatggcaggtcatacaatgcttaaggtttttggaggttttgttattagtttaggaattgtgggaggttggttgcctttaactttctcagttgcacttacaggattagaaattcttgtagcatttttacaggcttatgttttcgcgattttaacgtgtatatatttaaacgacgcattgaatttacatcattaac

SEQ ID NO: 271928 - DNA, 187 bp, Unknown
  Bacterial polypeptide expressing nucleotide sequence isolated from the Sargasso Sea
ttttatctcaaccgttctttgttgctgaaaattttaacaggtactcctggaaaatatgtgtctcttgaagacaccatcaaggcatttaaaggaattctaaatggtgattatgatcatttgccagaacaagctttttatatggttggaactatcgaagaggcagtagaaaaagcaaagactttataaa

SEQ ID NO: 271929 - DNA, 603 bp, Unknown
  Bacterial polypeptide expressing nucleotide sequence isolated from the Sargasso Sea
tatggcaaatcttaaagaaattagagatcgaatagtttctgttaaaaatacacgaaaaataacagaagccatgagattagtggcagctgcaaaagttaggagggcacaagatcaagttcttaagagtaggccttttgcagataaacttgctcgggttttagaaaatattcaatctagagttcagtttgaagctgtagattctcctcttctatcaaaaagagatgtaaaaacaatttctttggtatgcataactgctgatagaggattatgtggaggatacaataccaacataatcaagaaggtggaaattaggtatgcagaactgattaaacaaggttatgcaccaaatttgatcttagttggtaaaaaggcaataggttatttccaaaataggaaagatagatacacaattaaaagcacatttaaagagctggaacaggtaccaactgcaacagattctgagggtataactagtgaagtcttagctgaatttctttcagaaaattctgatagggtggaaattatttatacgaaattcatcactttagttagctgtgcccctgtcgttcaaacactattgccacttgaccctcaaggaatcgc

SEQ ID NO: 271930 - DNA, 144 bp, Unknown
  Bacterial polypeptide expressing nucleotide sequence isolated from the Sargasso Sea
aatgaatcaaaatggaaaaattattcaagtaatcggagctgttgtagatgttcaattcgaaggagatctaccagaaattttaacagctttagttgctgacaactcaggcaataaattaattttagaagtagctcaacatttggg

SEQ ID NO: 271931 - DNA, 547 bp, Unknown
  Bacterial polypeptide expressing nucleotide sequence isolated from the Sargasso Sea
tagcttagttacaccttttgttgcaaaaatgattaacgacacagcaggttctggagcaaggccttattttgcattcatattttcgttatttatgtttgtacttttttgcaacatgtttgggatgataccttatactttcactgttactagccacataattgtaacatttgttcttgctgcatttatttttataggagtaacaattattggttttattaagcatggttttggatatctgaaactatttgtacctagtggagtgccaattgtattacttccactaattgtagttattgaaattatttcatatttaagtagaccaataagtctatcagtaaggctttttgctaacatgatggcaggtcatactatgatgaaagttttcggaggctttgtaataagtctcggaattgttggtgggtggctcccactgagtttttctgttgcattaactggtttggagatcttagttgcttttcttcaagcttacgtttttgcaatcttaacatgcatctatttaaacgatgcattaaacttacaccattaa

SEQ ID NO: 271932 - DNA, 637 bp, Unknown
  Bacterial polypeptide expressing nucleotide sequence isolated from the Sargasso Sea
catgcttataagtgctttatcaatttgtttatttttgtatttcggatcaaaacaaaaaaacatcataccgagtagattgcagcttgtggctgaattgttctataactttattgcaaaaatgattagcgatacagctgggtcaaaagctaagccttatttcccatttatatttaccttgtttatgtttgtgcttctttgcaatatgatcggtatgctaccctattctttcacagtaaccagtcatattatagtaactttagtgatggcaatgtttatatttattgcggtaactataattggttttttaaaacatggcttaaaatatttatcgatatttgttccaaaaggtgtgccagttgtattgttgcctttgataacaattatagaaattatttcttacttaagtaggccagttagtctctccgtcagattattcgcaaatatgatggcaggacacacaatgttaaaagtttttggcagttttgttataagtttgggtttattaggtggttggttaccacttagtttttcagttgcattaactggcttggaaatattagtagcttttttacaagcttatgtttttgcaatcttaacctgcatctatttaaatgatgcacttaatcttcaccattaa

SEQ ID NO: 271933 - DNA, 427 bp, Unknown
  Bacterial polypeptide expressing nucleotide sequence isolated from the Sargasso Sea
tatggaagagccgactcgttctgtgaatacagatttggcattgggtgtgttggtcttcattgtttgccatgcctatggtcttaagaataaaggcttgggtggatatttaaaaacgtatatttctgagccgtttccgtctccgattccaatgagagggtggctttgggtatttgcagtggttaacccggtggtctactttaatttgtttatgaatattattggggtggtttcaacggtcgtttctcattcttttaggctatttggtaatatttttggtggtgggatgattattgtgattgtgtctagtttgttacattattttattgtgcccgtgggattatttgccttttttggcctctttgcaggtttggttcaggcgtttgtcttttccatgttggcagtgacctatattcaacaacaacagtga

SEQ ID NO: 271934 - DNA, 733 bp, Unknown
  Bacterial polypeptide expressing nucleotide sequence isolated from the Sargasso Sea
atacatggagtaaatgaaagttggccattagctggagaaagtattaatccactcaatagattaccagtgaacagtccactagacgttggagtaagaattataaattcactacttacagttggcaaaggccaaagacttggtattattgcaggttctggtgttggtaaatcagttttattaggaatgattacaagatttacaaccgctgatatagttgtggttggtttaattggagagagaggaagagaagtaggaaattttgtaacttcaaaccttaacgaggatacaaaaaaaaggactgttatggttgtagagcctgcagataaatctcctttattaagaattagggcagcaaatagagctacagctattgcagaatactttagagacaaaggaaaagatgttctacttattatggattcattaacccgtgttgctcacgccagaagagaaattgggcttgctcttggagagcaaccaacttcaaaaggataccctccttcagtaatatctttaataccttcattaattgaaagaacaggatcaggagaagcaggaaaaggaacaataacatctttttacacaattctagcagatggagatgatcaaaatgatccagttgttgatacagcaagagctatactggacggtcatataatgctttctagagatcaagcgcaacttggtatttaccctgcagttgacgtttcatcttcaattagcagagttatga

SEQ ID NO: 271935 - DNA, 415 bp, Unknown
  Bacterial polypeptide expressing nucleotide sequence isolated from the Sargasso Sea
gatgaaagtcgaaatagtaagtgctgaggaagagatctattcaggtactgccgagatggtttttgctccggctgctgagggggaaattggggtggccccaggccatgcccctctcttaactcttttagggccaggagaagtaagagtgaaaatctccaatgaagaagaagcctcgttctacgtttctggcggaatgatagaggttcagccgaagttggtgactatactatcagatacagcttccagagcagaagaccttgatgaggctgcagtgcaagaagctagagatgcagcgcagaagctgtttgaagctggaggtgctagtatggattacgcaaaagcgagagcacagttagcggaaactgcggctcagataagagctattcaaaggcttcgccgtagagcaggacgttaa

SEQ ID NO: 271936 - DNA, 145 bp, Unknown
  Bacterial polypeptide expressing nucleotide sequence isolated from the Sargasso Sea
atggaaattaaagctgcagaaatatcgtctgtaattaaagaccaaatagcaaattttgaaactaaagcggatgttgctgaagttggaacagtactaagcgttggagatggaattgcacgtgtgtatggtcttgatcaagtacaag

SEQ ID NO: 271937 - DNA, 611 bp, Unknown
  Bacterial polypeptide expressing nucleotide sequence isolated from the Sargasso Sea
tatggcagcaaacccaatgacccagttcgaagtttatagaattggtccagaaattaaaataggggcatttgatatttcatttacaaacgcaagtttgtttatggttgtaagctcattagctattttaattatttttaatttaggttcaaaaaaaaattcaatgctacctaacaaaatacaactgttgtctgaactaagttatacttttgtatctaaaatgattagtgatacagctggttcaaaagctaaaccatattttgcatttatattttcattatttatgtttgttcttttttgtaacatgtttggtatgatcccatatactttcacagttacaagtcatattattgtaacttttgtgttagctgcattcatttttattggagtaactataattggatttattaagcatggtttcggatatttgaaattatttgtacccagtggagtgccaattgtattgcttccattaattgtagttatagaaatcatctcatatttaagtcgacctgttagtttgtcagtaagactttttgcgaatatgatggcaggtcatactatgatgaaagttttcggaggctttgtgataagtcttggaatagtcggtggat

SEQ ID NO: 271938 - DNA, 601 bp, Unknown
  Bacterial polypeptide expressing nucleotide sequence isolated from the Sargasso Sea
atggcagcaaatccaatgacacaattcgaggtttacagaattggtcctgaaattaaaataggtaattttgatatttcatttacaaatgcgagtttgtttatggttgtaagttccttagcaattttgataatttttaatctaggttctaaaaaaaactcaatgcttccaaataaaattcaattacttgcagagttaagttattcttttgtatcaaaaatgattagtgatactgcaggatctaaagcaaaaccttacttttcatttattttttcattatttatgtttgttcttttttgtaatatgtttggaatgataccgtatacttttactgtcacaagtcacatcattgttacttttgttctagcagcatttatctttattggagtaacaattataggattcataaaacatggttttggttatttgaaattgtttgtgccgagtggggttcctgtaatactacttcctttaatagtcattattgaaataatatcttaccttagtcgacctataagtttatctgttagactttttgcgaacatgatggcaggtcacactatgatgaaagttttcggaggctttgtgataagtcttggaatag

SEQ ID NO: 271939 - DNA, 610 bp, Unknown
  Bacterial polypeptide expressing nucleotide sequence isolated from the Sargasso Sea
tccatatctcctctcaagtttagtaaaagtgaaaattgtatcattaaagatttatccctagaaatttacaaaggtgaatttcttggcgtaattggaaaaaccggaagcgggaaaacaacacttgggaaattgtttagtaatatgttacctgtagacctcattcttaaaaaaggaactatagcttatgaaatagaaaaagagaaaaatgttaatcaaaaattaaaggggaatattgtgtccatggtttttcaggacccaatgacatcattaaacccgttacaaactataaaggatcaatttatcttaattttaaacaaaagatttaattatgaaaatgacctagttataattgagacaaaaaagtggctgaataaggttagggttttaaatgcattagacaaatatccgcaccaactgtctggaggtcaacttcaacgaattatgattgctttagcaattgcaattaaacctcagttaatcatcgctgatgaaataacgacggctttagatgctaatttaaaatatgagattataaacttattaaatgttttaagactagattcaagaattgctctactctttattacccatgatctagtcctagcaaaac

SEQ ID NO: 271940 - DNA, 621 bp, Unknown
  Bacterial polypeptide expressing nucleotide sequence isolated from the Sargasso Sea
ctaccatattgttatttttatatttaggatctaaagaaaaaagaattgttccaaataagttgtctcttttggcagaaatgtcttacacttttgtagcaaaaatgattagtgatacagcgggatctaaagctaaaccttatttccctttcatatttagtttatttatgtttgttttattttgtaatatggtaggaatgcttccctactcatttacagtaactagccatattatagttacattaataatggcattattcatttttatagccgtgacaattattggatttatcaaacacggctttaaatatctaagtatttttgtccccaaaggtgtaccaacaattcttctgccgttaataacggttatagaaattatatcttatttaagcagacctgtaagtttatcagttagattatttgcaaatatgatggcgggacacacaatgttaaaagtttttgggggatttgtagtaagtttaggaatattaggtgggtggttgccacttagtttttcagtagcattaactggtttggaaatcttagtagcatttttgcaagcttatgtttttgcaatattaacctgcatctatttgaatgatgcattaaatctacatcattaat

SEQ ID NO: 271941 - DNA, 273 bp, Unknown
  Bacterial polypeptide expressing nucleotide sequence isolated from the Sargasso Sea
aatgtctgaattaggaaaaataaaacaaattatcggagccgttatcgatgtcgagtttgggaaagagcaaattccaaatatttacgatgcattagttgttcaggaaaacaatcttgttttagaaacacagcaacaacttggcgatggagttgtaagaacagtagcaatgggtactactgaaggtttaaaaagagggctagatgtaacaaatactaaagcacctataagtgtgcctgtaggagaaaagactttaggtagaattatgaacgtcct

SEQ ID NO: 271942 - DNA, 246 bp, Unknown
  Bacterial polypeptide expressing nucleotide sequence isolated from the Sargasso Sea
tttcagaagaagaccgcattcttgtaggacgtgcacgtcggatccagcgcttcttgtcacagaacacattcgtggcaaaggtctttactggtatcgacggttcattcgttcctctcagcgaaaccatcgaagcattcgaagctcttgctgacggaaagtatgaccatattccagaacaggcattcttcatgtgcggtggtctcgatgatgtcgagcgcaaggctgcagaactggctaagaactaaa

SEQ ID NO: 271943 - DNA, 218 bp, Unknown
  Bacterial polypeptide expressing nucleotide sequence isolated from the Sargasso Sea
atcagttcgattgtttgctaacatgatggcaggtcacactatgttaaaagtttttggaggatttgtaattagtttaggaatattaggcggttggttaccgcttagtttttcagtagctttaactggcttagaaatcttagtagcatttcttcaagcttatgtttttgcaatactaacctgcatctatttaaatgatgcattaaatttacaccattaat

SEQ ID NO: 271944 - DNA, 265 bp, Unknown
  Bacterial polypeptide expressing nucleotide sequence isolated from the Sargasso Sea
atagtggtaattgaagttatttcgtatttaagtagacctgtaagtttatcagtaagattgtttgcaaatatgatggcaggtcacacaatgatgaaagtattcggaggctttgttataagtcttggaatagtcggtggttggttgccactaggcttttcagtagctttaacaggcttggaaatattagtagcttttctccaagcttatgtttttgcaatattaacctgcatctacttaaatgatgcattaaatttacaccattaac

SEQ ID NO: 271945 - DNA, 250 bp, Unknown
  Bacterial polypeptide expressing nucleotide sequence isolated from the Sargasso Sea
aatgacaattaatccttcagaagttacaaaactattaaaagatcaaattaagaattttggtgaaaaagctgaagtttcagaaattggaaaagttctatcagttggagatggtattgctcgagtctatggcttagataatgttcaggcgggcgaaatggttgagtttgaagatggctctaaagggatggctctaaatttggaaagcgataacgtcggtgtagttattttcggtgatgatagaaagattaaa

SEQ ID NO: 271946 - DNA, 721 bp, Unknown
  Bacterial polypeptide expressing nucleotide sequence isolated from the Sargasso Sea
aatgacacaattcgaagtttatagaattggtccagaaattaaaataggcacatttgacatttcttttacaaatgcaagtttatttatggtttttagctctttagcaattttgattattttcaatttgggttcaaaaaaaaattcaatattgccaaataaaattcagctgttggctgaacttagctactcttttgtttctaaaatgattagtgacaccgcaggttcaaaagcaaaaccatatttttcatttattttttcattatttatgtttgtacttttttgtaatatgtttgggatgatcccatacactttcactgttacaagccatataatagtgacttttgtgctcgcttcatttatttttattggggtaacagtaataggatttataaagcatggctttggttacctaaaattgtttgttccaagtggagtaccagtcatactactccctttaatagtggttatagaaattatatcatatttaagtcgaccaattagtttatctgtaagactgtttgcaaatatgatggctggacatactatgatgaaagttttcggaggttttgtaataagcctcggaattgtcggtggatggcttccactgagtttttcggttgctttaacaggtttggagatcttagttgcttttcttcaagcatatgtttttgcaatcttaacctgcatctatttaaatgatgcattaaatttacaccattaa

SEQ ID NO: 271947 - DNA, 199 bp, Unknown
  Bacterial polypeptide expressing nucleotide sequence isolated from the Sargasso Sea
gctaatatgatggctggccatacaatgctaaaagtttttggcggctttgtcttagtgttaggtgcagcaggagttctaccaattttaattacggtagcgctaacagggctagaagtagtagtagctattttacaagcatatgtttttactattctctcgtgcctttatcttaacgacgcctttcatccaggtcactaaa

SEQ ID NO: 271948 - DNA, 723 bp, Unknown
  Bacterial polypeptide expressing nucleotide sequence isolated from the Sargasso Sea
caatgtaccaattcaatgtttatagaattggtcccgaaattaaattaggctcagttgatatctctttcactaatgcaagtttattcatggtcattagttctttagctattttgataatttttaatctaggagcgaaaaaaaaaactctaatacctgataaattacaattattatcagaattaagttattcctttgttgccaaaatgattaatgatacagcaggatctaaagcaaaaccctacttttcatttattttctcattatttatgtttgtacttttttgtaacatgtttggaatgataccttacgcatttacagtcacaagccatatcattgttacatttgtgcttgcagcatttattttcattggagtgacaattattggatttatgaaacatggattgggatatttgaaattgtttgtaccaagtggagttccaatggttctacttccactaatagttgttattgaaattatttcgtatttgagtagaccaattagtttatctgttagattgtttgctaatatgatggctggtcacactatgatgaaggtatttggaggctttgttataagcttaggaattgtaggtggatggcttccgcttagtttttcggttgcacttacgggtttggagatactagttgcttttcttcaagcttatgtatttgcaattttaacatgcatttatttaaatgatgcattaaatctacaccattaat

SEQ ID NO: 271949 - DNA, 364 bp, Unknown
  Bacterial polypeptide expressing nucleotide sequence isolated from the Sargasso Sea
atggcaaattctggtaaaataactcaaataattggtcccgtggttgatgttgcttttgaaaaagaaaacacacttcctgaaattttaaatgcattagaaataccaaaagatgatggttctagtcttacccttgaagttcaacaacatttaggtgaagatagagtaagaacaatagcaatgtctggtactgaaggtctcaaaagaggaatgaaagttatagatactggaaaagcaatatctatgcctattggtgaagatattaatggcagattatttaatgttgtaggttctgcaattgatggtatgggtcaacctaaaggtaaagacaggcttcctattcatagagatgcgcctaaattgaaga

SEQ ID NO: 271950 - DNA, 862 bp, Unknown
  Bacterial polypeptide expressing nucleotide sequence isolated from the Sargasso Sea
atcgacggttttacaacgattggtaaaggccaaaggatgggtatttttgccggctctggagttggtaagagtgttttattgagcatacttgctaaacaatcaaaggctgatgttaatgtaattgccttgattggagaaagaggtagggaggtaaaagagtttattgataaaaatttaggcgaagaggggcttaagaaatcagttataattgtttcaacttcagatcaagcacctatgctgagattaaaagcggctcttactgcaactgcgatttctgaatactttcgtgaccaaggaaaagatgttatgtttatgatggattctttgacacgcgtagcgatggcacaaagagaaattggtttggcggttggagaaccgccaacgacaaaaggatacactccttccgtattttcacttttaccaaaaataatagaacgagctggaaatggcacagtcggctcaattacaggtttatatactattttaattgaaggcgatgacctagatgatccaatcggtgatacgtcaagatcacttctggatggccatattgtcttatcaagaaagttagcctcaatgggacattatccacctgttgatgttttaaatagtattagcagattagcaaacgacattattagtgatgggcacaaagatcaaaagaaaaaaatattatctcttatgtcggcttacaaagaaaatgaagatttaatttcagttggagcatatgaagaaggttcaaataccttaatagatgaagctattaaagctaaagaaagtataaatgattttttaattcaaaatattaaagatagtaccgattttcactacatgcaaaatgagatgaacaagttggtctaat

SEQ ID NO: 271951 - DNA, 721 bp, Unknown
  Bacterial polypeptide expressing nucleotide sequence isolated from the Sargasso Sea
gatgaatcagtttcaagtatataaaatgggtcctgaaattaaattgggaaaccttgacttgtcttttaccaatgcaagtttatttatgcttataagtgcattaagtatagctcttctgcttttttttggctctaaaaataaaagtattattccaaacaagattcaattaattgctgaattgatttataattttatttctaaaatgataagcgatactgctgggagtaaagctaggccttattttccttttatttttagtttatttatgtttgttttattctgtaacatgattggcatgctgccatatgcttttacagtaacaagccacataattgtaactctagtaatggctttatttatttttatttcagtaactataattggttttataaaacatggatttaaatatttaagcatatttgttccaaaaggggttccaattgttttactgcctcttattaccattattgagataatatcttatttgagtagacctgttagtctatcggttagactttttgctaatatgatggcaggtcatactatgctaaaagtttttggaggtttcgttattagtttaggtctgctaggcggatggttaccgcttagtttttctgttgcattaactggtttagaaatattagttgcttttttgcaagcttatgtttttgcaattttaacctgcatctatttaaatgatgcattaaatctacaccattaa

SEQ ID NO: 271952 - DNA, 150 bp, Unknown
  Bacterial polypeptide expressing nucleotide sequence isolated from the Sargasso Sea
gagcaagaatgactgcgatgcacaaagctactgataatgcatctgagttaagagatcagcttaagctaacttataataaagcaaggcagacagcaattacaaatgaaatcctcgaaattgtaggaggtgcagaagcgctaaactcttaag

SEQ ID NO: 271953 - DNA, 334 bp, Unknown
  Bacterial polypeptide expressing nucleotide sequence isolated from the Sargasso Sea
tggttacttaaagaaattctttaatttttctagccctatcaatgcttttgttggaatcctggagctactttcagaatttattcgagttatttcatttacctttaggctattcggtaatattttcgcaggggaagttctcatattaatgcttactttccttataccgttcgttatcgtagatataatttacggtctcgaactatttgtcggttttatccaagctgcggttttcgcacttctgactttggtgtttgccatgatggcagttgaacaccatgatgaggaagaacatgatgatgctgtagcgccagaaaacgaagggacgacagtgtaa

SEQ ID NO: 271954 - DNA, 745 bp, Unknown
  Bacterial polypeptide expressing nucleotide sequence isolated from the Sargasso Sea
gtaggtaaatttaaacaaggtattgatttttctggccaagaagaaattattaaaaaagcattttcaataaaaaaagctccagcagtagctataaccgttaactcaccaggtggatcacctgtgcaatctcatctaatttataagtatataaaggaccaggcaaaaaaaaataaaaaaaaagtaattgtttttgctgaagatgttgcggcttcaggaggctatttaattgcatgttcaggagatgaaatttatgcaaactcaagttcaattgttggatcaattggagttatatattcttcttttggatttaaagatttaattcaaaaaataggagtacaaagacgagtttatacagcaggaaaaaacaaaagtactttagacccctttcttgatgaaaaaaaagaagatgtagaaagattaaaaaaaatacagctagatctccacgatgattttattgatgttgttgagaaaagcagaggttctaaacttaaaaaagatactggtattgaattattttcaggagaattttggtcaggaaagaaagcgaaagatttaggattaattgatggcataggaaatgctgatgaaattttaaaaaaaaaatatggtgaaaatgtaattattaaaaaatttgaaaaaactaaagggtggctagctaaaaaactttcatcatcaggggatcagactgataagctaattggtattttggaggaaagatctatttggcagagatatggtttctaaa

SEQ ID NO: 271955 - DNA, 181 bp, Unknown
  Bacterial polypeptide expressing nucleotide sequence isolated from the Sargasso Sea
gatggcagccatgacagtacagcttgatatagtaagcgcagagagcagcatcttctcaggtcgcgtagctagcctacaagtgaccggttctgaaggtgagttgggcatcatgcatggccacgctccactgttaagctatatcaaacctggcatggcgcgcatcgtcaaacaagacggcagc

SEQ ID NO: 271956 - DNA, 865 bp, Unknown
  Bacterial polypeptide expressing nucleotide sequence isolated from the Sargasso Sea
gatgggtctatcgatcttccatcaaactataaaattgggagtgttgagcaagaagctccatcttcaaaaatttctttaatggaaacagtgttgtcgcatgataatgaaaggtcagcattattaaaagaatctcttcaaaatctagagcctgataggattgctgaaattcaacttaggctatatgatattgatgctttttctgctgaggcaagagcttcaaaaattttatcaggacttggttttaatgaattagaccaaaaaaagaattgtagtgaattctctggtggatggagaatgagagtggctttggcttcagtattattttctcaaccagatatattgttgttagatgaacctactaattatttagatttagaaggtactatttggttggaaagtttcttgtccacttatccatcaactacattaattatctctcatgatagagatctattgaataattctgtgaatggaatacttcaccttcatgatttaaaattaacaaattatcgaggaaattttgatcaatttgaaaaagaactgagtaataaaattcatctacaaaaaataatgataaagaaacaggatgctgaaaaaaaacatataaaaagttttgtagatagatttcgttataaagcttctaaggctcgtcaagcccaatctaggttgaagaaattagaaaaaatggaacaagttacaaacttatctttccaacctgttttgccatttaaatttccttgtcctaaggaattagcctctccattaatcacgattgaaaatggttctataggttatgataaaaaagttattttgagtaatataaatatatttttaggtaatgatgatagaattgctctactaggct

SEQ ID NO: 271957 - DNA, 583 bp, Unknown
  Bacterial polypeptide expressing nucleotide sequence isolated from the Sargasso Sea
tatggcggccaatccaatgagtcaatttaaggtctacagaatagggcctgaaattaaatttgggaacattgatttatcatttacaaatgcaagtttgtttatgttaattagtgctttcacaatttgtttatttttatactttagttcaaaacaaaaaagcataattccaagcagattacagttaatttctgagattttttataattttatcgcaaaaatgataagtgatactgctgggtcaaaagcaaaaccttatttcccatttatatttacgttgttcatgtttatattgctttgtaatatgatagggatgttgccttattcttttacagtaacaagccatataatcgttacactaattatggcattatttatatttgctgcagttacaattataggatttgtaaaacatggttttaaatatttatcaatatttgtacctaaaggtgttccagttgtacttttgcctttaattacaataatagagattatttcttatttgagtaggccagtcagtctttctgtacgattatttgccaatatgatggcaggccacactatgttaaaagtttttggtagtttt

SEQ ID NO: 271958 - DNA, 202 bp, Unknown
  Bacterial polypeptide expressing nucleotide sequence isolated from the Sargasso Sea
atggcaataaatccatcagaagttacaaaattattaaaagaacaaataaaaaattttggtaaaaaagcggaagtctctgaaattggaaaagttttatctgtcggagatggtattgccagagtttatggactagacaatgttcaggctggtgaaatggttgagtttaatgatggttctaaaggtatggcattaaaccttgaga

SEQ ID NO: 271959 - DNA, 670 bp, Unknown
  Bacterial polypeptide expressing nucleotide sequence isolated from the Sargasso Sea
tatggcagcaaatcctatgtctcagtttgatgtttatcggattggacctgaaataaaagttggagcatttgatatatcatttactaatgccagtttgtttatgattattagtacagtttcgattttacttgtgtttaactttggctcaaaaagaaattcagtattaccaaataaaatgcaactactagcagagcttagttatacatttgttgcaaaaatgataagtgatacagctggatcaaaagcaaaaccctattttgcttttatattttctttattcatgtttgttctattttgtaacatgtttggcatgatcccttacacatttactgtaacgagtcatataattgttacatttattttggcgtcatttatttttattggagtgacaattattggctttatcaaacatggatttggttatttaaaattgtttgtacctagtggagtaccagctgtgctactacccttaatagtagtaatagaaattatatcttatttaagtagaccaataagtttgtcagtccgattatttgcgaatatgatggctggtcacacaatgatgaaagttttcggaggctttgtgataagtcttggattagtcggtggttggcttccactgagttttttcggtgcattaacaggtttagagatcttagttgcttttctt

SEQ ID NO: 271960 - DNA, 457 bp, Unknown
  Bacterial polypeptide expressing nucleotide sequence isolated from the Sargasso Sea
tatgtctattagtgcaactgaaattagtgatttaattaaaaagaagattaaagaacttgatctagataccgaagcacgtactgagggcacggttgttagtcttgccgacggtgttgctagaatacatggtttaagcgatgtaatgcagggggagatgatcgagtttcctagcaatacgtatggtttagcgttgaatttggaacgtgattccgttggcgcagttatcatgggtagttatgaacatatttctgaaggcgatgttgtaaaatgtacaaagcgtattcttgaagttcctgtcggagatggtttgttagggcgcgttgttgatgcgctaggtaatccaattgatggcaagggtgaaattaatacaaaggaaacttcgccgattgaaaaaattgcaccaggagttatcgcgagaaaatctgtaggccagcctgtcccaacaggccttaaatcg

SEQ ID NO: 271961 - DNA, 79 bp, Unknown
  Bacterial polypeptide expressing nucleotide sequence isolated from the Sargasso Sea
tatagcttttaaaggaatattaagtggagattatgatcatttacccgaacaggctttttatatggttggaacaatttga

SEQ ID NO: 271962 - DNA, 173 bp, Unknown
  Bacterial polypeptide expressing nucleotide sequence isolated from the Sargasso Sea
tgttgctgaagtaggaacagtattaagtgtaggtgatggaattgcacgtgtttatggattagatcaagttcaagctggagaaatggttgagtttccaggcggtattaagggaatggcgctcaatttagagatggacaatgttggtgtatctatatttggtgatgatacaggta

SEQ ID NO: 271963 - DNA, 640 bp, Unknown
  Bacterial polypeptide expressing nucleotide sequence isolated from the Sargasso Sea
tatgctggagctcgcccggcagcgcggcattacgcgaatgagctatgccagctcggtggcagcgcccgccatgggcgacaacgattggctggccaccctctacggcgcgcacaagatctgcggcgagcagatggccgccgtgtactggcaggactggggcgtgccgagcatcggtattcgccccgccattatttacggacccggccgtgatcagggcatgagtgccgcgccgaccattgcgcttatggctgccgaggtgggcgaggcttacaccattcccttcaccggagacgtgggttttgtgtatgtagcagatgccgccgagcgcttcattgccgcagccagccgctcgtttgagggcgcccgtgtgtttgacctggacggtactcctgccaccgtgaccgagatgctggcattactgaataatcattaccctgatgccgcgatcaatgcgaccggcgacccgatgcccttccccgccgaaaccaatagcggcgcgctggagcaacttattggcttgcccgactgtcggccattagctgcaggcattgctgacaccgtcgcgggctttcaggcagccaaggcgcggggcatcgatcttgcggggatgtatcaacacaccttgcggaaaacgccatga

SEQ ID NO: 271964 - DNA, 809 bp, Unknown
  Bacterial polypeptide expressing nucleotide sequence isolated from the Sargasso Sea
cgaggcggcgcgccgacgctgatttccacgcccactctgcatggccgcgtcgtggaagcgcgcggcgtgattgctcgtgtggtgggcgtgtccttgcgcatcggcgaaaaggtgcggctggtacggcccgatacgctcgaagcgcagttcggcgaggtggtgggcttcgcgcacgacggcgcgcttgtcatgccgctcgcggggctcatcgggctgtccgacatcacggaggtgcagggctgcggcgccacctggagcagtgtggaggcgattggactgctcggtcgcgtggtggacggactcggcaatccgctcgacggcagggcgctgccgccgtcgccgtcctcattcgatgcaacccagcctgaaaacgcggccgctacgctcaacccgctcgagcgtccggtgatctccacgccattcgccaccggcgtgcgcgcgatcgacgccatgctgacctgtggcgtcggacaacgcaccggcattttcgcgccagcgggtggcggcaagagcaccatcatgggcatgatcgcgaatggcgcggccaccgatgcggtcgtggtcgcgctgatcggcgaacgcggccgcgaggtggccgagttcatccacgatcacctggcacagcggcgtgaatcgacggtggtgatcgccgccacctctgagcgtcccgccgccgagcgcatcaaggcggcggaactggccgcgcgtgtggcggtgggactgcgcgcgacgggccgcaacgtgttgctgttgttcgactcactgacccgctacgcgcgcgcgttgcgcgaactgggtctcgccgtcgg

SEQ ID NO: 271965 - DNA, 559 bp, Unknown
  Bacterial polypeptide expressing nucleotide sequence isolated from the Sargasso Sea
acaattactatcagaactaagttattcctttgttgctaaaatgattagtgatacggcgggatcaaacgcaaaaccctatttttcatttattttctcattatttatgtttgtgcttttttgtaacatgtttggaatgataccttacgcatttacagtcacaagccatattatagttacatttgtgcttgctgcatttattttcgttggagttacaattattggatttatgaaacatggattagggtatttgaagttgtttgtaccaagtggagttccgatggttctacttcctttaatagttgttattgaaattatttcttatttaagtagaccaattagtttatcggttagactatttgctaatatgatggctggtcacacaatgatgaaggtatttggaggctttgttataagcttaggaattgtaggtggatggcttccacttagtttttcggttgcacttacgggtttggagatactagttgcttttcttcaagcgtacgtatttgcaattttaacatgcatttatttaaatgatgcattaaatctacaccattaa

SEQ ID NO: 271966 - DNA, 736 bp, Unknown
  Bacterial polypeptide expressing nucleotide sequence isolated from the Sargasso Sea
atggcaagtaatccgatgcaacaattcactgtctatagaattggacctgaaatcaaaattgcaggtattgatttatcttttacaaatgcaagtctgtttatggtgcttagcacatcaataattttactttttttatttttgggttctaaagaaaaaaagattgttccaggcaaaattcagttaatggcagaaatgttttataactttgtggctaaaatgataagtgaaaccgcaggctctaaagcaaaacctttcttcccatttatattcagtctctttatgtttgtattattttgcaatatggttggcatgcttccatattcattcactgtaacaagccacataattgttaccttaataatggctttatttatatttattgcagtaactataataggttttgtaaaacacggttttaagtacttaagtatttttgtgcccagtggtgtaccggcagtgcttttgcctttaataactattatagaaattatttcttatctgagtagacctgtaagtttatcagttcgattatttgcaaatatgatggctggtcacacaatgttaaaagtttttggaggttttgtagtaagtttaggaatattgggtgggtggttaccgcttagtttttcagtggcattaactggcttagaaattctagtagcgtttttgcaagcttatgtttttgcaattttaacctgcatctatttaaatgatgcattaaatttacaccattaaa

SEQ ID NO: 271967 - DNA, 559 bp, Unknown
  Bacterial polypeptide expressing nucleotide sequence isolated from the Sargasso Sea
tatggcagcaaatcctatgtcccaattcgatgtttacagaattggaccagaaattaaagttggagcattcgacatatcatttacgaacgcaagtttgtttatgattttgagtactgtatctattttattaatctttaatttaggatcaaaaaaaaattcaatactaccaaacaaaattcaattattagcagaacttagctatacctttgtatccaaaatgattagtgatacagctggatcaaaagctaaaccatactttgcatttatattttctctattcatgtttgttttattttgtaacatgtttggaatgataccttatactttcactgtaaccagtcatatcattgtaacatttgtgcttgcggcgtttatatttattggagtgactgtgattgggtttattaaacatggatttgggtatttaaaattatttgttccaagtggagtacctgcagtattgctccctttgattgttgttatagaaattatttcttatttaagtagacctataagtttatcagttagattatttgctaatatgatggctggtcataca

SEQ ID NO: 271968 - DNA, 835 bp, Unknown
  Bacterial polypeptide expressing nucleotide sequence isolated from the Sargasso Sea
aaaacaaccacaatatcaattaataccaatagaagaagaatacgtagcaattaaaaatgctaatgttcgtcaagccccttttgttggctcccctgttgttgtaacgatcccaaaaaatacaaaagtgtatgttcctggtaaagtgaaaggggaaaactggttagcaattgaaggagaaggagggatcattggatactcatggggtgatctttttcttacgcaacaacaatttgctcaacaagaaaatgatttaaaaaaacaacttgaagaaattgctcaaaatctaaaagaggaagaaccaaaattctttggatcagggacgggtttttatgttaccgaagcaggacatatcataactaatcaacacgtgacgcatggttgcgaatatatgttgcttggcgaggaacaattaaaagttatgagaaatgatgttgttaatgatttggcaattttaaaatcaacaaatccagtgccaaactttcttcgtatttctaaaaaaattactccacttaaaggagaagatattatggttcttggctatccttacggtaaactaacaagctcggagtccaaggttactaagggtatagtaagtgccttacaaggattaggcaacaattatagtcaattccaaattgatgccgctatccaaccaggaaatagtgggggtcctgtatttgacgacgagggagctcttgttggtataacggttgcaactgctgactataaattttatgaagaaaactttaaatctcttccacaaaatatgaattttgctattaaatctacaatgctagagaattttttagcaagcttaggcataacatacgataaa

SEQ ID NO: 271969 - DNA, 607 bp, Unknown
  Bacterial polypeptide expressing nucleotide sequence isolated from the Sargasso Sea
aatggcatcaaacccaatgtaccagttcaatgtatatagaattgggcctgaaataaaaataagcgaagttgatttatcgtttactaacgcaagtttatttatggtaatcagttctttagcggtattaattatatttaatctaggatcaaaaaaaaattctttaattccaaacaaaattcaattgcttgcagagctcagttatacttttgtatcaaaaatgataagtgacaccgctggttcaaaagcaaagccttatttttcattcatattttctttattcatgtttgttttattttgcaatatgtttggaatgataccttacgcattcactgtaacaagtcatataattgttacttttgttttagcagcatttatttttattggagtaactgtaattggttttattaaacatggatttggatacttaaaactttttgtgccaagtggagttccaattgttcttttaccattaatagtagttattgaagttatttcttatttgagtcggcctgtaagcttatcagttagattatttgcaaatatgatggcaggtcataatatgatgaaagtattcggaggttttgtaattagccttggaatagtcggc

SEQ ID NO: 271970 - DNA, 715 bp, Unknown
  Bacterial polypeptide expressing nucleotide sequence isolated from the Sargasso Sea
aatgcatcagttcaatgtttataagattggacctgaaataaaaattaatggtgtggacatatctttcaccaatgctagtttgtttatgcttataagcgcaatttttatatctatttttttattactgggaacaaaagatagaaaaattgttccaggcaagttccaaattgtatctgaaatgctttacaattttatttccaaaatgataagtgacactgctggaaaaaaagcaaagccttatttttcatttatatttagtctttttatttttgtcttattttgtaacatggttgggatgttgccctactcttttacggtaacaagccatattattgttacattagcttttgcaatgtttatttttattggggttactattttaggttttgtaatacatggttttaagtatcttaaaatctttgttccgagtggagtgcctatggttttgcttccaataataatgataattgaaattatatcctatttaagtaggccagtaagtctatcagttagattatttgctaacatgatggctggtcataccatgttaaaagtttttggaggatttgtaataagtttgggattaattgcaggttggttaccacttacattttctgtggctttaactggattggaaattttagtagcttttttacaagcttatgtttttgcaattttaacatgcatttatttaaatgacgcgttaaatttacat

SEQ ID NO: 271971 - DNA, 325 bp, Unknown
  Bacterial polypeptide expressing nucleotide sequence isolated from the Sargasso Sea
ggttttaaatatttgtctttgtttgttcctaaaggtgtaccaattgtattgttacctttaattactataattgaaattatttcttatttaagtagaccagtaagtctttctgtaagattgttcgctaatatgatggctgggcatactatgttaaaagtgtttggaagttttgttataagtttaggtttgttaggtggttggttgccactaagtttttcagttgcattaactggcttggaaatattagtagcttttttacaagcgtatgtttttgcaattttaacctgcatctatttaaatgatgcattaaatcttcaccattaaa

SEQ ID NO: 271972 - DNA, 649 bp, Unknown
  Bacterial polypeptide expressing nucleotide sequence isolated from the Sargasso Sea
tctagtttatttatggtcgtcaggctctttatcaatattattattattatttttagctactaaaaaaaaatctttaattccatctaaaattcagctcgtcggagagatgagctatacatttgtagccaaaatgataagtgatactgctggcgctaatgcaaaacctttttttccatttatttttacattatttatgttcgttttattttgtaacatggttggtatgttgccatattcttttacagtaaccagtcacatcattgtaacttttgttttggcagcagcaatattcattggtgtaactgtgattggttttattaaacatggaataaaatatcttgaactatttgtacccaagggtgtacctgtggttctactgccgttaataataattatcgaagttatatcttatttaagcagacctgtaagtttatcagttagattatttgctaatatgatggccggacatacaatgttaaaagtgtttggcgggtttgttataagcttaggattgttgggtggttggttgccacttggcttttcggttgcacttactggtcttgaaatactagttgcttttcttcaagcctatgtttttgcaattttgacatgcatttacttaaatgatgcattaaatttacaccactaa

SEQ ID NO: 271973 - DNA, 175 bp, Unknown
  Bacterial polypeptide expressing nucleotide sequence isolated from the Sargasso Sea
atggatattaatccttcagaaataacaaaaattttaaaagaacaaattaaaaatttaggagaaaaaaccgaagtatctgagattggaaaagttctttcagtaggtgacggtatcgcaagagtatatggactagataatgttcaagccggtgaaatggttgaatttaaagatgggt

SEQ ID NO: 271974 - DNA, 667 bp, Unknown
  Bacterial polypeptide expressing nucleotide sequence isolated from the Sargasso Sea
gatatctcatttactaatgcgagtttatttatggtaattagttcattggctattttaataatttttaatttggggtctaaaaaaaatttaatgataccaaataaaattcagcttttagctgagttaagttatacatttgtatcaaaaatgattagtgataccgccggttctaaagctaaaccttattttgcatttatattttcattatttatgtttgttcttttttgtaacatgtttggcatgattccttatacctttactgttactagccatattattgtgacttttgtccttgcttcgtttatttttattggagtgacaatcataggatttataaaacatggttttggttatttaaaattgtttgtgccaagtggagtgccaattgtattgcttcctttgatagttattattgaaattatatcatatttaagtagacctatcagcttatcagtaaggctttttgctaacatgatggctggtcatactatgatgaaagttttcggaggctttgtgataagtcttggaatagtcggtggatggcttccgctgagtttctcggttgctttaactggtttggagatcttagttgcttttcttcaagcttatgttttcgcaatcttaacatgcatttatttgaatgatgcattaaatttacaccattaat

SEQ ID NO: 271975 - DNA, 145 bp, Unknown
  Bacterial polypeptide expressing nucleotide sequence isolated from the Sargasso Sea
aatgtcagaaataagaccagatgaaatatcctcgataattagagatcaattatcgaattctaaatcaacaacgcagttagaagagacaggaactgttttgcaaataggtgatggtgtagcaagaatttatggattaaccaatgct

SEQ ID NO: 271976 - DNA, 280 bp, Unknown
  Bacterial polypeptide expressing nucleotide sequence isolated from the Sargasso Sea
tatgtttttttcgttagctgctgttgaagtaggtacacatttatattgggaaatcgccggtttaacagtgcacgggcaagtattactaatcacatggcttgtaattgccattattttaggaatagttgttctgggtacgcttaagctggagcaagttcctaaaggacttcaaaatttcgtggaagcagtttacgaatatgtttctggtattgctaaagaccaacttggtgaagctgaatatcgtccatgggttcctttcgtaggaactctgttcttattc

SEQ ID NO: 271977 - DNA, 276 bp, Unknown
  Bacterial polypeptide expressing nucleotide sequence isolated from the Sargasso Sea
aatgagccaaggcacagtagtacaagtaatcggagccgtaatcgatgtggaattctctagacaggagcttcctaaaatatacgacgctcttgaagttgaaggagaaggtttagttttagaagtccagcagcagcttggagacggaattgttagaaccattgcaatgggtcaaacagagggtctacaaaggggtgcaaaagtctcaaatacaggagacgcggtcaaagtgcccgttggagaaaaaaccttaagaaggattctgaatgtcttgggtga

SEQ ID NO: 271978 - DNA, 184 bp, Unknown
  Bacterial polypeptide expressing nucleotide sequence isolated from the Sargasso Sea
atgagcaatggaatggttacacaaattattggggcagttatcgatgtcgaattcgataaagataatattccaaaagtttacgaggcgcttatggttgatgagagtggtacaacacttgaagttcaacaacagctgggcgacggagtcgttaggacaattgctatgggagcaaccgaaggctaaa

SEQ ID NO: 271979 - DNA, 493 bp, Unknown
  Bacterial polypeptide expressing nucleotide sequence isolated from the Sargasso Sea
aatgttctttaattccttgctaacaaattttgcagcattagaagttggtcaacatctttattggcaaattggaaatatcagacttcatggacaggtatttttgacatcatggattttattaggagctttattagtttttatttctttaggaactaaaaaaatggaaaatgatcctaaaggcattcaaaatttgcttgagtttctttgggattacataagagatcttgctaggactcaaataggtgaaaaagtttatagagattggatgccatttataggtactttatttttattcgtttttgttagtaattggggaggggctttaattccttggagattgattaagttgccaagtggagaattgggagcacctactgcagatataaatacaacaatagccttggcgttattggtttcactttcttatttctatgctggtttaagcaataaaggttggaggtacttcgaatactatgttcacccaactccaatt

SEQ ID NO: 271980 - DNA, 631 bp, Unknown
  Bacterial polypeptide expressing nucleotide sequence isolated from the Sargasso Sea
catgaaacaaattgatatagaaccaaattttgaattggacactcttagtttagatgtagatttacgttgggataatttaccttggatattcgattacaatattgtaactggagacattgcaacaaatcttactggttttacaatcaggaacagtgaagagctagaaactcccaataatctgctaaggttagttaatatatttaacatcaccgactcatttgaaaagcttactaatctagattttagaaagctttacaaaagaggttttagtgcagatagtgttaaaggtaaatttgggataacggaaaaaagtctaaaaattaaagagccaataatactaaaaagtggttcaagtgaatttagttggactggggagatttctagagataaaaaaggaaatttagataaacttaatttagaggtagtaatgactttacctcttagagaatatttgcctgcctatgcctttgttctgggaggtcctttaactgctgggatcgtgtatatagcaggtaaggcttttgaaagaaatttagacaagttgagctcagggaagtggaaaattaatggaaagatttctgaaccgaaaacagaatttgatggatggtttgaagacaaaaaaactcaataa

SEQ ID NO: 271981 - DNA, 637 bp, Unknown
  Bacterial polypeptide expressing nucleotide sequence isolated from the Sargasso Sea
atggcatcaaatccaatgtaccaatttaatgtgtatagaattggtccagaaataaaaataggtgaagttgatttatcatttactaatgcaagtttatttatggttattagctcgctagcggtattagttatatttaacctaggttcaaaaaaaaattctttaataccaaataaaattcaactactcgcagaattaagttatacttttgtttccaaaatgataagtgatacggctggctctaaagcaaaaccttattttgcatttatattttcattattcatgttcgtattattttgcaatatgtttggcatgattccttatgcgtttacggttactagtcatattatagttacttttgttttggcagcatttattttttttggtgttaccataattggatttatcaagcatggatttgggtacttaaaactatttgtcccaagtggagttcctgttgttcttttgccattaatagttgtaattgaagtgatttcttatttaagtagacctgtaagtttatcagttagattgtttgctaatatgatggcaggtcatactatgatgaaagtattcggaggttttgtgataagccttggaatagtcggcggttggttgccgctcggcttttcggtagctt

SEQ ID NO: 271982 - DNA, 235 bp, Unknown
  Bacterial polypeptide expressing nucleotide sequence isolated from the Sargasso Sea
atggaaattaaagcagcagagatatcatctgttataaaagatcaaattgctaattttgaaactaaagcagacgttgctgaggttggaactgttttaagtgttggtgatggtattgctagagtttatggattagataaagttcaagcgggtgaaatggttgagtttcctggtggtattaaaggtatggctcttaacttagaaatggataatgttggtgtttcaattttcggagatg

SEQ ID NO: 271983 - DNA, 574 bp, Unknown
  Bacterial polypeptide expressing nucleotide sequence isolated from the Sargasso Sea
aatgcatcaatttgaagtttatagagtaggtccacaaattaattttggagaaattaatctttcttttactaatgctagtctatttatggtaataagcgctattacaattttattttttttatttttgggaacgcaaaaaaaattattagtaccttctaaaatgcaattaattgccgaaatgagttatactttcgtagcaaaaatgataaatgatacagccggaaacaatgcaaaacctttttttccattcatttttactttatttatgtttgttttattttgtaacatgattggaatgcttccttattcgtttactgtaacaagccatattattgttacatttgttcttgcagctgtagtatttatcggagttactattataggatttattaagcatggtataaaatatttagaactttttgttccaaaaggagttccaataatgcttttacccctaattgtaattattgaaattatatcttatttaagcaggcccgttagcttatcggttagactgtttgcaaatatgatggctggtcacacgatgttaaaagtgtttggcggctttgtataa

SEQ ID NO: 271984 - DNA, 736 bp, Unknown
  Bacterial polypeptide expressing nucleotide sequence isolated from the Sargasso Sea
tatggcaagcaatccaatgcaacaattcacggtccaaagaattggccccgaaattaatatagcaggtgtagatttgtcttttactaatgctagtttattcatggtaataagcgcaactgtgattatattatttttatttttaggatcaaaagagaagaaaattattcccaataaattacaattaattgctgaaatgtcttacacctttgtagcaaaaatgatcaatgatactgctggatcaaaggctaggccttattttccatttatattctgcttatttatgtttgtcttattttgtaacatggttggaatgcttccatactcattcacggtaacaagtcatataattgtaactttaattatggctttatttatattcatagctgtgacgataattggttttataaagcatggttttaaatacttaagtatatttgtgccaagcggagtcccagctgtgcttttacctttgattactatcatagaaattatttcatatcttagtagaccagtgagtttatcagtaagattatttgcaaacatgatggcgggtcatacaatgttaaaagttttcggaggtttcgttgtaagtttaggaatattaggtggttggctaccgcttagtttttcagtggcattaacagggttagagattcttgtagcttttctacaagcgtatgtttttgcaatattaacctgtatctatttaaatgatgcattaaatttacaccattaa

SEQ ID NO: 271985 - DNA, 484 bp, Unknown
  Bacterial polypeptide expressing nucleotide sequence isolated from the Sargasso Sea
gatttgggtgattattttgtcgaacatgtagatttaagcgagtttaaatcgataaaatatgtaaatgcgcaggcaattgctaaggcgttgttggctcgttttgataataacgaatatgatgtagctacaattttttattcgaaatttgtaaatgttgtaagtcaaattccaactgcgcaacaaataatccctgcaatctttgaggatcaatcattggcatcagacacagcagtttatgattatgagccggatgaggaaacaatacttgctgacctacttccccggggtgttacgacccaaatatttgcagctcttctggagaatggagcatctgagcagggcgctcggatgtctgcaatggataacgcgacgcgtaacgctggcgatatgatagataagctgactattgaatttaatagatctcgtcaggccgtaattactaatgagttaattgaaataatttcgggcgctgaagcgctctaaa

SEQ ID NO: 271986 - DNA, 706 bp, Unknown
  Bacterial polypeptide expressing nucleotide sequence isolated from the Sargasso Sea
atgactgagtcacttaatcctataatatctatagtaaaagaatatctagaacaaagtggttataatttacatttgtttactagtattaatgataaacatgttgagattataaatttagactataagatggacattaaaatcactaaggcaatgaaactaaataattatataggatgtttgtctagtgtatttaatatatcaaaatcaaatttagaagaaggaattgttatgagatacaaaagagtagacaattataatgaaatggattcactaggggcatttattgtcgagctattacaaaatgactatagagaaaaggatataattcaagctattgaatctaattttaaaaagacacaggaacaggctattaaaatattagctgattatgtaaatgaattacaagtcgaacaaaatgcttttcagagaactagattgaaaataagagataatccaggatttttagttacaatggtaagagataaagctagtaataatttaaatattaacattaatggtatcaatcatattaaatatttagaagtaattcctatatacatagattcattagtaagactatttcaaatgccagattctactggtttagatagctctcttattaataaacaatgtaaagacaaggtagaaatgaaagagttagaaatacaagaaattgtagctccaattgaaaatagtgatgtcttac

SEQ ID NO: 271987 - DNA, 403 bp, Unknown
  Bacterial polypeptide expressing nucleotide sequence isolated from the Sargasso Sea
tatgattgaatcagctggaggaatgataccttttctttgtcatgtatttctaattttatttggtggtttttttggtttaaattttgcatttaataagaattttgctcaaaaaagttttggatttgataatattcaggcagcttatatgggaagaccattaggttttttaatgactggatgcgttttaatggcttttttggcattatttggaatagcaggagtaacatcagctaatgaaatatttggtgccatttttgtattcaccattttagcttttctttacaatacagcattagttatgaaaatcttaccaacttatgatggtaaagatcacgaaattaaaaatgctataagaccattaataccaatgttagtaatattaataaggtactttaatttataa

SEQ ID NO: 271988 - DNA, 721 bp, Unknown
  Bacterial polypeptide expressing nucleotide sequence isolated from the Sargasso Sea
aatgcaccaattcgaagtttacagaattggaccagaaattaaacttggaaatatagatatatcatttaccaacgccagtttatttatggtcgtaagtgttataggtatactaataatttttaatttaggtacaaaaaaaaattcactcataccagataagatgcagttgctggctgaactaagctacacatttgtttctaaaatgattagcgatacagcagggtcaaaagcaaaaccttatttttcatttattttttcattatttatgtttgttctgttctgtaatatgttcgggatgataccttatacatttacagtaactagccatataattgttacatttgttttggctgcattcattttcattggagttactattattggatttgcaaaacatggaattggttatttaaaactgtttgtaccaagtggagtgccaattgttttattacctttaattgttgtaatagaggtgatttcatatctaagcagaccagtaagtctctctgtaagattatttgcaaatatgatggctggacatactatgatgaaggtttttggaggtttcgtaattagcctaggtatagttggaggatggctacctctaagtttttcagttgcattaacaggtttggagatactagttgcttttcttcaagcatatgtgtttgcaattttaacatgcatttatttaaatgatgcattaaatttacaccattaa

SEQ ID NO: 271989 - DNA, 1942 bp, Unknown
  Bacterial polypeptide expressing nucleotide sequence isolated from the Sargasso Sea
atgtttaaaaaactgacgctcagcatgcagatttctggtggttatgcattggtgttattactattgatcgtgatttcattagccgcctattttggactaacgaaagccattaacggttttaatgattaccgctcgttggcgcgcgactctaatatggctggtcgcatccaagctaatatgcttacaattcaaatacaggcctatgattatatctttcagaagaatgaatcggcttataaagtattcaatgaacgtaatgttattcttaatgacatcattcaaaaagcgatgacggagattaacgagcctgaattgagtcaacaactttcagatattcgcaaagatattgttgattacaatagttactttgaatctgtagtcaaattgattaaatctcgcaatgatgaagttaccaacgtgttggttccaaaaggaactgaagttgtaaaactgatttctgacactatgcatcaatcctataataaaggtcagattgatgttgcttatcgagcaggttctgtgctcgaatcggtattgactgctcgtttagcggcatctaaattccttgaaacaaatttagatgcggatttacagcaggcgctgatggctattgatttagctaagggagagcgtctttctgccttaaaaactgtggcaacagatctagatgcacaatcaaaattattacaatttaccagcagcattgacaattatgcgtcttcgttaaagtcagtttatagcactattagcgaaagaaacgatattgtgcaaaatcaactcgaccgtatcggtgctgatgttgcgcgccaaactgaagatatcaaattaaccatccaaaaaaggcaagatacccttggtcctattgttaaagcccagaatgagcagacccttaccactgttattagtgtatctattgccgccattttgatcggtattttcttggcatggtttttagtgaagttaattaaaaaaccgttgggtggagaacctcgtgatatggaaacgattgcgcgcgcaatcgctaacggagacttaactgtagagctaaaacagcgtgaaaatgcgacgggggtttataaggcgatgattgatatgattgatagccttacttctgtgattgctcaggttcgaagtggtgcagataatttgtctagtgcttcttcacaggtcagtagtaccgctcaaagtctaagccaaggagcaacagagcaggctgctagtgtcgaagagacgaccagtgccgttgaagagttaaatgcgtctgtccagcagaactccgaaaatgcaagggttaccaataatatggcaacggtagccgctgaagaagcacgacaaggtggaatagcggtagaacaaaccgttgccgcaatgaaacagattgcggcgaaaattagcctaatagaagacattgcatataaaactaatctattaagtctcaatgcggccattgaggcggcccgtgctggtgaacatggtaaaggctttacagttgttgcctccgaggttagaaaattagctgaaaacagcagcttaacggcacaagaaattaataaactagccagcgaaagtgttggtattgctgaaaatgccggccgtttgatcgctaatattgtgcctaatatccaaaaaacatctgatttggttcaggaaattagttcctcctctgaggaacaagccattgggatcagccagattaatgactctatgctacagcttgataaagccacacagcagaatgcatctgcgtcagaagagttagccgcgacatcagaggagttaaacggtcaggctaatcaactacttgacgcagtagagttttttaaacttgccatcagtagtgaaagatctcatcaaggtaaatcaacagtaatggcggcttctgggcgtaagacagccaaagctaagcaacatgttgaacgtaccgatttcgaacgattctgat

SEQ ID NO: 271990 - DNA, 736 bp, Unknown
  Bacterial polypeptide expressing nucleotide sequence isolated from the Sargasso Sea
atggcatcaaatccaatgtatcaattcaatgtttatagaattggtcctgaaattaaaataggtgaaatagatttgtcatttactaatgctagtttattcatggtaattagctcattagcagttctgataatatttaatctaggatcaaaaaaaaattctttaataccaaataaaattcaactcatagctgagcttagttatagctttgtatcaaaaatgataagtgatacagctggatcaaaagcaaaaccatatttttcattcatattttctttgtttatgtttgttttgttttgcaatatgtttggaatgatcccttatgcatttactgttacaagtcatattattgtaacatttgttttggcagcatttattttctttggagttactataattggcttcattaaacacggatttggttatctaaaacttttcgttccaagtggagttccaattgtacttttgccattaatagtagttatcgaagttatttcttatttaagtagacccgtaagtttatcagttaggctattcgcaaatatgatggcgggtcatacaatgatgaaagtattcggaggttttgttataagccttggaatagtcggtggatggttaccgctaggcttttcagtagctttaacaggtttggagatattagttgcttttcttcaagcttatgtttttgcaatattaacctgcatctatttaaatgatgcattaaatttacaccattaac

SEQ ID NO: 271991 - DNA, 736 bp, Unknown
  Bacterial polypeptide expressing nucleotide sequence isolated from the Sargasso Sea
atggcaacaaaccctatgcatcagttcaatgtttatagaattggacctgaggttaaaatagctggaatagacatctcttttaccaactctagtttatttatgcttttaagtgcgggtgcaatatgtatttttttattgctaggtactagggaaaaaaaacttataccaggaaaaatacaattagttgctgaaatgttttataattttattgcgaagatgataagtgatactgcaggctctaaagccaaaccttactttccttttatattcagtttgttcatgtttgtcttattctgcaacatggtaggaatgtttccttattcatttactgtaacaagtcatataattgtgactttaattatggctatgtttatatttgtagcggtgacaataatcggttttattaagcatggttttaagtatttgaaaatttttgtaccaagtggagttcctgtattacttttacctttgataactgttattgagattatttcttatctaagcagaccggtcagtttatctgtaagattatttgcaaatatgatggcaggtcatacaatgttaaaagtttttgggggatttgtaataagtttaggattactaggtgggtggttaccacttagtttttcagtagcattaacaggtttagaaattttagttgcatttctacaagcttatgtttttgcaatattaacctgcatctatttaaatgatgcattaaatttacaccattaac

SEQ ID NO: 271992 - DNA, 1118 bp, Unknown
  Bacterial polypeptide expressing nucleotide sequence isolated from the Sargasso Sea
tcctggttcaggcaaaacaactcttgcaagaataatatgtaattctaatgactttgagtttcataaaatctcagctgttcattcaggtgtggtggaaataaaaaaaataatagagtctgctataataaagttatctaacagagttaggtcggttttatttattgacgagatacatagattaaatagatcacaacaggatagtttattaggtgcaatagaagagggagtgttaattttaattggggcaaccactgaaaacccatcatttgtgctaaataaggctcttatctctagatgtaatattcttccattaaataatattgctagaaaaggtctagagaaaatttattatagagcccaaaaatttttatctacttcaaatcttttatcggaagaagcaaaagatgcactatttagcttagtggatggcgatgcaaggtttctattaaatataattgaaatgatacatgctaatggatcttatgaattagatagaaactctttaatggatttaataagctctaggcctttgaagtatgataaatctggtgaagagcactacaatctaattagcgcgcttcataaaagtattagaggttctgatgtagatgcatcattgtattggctatcaagaatgctaattggtggtgaggacccactctatatttttaggcgtttattaagaatagcttctgaggatgtagggttagctaacccatctgcgctaacatatatagttagcgcaaaacaggcttatgaatctgtgggtttgcctgaaggtgaaatttttttagctcagtctgtagttttcttatcaactactgataaatctaatgctgtatacttggctcaaaaattagcagcagaaagtgcgaaaaaacatggttctttaagtccgcctaagcatataattaatgcgccgaataaatttatgaaagagttgggttatagtgagggttatatttatgatcactccttagaaagtaattattctggtcaaaactatttccctgaaaattttgaaagaagggtgttttatgagcctaagggccttgggtttgaaaaaaaaattaaagatagattgttaaagtttaaaaattttagaaaaaaagattaat

SEQ ID NO: 271993 - DNA, 698 bp, Unknown
  Bacterial polypeptide expressing nucleotide sequence isolated from the Sargasso Sea
tatggcaacaaatccaatgcaccaatttaaagttcacagaattggtccagaaatagaaatatctggtatagatttatcttttactaacgcaagtcttttcatgttcatcagcgccgctctagtaatacttctattgttaattggtactagagaaaaaaaattagttccaagcaaagctcagttagtatcagaattattttataactttattgctaaaatgattagtgataccgccggtaagaaagcaaagccctatttcccattcatatttagtctttttatttttattttattttgtaacatggttggaatgttgccctactctttcacggttaccagtcatataattgtaaccttgacttttgctatatttatttttgttggagtaacaattttaggttttgtcatacatggtttcaaatacttaagaatatttgtgccaagtggtgtccctttggttttattaccaatcataactataatcgaaattatttcatatttaagtaggccaattagtttgtctgtacgactttttgcaaatatgatggcaggtcatacaatgttaaaagtttttgggggctttgtaattagcttgggtctggttggtggatggcttccattaagtttttcagttgcccttacgggtttagaaatattagtagcatttttacaagcttatgtttttgcgattttaacat

SEQ ID NO: 271994 - DNA, 1243 bp, Unknown
  Bacterial polypeptide expressing nucleotide sequence isolated from the Sargasso Sea
cgctcaggtgagggatcacttacaggctcaggcagcctggccttccagcaggagtccgacgcaccaggcctcaatttcacggtcaaatctttcccaattcgccggccggatgctcagcttcaactggatggagcgctgactctgcaaggcagtctgagccagcccgcattgggaggtgaggtcaagctcagcaagggtgcgatcagcgtttcaccgagtgagttgagctctggcgggggtccaggtgttcccgttgatgctgagatcccagaggccttttgggattttcagaaacccgttgtggtgcgaggtccgagggtggaatctgctgatgcggcagctttgcgccgccgagtgccccgcttgggctcgctttcattccgcaatctgcgcgtggccttgggacctgatttgcgcattacagccccaccagttgcgcagttcttcactggtggcctactgaccttcaacggctcagctggccccgatgtgcgcatctctggtgtggtgcgcttgctgaagggccgtatcagcttgctgaccaatgtcctcaagctcgattcgagcaacgccaacgtggcggtgtttacgccctcgttgggtttgctcccctacttggacgtggccttcacgacccgcatctccgatcgcgtcggaggttttgatggcaatgatgtcgtgggtaatgaagagttgcagggcaacttctccaacctggatcgtctcaatttgatcaaggtgatcgtggcgtacagcggtcctgccgatcgcctctcgctcgacacgttgtcgctgcgaagtcaaccgcctctacctcaggaacggttggtggcacttttggctggaaatagtttggccggcattgctgcaggtaatgccggtacagctgtcgccacgttgctgggtggaaccttgctgtctccggtactaggtggtttgggcaacttgtttgataaccggatcacggcatcgctctatcccgcattccttgagccttacgtccaggactcaggcaaagatggcaaccaaggtcgtgtcccctctcagctggtactgggtgctgaggtgggtgtggatctcacagatcgcttcaatttctcggtgttagcggcacctaaccgcagcgatatcccggcagaagcggtgttgcgttatcaggccactgacaaactgggtattcaaggcgcgcttgaccagcaggggcgttggcagagccagctgcagctgttcttccgcttctaga

SEQ ID NO: 271995 - DNA, 721 bp, Unknown
  Bacterial polypeptide expressing nucleotide sequence isolated from the Sargasso Sea
aatgacacaattcgaagtttatagaattggtccagaaataaaagtaggcgcttttgatatttcttttactaacgctagtttattcatggtcataagttctcttgcgattttaataatattcaaccttggttcaaagaaaaattcaatacttccgaataagatccaactcttagctgaattaagctattcatttgtctcaaaaatgatcagcgatactgctggttcaaaagctaaaccatatttttcatttatcttttcattatttatgtttgttttgttttgtaacatgttcggcatgataccttacacttttacagtgactagtcatatcattgtgactttcatattagcagcttttatttttattggagttacagttattggttttataaaacatggctttggttacttaaaactatttgttccaagtggtgttcctatcgtacttttaccattaattgtggtcattgaaattatttcatatttaagtagacctatcagcttatcagtaagattgtttgcaaacatgatggctggacacactatgatgaaggttttcgggggctttgtcgtaagcctcggaattgttggtggatggcttccactgagtttttcagttgctttaactggtttggagatactagttgcttttcttcaagcttatgtttttgcaattttaacatgcatttatttaaatgatgcattaaatttacaccattaa

SEQ ID NO: 271996 - DNA, 745 bp, Unknown
  Bacterial polypeptide expressing nucleotide sequence isolated from the Sargasso Sea
atggcagcaaaaggcgaaaaacacagtcctctagaacagtttgagataattccatttactaaaactgaaattggtggatatgatatttcctttactaactcatccctatcaatgattattactgttgctgtaataacactttttttaactcttactgttaatcctcgttcactagtgccaacaaggatgcaattaatatctgaactaatgtataattttgttgcacaattattaagtgatactgttggtgataatgggaaaaaatactttccatttgtcttttctcttttcatgtttgttttaatcggaaacatggttggaatggtcccgtaccaatttacttttaccagtcatattattgtaacttttgctttggcatcagttgtatttattggagtaacaattttaggatttgtaaatcatggaataaaattcttcacatttttctatatacctggcgttccattttatatgcaccctttactaattccaattgaggtaatatcttatttatctcgtcccatcagtttgtctgtaagacttttcgctaatatgttagcaggtcatacattactcaaagtctttgctggttttgttgtagcaatgccatttttcacaggagcacttcctcttgtatttattgttgcattaactggtttagaaatattaatcgcatttttgcaggcgtatgtatttgccatcttaacgtgtttatatataaacgatgcatatcacttacactaaa

SEQ ID NO: 271997 - DNA, 736 bp, Unknown
  Bacterial polypeptide expressing nucleotide sequence isolated from the Sargasso Sea
atggcaagcaatccaatgcaacaattcacagtccataaaattggaccagagattaaaatcgcgggaatagatttgtcttttacgaacgcaagtttatttatggtaatcagcgcctctgtaattctattgttcctttttttaggatcaaaagaaaaaaagattattcctaataaaattcaactaatagctgaaatgttttatacatttgtagcaaaaatgataagtgatactgcagggtctaaagctaaaccatattttccttttatatttagtttattcatgtttgttttgttttgtaacatggtaggaatgttgccttattcttttacagtaacaagtcacataatagttacacttattatggctttgttcattttcatcgctgtaacaatcataggttttttaaaacatggtttcaaatatttaagtatttttgttccaagtggtgttccagcagttctacttccattaatcactgtaatagaaattatttcttatttaagtaggccagtaagcttatctgtgcgtttgtttgcgaacatgatggctggtcacacaatgttaaaagtattcggcggatttgtagtaagtttaggagtattaggtggatggttaccacttagtttttcagttgcgttaacaggtttggaaattttagtagcttttttacaagcttatgtttttgcaatattaacctgcatttatttaaacgatgcattaaatttacaccattaat

SEQ ID NO: 271998 - DNA, 784 bp, Unknown
  Bacterial polypeptide expressing nucleotide sequence isolated from the Sargasso Sea
catgtctgcaaccggagaagtcctgactcctcagggatatatctcccaccatctgacccatctgcaagtcgggtctgggttctggacggtgaatatcgattccatgatattttccgtcttgctaggcgctctgtttatctggtcgttccgccgtgtcgccgtcaaggctaccagcggtgtgcccggcaaactgcagtgctttgtggagatgctggtcgagtttgtgagtggtaacgtcaaggacatctttcacggtcgtaacaaggtcatcgcacctttgggcctgacggtgttcgtgtggatcttcctgatgaacctgatggatctgatccccgttgactttatcccccacgctgcacagttgatgggtgttccctatctgcgtgtggttccctctgctgacgttaacatcaccatgtccatggctttgggcgtgttcttcttgatcctgtactacagcatcaaggtcaagggtatcggcgggttcgtgaaggagctgacgcttcagcctttcaaccacccggcggccatcccggttaacctcatcctggaaactgttacgctgatttccaaacctgtttctctgggtcttcgactgttcggcaacatgtatgctggcgaactgatctttatcctgattgcgggtttgctaccctggtggtcacagtggatcctgtccgtgccttgggcaattttccacatcctgatcatcactttgcaggcgtttatcttcatggtgctgaccatcgtctatctgtcgatggcacaagaagaccatggttga

SEQ ID NO: 271999 - DNA, 468 bp, Unknown
  Bacterial polypeptide expressing nucleotide sequence isolated from the Sargasso Sea
tttctttattcatgtttgtgttattttgcaatatgttcggtatgatcccgtacgccttcactgttacaagtcatataattataacatttattttggcatcattcatatttgtaggtgttacgataattggatttgttaaacatgggtttgggtatttaaaattatttgtgccaagcggtgtacctgtcgttttgctgccattaatagttgttatagaaattatttcttacctgagcagaccaattagtttgtcagtaagattatttgctaatatgatggctggacacactatgatgaaagttttcggaggctttgtaattagccttggaatagttggtggatggcttccactaagtttttcggttgcattaacaggtttggagatattagttgcttttcttcaagcatatgtttttgcaatcttaacctgcatctatttaaatgatgcattaaatttacaccattaat

SEQ ID NO: 272000 - DNA, 721 bp, Unknown
  Bacterial polypeptide expressing nucleotide sequence isolated from the Sargasso Sea
aatgtcccaattcgatgtttatagaattggacctgaaataaaagttggagcattcgatatatcttttacaaacgcaagtttgtttatgattataagtacagtttctattttattaatttttaatttaggatctaagaaaaattcaatcttaccaaataaaattcaattattagcggaacttagctacacctttgtttccaaaatgataagtgatacagctggttctaaagcaaaaccatattttgcttttattttttcattgttcatgtttgttttgttttgcaacatgtttggaatgataccgtacacattcactgtaactagtcatattattgttacatttgttcttgctgcatttatctttatcggcgtaacagtaataggatttattaaacatggttttggatatttaaaattatttgtaccaagtggagtaccagctgtgctacttcctttaatagtagttatagagattatttcttatctaagtagaccaataagtctatcagttagattatttgcaaatatgatggctggtcatacaatgatgaaagtttttggaggctttgtaattagtcttggaatagtcggtggatggcttccacttagtttttcagttgcattaactggtttggagatattagttgcttttcttcaagcatatgtttttgcaattttaacctgcatctatttaaatgatgcattaaatttacaccattaa

SEQ ID NO: 272001 - DNA, 715 bp, Unknown
  Bacterial polypeptide expressing nucleotide sequence isolated from the Sargasso Sea
aatgcatcagtttgaaattaagagattattagatattaatattgccggttacgatatttcatttacaaattcagcacttttcatgcttattgctgtttttctaatcagtttcacaacaattttttcagttagaaaaaattctattattccatcaagaatgcaatcaattgttgaaatgtcatacgaatttgttgcggatatggtaaggcaaaatgtaggttcgcaaggaaaaaactattttccatttatttttactatatttatgtttgttctttttatgaatatgttaggaatgatcccttatggatttactgttacaagtcatatagctgttactttcgccctagcaatgcttatatttattggcgtaactgttataggatttgttaaacatggtttaggtttttttggtttttttgtaccaaagggtgtacctgtttttatgcttccgctattagttgttattgaagtgatatcatattttacaagaccaattagcctttctgtaagattatttgcaaatatgatggcaggccacactatgttaaaagtattttctggatttgttattttaatgggttttttaggtggttggcttcccttagccgtcatggtagcattcacaggtttagaaattttaattgcatttttacaagcatatgtttttgctatattaacatgtatctatcttaacgatgcattacatatgcattaa

SEQ ID NO: 272002 - DNA, 970 bp, Unknown
  Bacterial polypeptide expressing nucleotide sequence isolated from the Sargasso Sea
tatgacaaaaaaaaatacatttaagtcacccgtgacaaaaaaagattatgttggaaatcttgagccaagatatgctggcattccaacatttatgaggacacctttggctgaaacattggaagatgttgatattggtctcgttggggttccatatgatggtggcgttacaaatcgagctggtgcaaggcatggaccaagagaagttcgaaatcagtcaagcttgatgagaaccattcatcatatcaatagagaaagcccatttgatattgcaaatattgctgatttaggtgatgtttcattctcggaaccttttgatcatcaagctgttaacaatgacatcacagatttctttggtttgataaaagaatctggcgtaattcccttgagtgttggtggagatcactcaattacatatcccatttttaagggcattgccaatgatggccctatcggaatggttcatattgatgcacatacagatacatggggcgaaatatggggttctaagtttcatcatggctcaccctttagattggcagtagaagatggtttgttagaccccaagcgtacaattcaaatcggtattaggggtgctcagaatttcatggatggtatcgacttttctttggattcagggatgagagtagtctttatggaagagttttttgaaagaggtgttaaagaggtgatcaaagaagcattggatattgtggaagatggcccaacatatatatcttttgatgtagatggtcttgaccctgtatttgctccaggaactggtacccctgaggttgggggtatcacaaccattgaagctcaaacgcttcttagaggcttaaagggtctcaatctaattggtgcagatgtggtcgaggttgctcctccttttgatcagactgggaatacagctttggttggagcaaccatgatgtatgagatcctttgtctccttgctgatagatttaaataa

SEQ ID NO: 272003 - DNA, 721 bp, Unknown
  Bacterial polypeptide expressing nucleotide sequence isolated from the Sargasso Sea
atgacacaattcgaagtttatagaattggaccagaaattaaaattggtgcatttgatatttccttcacaaacgcaagtttatttatggttattagttcaatagcaattttaattatttttaatctcggttcaaagaaaaattctatgttgccaaataagattcagcttctagctgaattaagttatacatttgtatccaaaatgattagtgatacggctggatcaaaagcaaaaccttatttttcttttatattttcattatttatgtttgtacttttttgtaacatgttcggaatgattccttacacgtttacagttacaagtcacattattgtgacttttgttttggcagcatttatttttattggagtaacagtaataggttttcttaaacatggcttaggttatttaaagctttttgtacctagtggtgttcctatagttttgctccctttaatcgtaataattgaaattatttcatatctaagtagaccgataagcctatctgttaggttgtttgcaaatatgatggctggtcatactatgatgaaagttttcggaggctttgttataagtcttggaataatcggtggatggcttccactgagtttttcagttgcattaacaggattggagatcttagttgcttttcttcaagcttatgtttttgcgattttaacctgcatctatttaaatgatgcattaaatttacaccattaat

SEQ ID NO: 272004 - DNA, 1198 bp, Unknown
  Bacterial polypeptide expressing nucleotide sequence isolated from the Sargasso Sea
gctgcacattccccacaggacaggagacgacaccgtgacgcacagcgtgattcccgcaggcctcgccgacgaaatgatcgagatccggcaccgtatccatgcccaccccgagctcggcttcgaggaattcgcgacgagcgacctcgtcgccgagcaactgcagtcgtggggctacacggtgcaccgcgggcttggcggcacgggcgtcgtcgcgcagctgaaggtcggcgaaggcacgcagcgtctcggcctgcgcgccgacatggacgcactgccgatccacgaggccaccggccttccgtacgagagcaggatcgccggcaagatgcacgcgtgcggccacgacggccacacggcgatgctgctcgcggccgcgaagcatcttgcgcgcgagcgccgcttctcgggcacgctgaacctgattttccagccggccgaggaagggctcggcggcgcgaagaagatgctcgacgaagggctgttcgagctgttcccgtgcgacgcgatcttcgcgatgcacaacatgcccggcttcccgacgggcaagttcggcttcctgccggggtcgttcatggcgtcgtcggatacggtgatcgtcgacgtgcagggccggggcggccacggcgcggtgccgcacaaggcggtcgattcggtggtggtctgcgcgcagatcgtcatcgcgctgcagacgatcgtgtcgcgcaacgtgtcgccgctcgacatggcgatcgtcacggtcggcgcgatccacgcgggcgaggcgccgaacgtgattcccgatcgcgcgcagatgcgcctgtcggtgcgcgcgctgaagccggaggtgcgcgacctgctcgagacgcgcatcaaggaagtcgtgcatgcgcaggcggccgtgttcggcgcgaccgcgacgatcgactaccagcgccgctatccggtgctcgtcaacgatgcggaaatgaccgcgttcgcgcgcaacgtcgcccgcgaatgggtgggcgacgcgaacctgatcgacgggatggtgccgctcaccggcagcgaggatttcgcgttcctgctcgagaagcggccgggatgctacctgatcatcggtaacggcgacggggagggcggctgcatggtgcacaaccccggctacgacttcaacgacgcggcgctgccgaccggcgcgtcgtactgggtgaagctggcggagacgtttctggtttga

SEQ ID NO: 272005 - DNA, 736 bp, Unknown
  Bacterial polypeptide expressing nucleotide sequence isolated from the Sargasso Sea
atggcaagcaatccgatgcaacaattcacagtccacaaaattggacctgagatcaagatagctgatatagatttatccttcactaattctagcttgttcatggtaataagcgcatctgtaattatattatttttatttttaggatcaaaagaaaagaaaattatacctaataaattgcagttaattgcagaactatcttatacgtttgtggcaaaaatgattagtgatactgctgggtcaaaagctaagccttattttccatttattttcagtttatttatgtttgtcttattttgtaatatggttggtatgctcccatattctttcacagttacaagtcatataattgtaactttaattatggctttatttatatttatagcagtaacaataataggttttataaagcatggttttaaatactttagcatctttgtaccaagtggagttccggctgtgcttttgcctctgattaccgtaattgaaattatttcatatcttagcaggccagtgagtttatcagttagattatttgcaaacatgatggcaggtcacactatgttaaaggtttttggaggttttgttgtaagtttaggaatattaggcgggtggttaccgcttagtttttcagtagcactaacgggcttggagattcttgtagcttttctgcaagcatatgtttttgcaatattaacctgcatttatttaaatgatgcattgaatttacaccattaaa

SEQ ID NO: 272006 - DNA, 390 bp, Unknown
  Bacterial polypeptide expressing nucleotide sequence isolated from the Sargasso Sea
atgaaaaaatagataaattacttattgcacacaatgaatttgttagcaccatgagccaaaaacccgaaataaaaacacttctgccggtggccacattagatgaagatagcgattcattacagtcccattgggattatatttatgaaccagatgcaattgatcttctcgatggcgttttaatgagatacattgagtctcaagtatacagaggcgctacagaaaattttgcatgtgaaatggccgcaaaaatggttgcgatgaaatcggcaacagacaatgctggcgatataattgataaattacaacttgtatacaataaagcaagacaagcatcaattacccaagagatttcagaaattgtgggcggagctgctgctgtttcagaataat

SEQ ID NO: 272007 - DNA, 212 bp, Unknown
  Bacterial polypeptide expressing nucleotide sequence isolated from the Sargasso Sea
aatgagcacaggaaaagtgatacaaattataggcgcggtcatagacgtggaatttgagaaagacaatatccctaacgtatacgaggcattaaccattgatgggttagagattgtactagaagttcaacaacaactcggagacggaattgtgcgaacaattgccatgggatccacagaaggactaaagcgaggccttatcgcagaacgaacaa

SEQ ID NO: 272008 - DNA, 370 bp, Unknown
  Bacterial polypeptide expressing nucleotide sequence isolated from the Sargasso Sea
aatatttattttattggagtaacaatattaggttttttaatacatggatttaaatatttgaaaatatttgtaccaagtggagttccactggtgctattgccaattataagtataatagagattatttcttatttgagtagaccggttagcttatctgtaagattgtttgctaatatgatggctggtcacacaatgttaaaagtatttggtggctttgttattagtctgggattaatcggaggatggctgccattgactttttcggttgcacttactggattggaaatattagtagcttttttacaagcatatgtttttgcaattttgacatgcatttatttaaatgatgcattaaatttacatcactaaa

SEQ ID NO: 272009 - DNA, 280 bp, Unknown
  Bacterial polypeptide expressing nucleotide sequence isolated from the Sargasso Sea
ggttctacttccactaatagttgttattgaaattatttcgtatttaagtagaccaattagtttatctgtaagattgtttgctaatatgatggctggtcacactatgatgaaggtatttggaggctttgttataagtttaggaattgtaggtggatggcttccacttagtttttcggttgcacttacgggtttggagatactggttgcttttcttcaagcatatgtatttgcaattttaacatgcatttatttaaatgatgcattaaatctacaccattaa

SEQ ID NO: 272010 - DNA, 424 bp, Unknown
  Bacterial polypeptide expressing nucleotide sequence isolated from the Sargasso Sea
ttgagcacacaaggcggagtacaatacagtaagattgcagaaattaaaggtccgctagtaattgttgacggtgttgaaaatgcagcatttgatgaactagttgagattgaaacaaacgacggtgaaaagagacttggaaaagtacttgaagttggaaatggtaaagcaattgttcaggtctttgaaggcacaactggactatctgtttctggaacaaacgcaaaatttgttggaaaagtaatggaaatgccagtttctgaagaagttcttggaagagtttttgatggacttggtagacctaaggatggattaccagatcctgttgcatcttcatttttagatattaacggtgctccaatgaaccctgaacaaagagaatatccaaaagacttcattcagacaggtgtttcagtaattgatggaa

SEQ ID NO: 272011 - DNA, 721 bp, Unknown
  Bacterial polypeptide expressing nucleotide sequence isolated from the Sargasso Sea
atgtaccaattcaatgtttataggattggaccagaaataaaattaggctctgttgatatttctttcaccaatgcaagtttatttatggttataagttcattagctattttgataatttttaatttaggtgctaagaaaaaaactttaatacctgacaaattacaactattgtcagaactcagttatacctttgtggccaaaatgattagtgatacagccggatctaaagcgaaaccatacttttcttttatattctcactatttatgtttgtactattttgtaacatgtttggaatgataccttatgcgtttacagtcacaagtcatatcatagttacatttgtgttggcagcttttatctttattggagttacaattattggatttatgaaacatggtttaggatatttaaaattatttgttcctagtggagttccaatggttttacttccattaatagtaattattgagattatctcatatttaagtaggccgattagtttatcagtaagactatttgcaaatatgatggcaggtcacacgatgatgaaagtatttggcggttttgttattagcttaggaatagttggtggatggcttccactaagtttttcggttgcacttacaggtttggagatattagttgcttttcttcaagcatatgtatttgcaattttaacatgcatttatttaaatgatgcattaaatttacaccattaat

SEQ ID NO: 272012 - DNA, 313 bp, Unknown
  Bacterial polypeptide expressing nucleotide sequence isolated from the Sargasso Sea
tctgaaattatttgtgccaagtggagttcctatagtgctattaccattaattataattattgagattatctcatatttaagtagacctattagtttatctgtcaggctctttgctaacatgatggcgggtcatacaatgatgaaagtattcggaggcttcgtaataagtcttggagtagtcggtggatggcttccactgagtttttcggttgctttaactggcctggagatattagttgcttttcttcaagcatatgtttttgcaattttaacctgcatctatttgaatgatgcattaaacttacaccattaa

SEQ ID NO: 272013 - DNA, 721 bp, Unknown
  Bacterial polypeptide expressing nucleotide sequence isolated from the Sargasso Sea
atgtcacaattcgacgtttatagaattggaccagaaattaaagttggagcattcgacatatcatttacgaacgcaagtttgtttatgattttaagtactgtatctattttattaatctttaatttaggatcaaaaaaaaattcaatactaccaaataaaattcaattattagcagaacttagctatacctttgtatccaaaatgattagcgatacagctggatcaaaagctaaaccatactttgcatttatattttctctattcatgtttgttttattttgcaacatgtttggaatgataccttatactttcactgtaaccagtcatatcattgtaacatttgtacttgcggcttttatatttattggagtgactgtgattgggtttattaaacatggatttgggtatttaaaattatttgttccaagtggagtacctgcagtattgctccctttgattgttgttatagaaattatttcttatttaagtagacctataagtttatcagttagattatttgctaatatgatggcaggtcatacaatgatgaaagtttttgggggctttgtaattagccttggaatagttggtgggtggcttccactaagtttttcggttgcgttaacaggtttggagatcttagttgcttttcttcaagcctatgtttttgcaatcttaacctgcatctatttaaatgatgcattaaatttacaccattaat

SEQ ID NO: 272014 - DNA, 283 bp, Unknown
  Bacterial polypeptide expressing nucleotide sequence isolated from the Sargasso Sea
tttggttttattgccaattatatctattattgaaattatttcttatttgagtagacctataagtttatctgtaagactttttgcaaatatgatggcaggtcacactatgctaaaagtttttggaggctttgttataagtttaggtttaattggtggttggttgccattaacattttcagttgcattgacaggactagaaatactagtagcttttttacaagcttatgtttttgcaatattaacgtgcatttatttaaacgatgcacttaatttacatcactaa

SEQ ID NO: 272015 - DNA, 721 bp, Unknown
  Bacterial polypeptide expressing nucleotide sequence isolated from the Sargasso Sea
aatgtaccaattcaatgtttatagaattggtccggaaataaagttaggctcagtcgatatttctttcactaatgcaagtttatttatggttattagttctttagccattttgataatttttaatctaggagcaaagaaaaaaaccctaatacctgataaattacaattattatcagaattaagttattcctttgtcgctaaaatgattagtgacacagcaggatcaaaagcaaaaccgtacttttcgtttattttctcattatttatgtttgtacttttttgtaacatgtttggaatgataccttacgcatttacagtcacaagccatattatagttacatttgtattggcagcatttattttcattggagtgacaattattggatttatgaaacatggattggggtatttgaaattgtttgtaccaagtggagttccaatggttctacttccactaatagttgttattgaaattatttcgtatttaagtagaccaattagcttatctgtaagattgtttgctaatatgatggctggtcacactatgatgaaggtatttggaggctttgttataagcttaggaattgtaggtggatggcttccacttagtttttcggttgcacttacgggtttggagatactagttgcttttcttcaagcgtatgtatttgcaattttaacatgcatttatttaaatgatgcattaaatctacaccattaa

SEQ ID NO: 272016 - DNA, 169 bp, Unknown
  Bacterial polypeptide expressing nucleotide sequence isolated from the Sargasso Sea
gaagttttcacaggagcaccaggaaaatatgtctctgtaaaagatacaatccaaggatttaaagaaattcttgatggcgttcatgatgatgtgccagaacaagctttttatatggttggttccatagaagaagttttagaaaaagctaagacggttaaaagtgattaat

SEQ ID NO: 272017 - DNA, 1057 bp, Unknown
  Bacterial polypeptide expressing nucleotide sequence isolated from the Sargasso Sea
aatgttagtacttatattcctttcttggagagctacaaggaacattaaggatgtaccatctggactacaaaatgtatttgaacttatttttcaatttttcattgatactgctgacgaagctggtggtaaaaaagctcgaagatttctaccggtggttataacaatattccttgcagttttagcattcaactggatgggtattcttccaggtgttgggtccataggtaaagttgaaactattgaagaatgggttcatcatcattctcattctggtcattgttatgatgttgctaaaacctctaaaaataaaaatatagataagtatttattggcagaactttgtgttctagaagaagatgcatctcatggatttgtagtttttgatgatgtaagttcaattaatataatgccgttaggtcgaggtgaaagtgcaagagcgcctttgcatgctattggagactatgaagtacaagatattgttgatattaagaaaaaaattacatccggtaccaaacctgaagatataaatgagttcaatacaattaaagaaaatattaaatctggtaaagttttgaaactttatgagaatcctgacgatggaacaataagtccagaatcttacttaggtaagaatactggagaattaattccattttttagaggagcttctactgatgttaatacaaccctggctatagctatatttgcaatgatagctatacaattttggggattttcatcattagggttcagtggttatggtggaaagtttattaatttttcacatggaccaatcaatgcctttgtaggtattttagagttatttggagaatttgctaaaactataagttttacttttagactttttggaaatatgtttgctggagaaatagttttgatttctatgggatttttacttcctttaataggaatgatgccttttatgggattggaacttttcgtaggtgtaatacaagcattcatattttcaatgttaactttagtttttggggttatggcagtaacatcacactcagagcatgaagatcatgattag

SEQ ID NO: 272018 - DNA, 721 bp, Unknown
  Bacterial polypeptide expressing nucleotide sequence isolated from the Sargasso Sea
atgacacaattcgaggtatatagaattggccctgaaattaaagtgggtgctttcgacatttcatttacaaacgctagtttattcatggtcgttagttctttagctattctgattatatttaacattggatcaaaaaaaaattcattactaccaaacaaaattcagttgttagctgaattaagttatactttcgtttcaaaaatgataagtgacacagctggttctaaagctaaaccttatttctcttttatattctctttatttatgtttgtacttttttgtaacatgtttggcatgattccttatacttttacagttacaagtcatattattgttacttttgtattagctgcttttatttttattggtgtaacaataattggttttataaaacacggtctaggctatcttaaattatttgtacccagtggagttcctgtaattttattaccattgatagtagttattgaaattatctcatatctaagtagacctataagtctatcagtcaggctctttgctaacatgatggctggtcacacaatgatgaaagtattcggaggctttgtaataagtcttggagtagtcggtggatggcttccactgagtttttcggttgctttaactggcctggagatattagttgcttttcttcaggcatacgtttttgcaattttaacctgcatctatttaaatgatgcattaaacttacaccattaat

SEQ ID NO: 272019 - DNA, 754 bp, Unknown
  Bacterial polypeptide expressing nucleotide sequence isolated from the Sargasso Sea
atggccaaaggcgaaagtccccttaaacagtttgaaattcaaccaataatagacataaatctgtttggattagatatttcatttaccaactcggctttatggatgactgtaacgactgcatttatactgatattttttactgcaccttttttaaaatcaaaaaaaacaaactctgtaagtgatctatacccttctaggatgcaagttgcagcagaactaggatttagttttattaatagtttgctaagtgacacagttggcaaagaggggaagaagtacttttccttagtatttactttatttatgttcattctctttggtaatctttttggaatgatcccctatagttttacctttactagccatattattgttacgcttgcacttgccatgggtgtttttatttttgttactattttaggttttgtaaaacatggagtgaagttttttggcttctttgtaattcctggattacctatttatatgctccctcttcttataccaatagaaataatttcttacttatctagacctataagtttatctgttcgactctttgctaatatgcttgctggtcatactttattaaaagtttttgcgggttttgtatctgctttaggaatttttggaattctgccattagtatttataattgccttaacaggtttagagatactaatagcatttttgcaagcatatgtctttgcgatattaacatgtttgtatattaacgacgctttacacttacactaga

SEQ ID NO: 272020 - DNA, 505 bp, Unknown
  Bacterial polypeptide expressing nucleotide sequence isolated from the Sargasso Sea
atggttggttcgcaaggaaaaaactattttccatttatttttactatatttatgttcgttctttttatgaatatgttgggaatgatcccttatggatttactgttacaagtcatatagctgttacattcgccctagcaatgcttatatttattggcgtaactgttatagggtttgttaaacatggtttaggtttttttggtttttttgtaccaaagggtgtgcctgtttttatgcttccgctattagttgtgattgaagtgatatcatattttacaaggccaattagcctttctgtaagattatttgcaaatatgatggcaggccatacaatgttaaaagttttttctggatttgttatcctgatgggttttttagggggttggcttcctttagctgtcatggttgcatttacaggtctagagattttaattgcttttttacaagcatatgtttttgctatattaacatgtatctatcttaatgatgcattgcatatgcactaat

SEQ ID NO: 272021 - DNA, 584 bp, Unknown
  Bacterial polypeptide expressing nucleotide sequence isolated from the Sargasso Sea
catggcaaatcttaaagagattagagatcgaatcgtttccgttaaaaatacaagaaaaataacggaggccatgagacttgttgcagctgcaaaagttaggagagctcaagatcaagttcttaagagtagaccttttgcagataaacttgcacgagtcttagaaaatattcaatctagagtacaatttgaggctgtcgactctcctctattatctaagagagaagtaaagagtatctccttggtttgcataaccgcggatagaggtttatgcggtggttacaatacaaatattataaaaaaggtagaaataagatatgcagaattagttaaacaaggttatcagccaaatttaattttggtagggaagaaagctattggatactttcaaaatagaaaggatagatatgtaattaaaagtactttcaaagaactagaacaggtaccaacagtcaaggattctgaaggagttacaaatgagattttagccgaatttctttcagaaaattctgatagggtggaaattatttacacgaaattcatcactttagttagctgtgcccctgtcgttcaaacactattgccac

SEQ ID NO: 272022 - DNA, 736 bp, Unknown
  Bacterial polypeptide expressing nucleotide sequence isolated from the Sargasso Sea
aatggcaactaatccaatgcaccaattcaatgtttatagaattggcccagaaattagacttggcgaagttgatatatcgtttacaaatgcaagcttgttcatggtaataagttcattagcaattctaatattgctaaatttaggagcaaaaaaaaattctttaatacccagcaaaatacaattattgggagagctcagttatagttttgtatcaaaaatgataagtgatactgcgggcagtaaagcaaaaccttatttttcatttattttttcacttttcatgtttgttttgttttgtaacatgttcggaatgataccttatgcatttaccgtcactagtcatattattgttacttttgtacttgcagcatttatttttatagcagttactgttattggatttataaaacatggttttggatatttaaaattgtttgtcccaagcggtgtgccaatagttttgctaccactaatagtagtaatagaaattatttcttatttaagtagacccataagtttatctgttaggctttttgcaaacatgatggctggtcatactatgatgaaagttttcggaggctttgtaataagtctcggaatagttggtggatggcttccactaagtttttcggttgctttaactggattggagatattagttgcttttcttcaagcgtatgtttttgcaatcttaacatgcatctatttaaatgatgcattaaatttacaccattaa

SEQ ID NO: 272023 - DNA, 721 bp, Unknown
  Bacterial polypeptide expressing nucleotide sequence isolated from the Sargasso Sea
atgtaccaattcaatgtttatagaattggtccggaaattaaattaggctcagttgatatctctttcactaatgcaagtttattcatggtcattagttctttagctattttgataatttttaatctaggagcaaagaaaaaaactctaatacctgataaactacaattactatcagaattaagttattcctttgtcgccaaaatgatcagcgatacagcaggatcaaaagcaaaaccctacttttcatttattttctcattatttatgtttgtactattctgtaacatgtttggaatgataccttacgcatttacagttacaagccatatcatagttacatttgtgcttgcagcatttatttttgttggagttacaattattggatttatgaaacatggattgggatatttaaaattgtttgtaccaagtggggttccaatggttctacttccactgatagttgttattgaaattatttcttatttgagtagaccaattagtttatcggtaagactatttgcaaatatgatggctggtcacacgatgatgaaggtatttggaggctttgttataagcctaggaattgtaggtggatggcttccacttagtttttcggttgcacttacaggtttggagatactagttgcttttcttcaagcatatgtatttgcaattttaacatgcatttatttaaatgatgcattaaatttacaccattaat

SEQ ID NO: 272024 - DNA, 736 bp, Unknown
  Bacterial polypeptide expressing nucleotide sequence isolated from the Sargasso Sea
tatggcaacaaatccaatgcatcaatttagtgttcatagaattggaccagaaataaaaattgctggaatagacatatcttttactaatgcaagtttatttatgctaattagtgttgctgcaatttttttattactttttttaggaactagagaaaaaaaaataattccagataaaatccaattaataactgagatgttttataattttatagctaaaatgattagtgatacagctggttcaaaagctaaaccttattttccttttatatttagtctttttatgtttgttcttttttgtaacatgattggtatgcttccttattcatttacagttactagccatattatagtaactttaattttagctatatttatttttatcgcagttacgataattggatttataaaacatggattcggttatttaaaattattcgttcctagtggcgttccagtggtattgttacctttaataacagttattgaaataatatcttacttgagtagaccagttagcttgtcggtgcgtttgtttgcaaacatgatggcaggacacactatgcttaaggtgtttgggggatttgttataagtttaggattacttggtggttggttacctctaagtttttcagtagcattaacaggcttagaaatattagttgcatttcttcaagcttatgtttttgcaatattaacctgcatctatttaaatgatgcattaaatttacaccattaa

SEQ ID NO: 272025 - DNA, 970 bp, Unknown
  Bacterial polypeptide expressing nucleotide sequence isolated from the Sargasso Sea
tatgacaaaaaaaactacatttaagtcacccgtgacaaaaaaagattatgttggaaatcttgagccaagatatgctggcattccgacatttatgaggacacctttggctgaaacattggaagatgttgatattggtctcattggggttccatatgatggtggcgtgacaaatcgagctggagcaaggcatggaccaagagaagttcgcaatcagtcaagcttaatgagaaccattcatcatatcaatagagaaagcccatttgatattgcaaatattgctgatttaggtgatgtttcattctcggaaccttttgatcatcaagctgtcaacaatgacatcacagatttctttggtttggtaaaagaatccggcgtgattcccttgagtgttggtggagatcactcaattacatatcccatttttaaaggcattgccaatgatggtcctatcggaatggttcatattgatgcacacacagatacatggggcgaaatatggggctctaagtttcatcatggctcaccttttagattggccgtagaagatggtttgttagaccctaagcgtacaattcaaattggtatcaggggtgctcagaatttcatggatggaattgacttttctttggattcagggatgagagtagtctttatggaagagttttttgaaagaggtgttaaagaggtgattaaagacgcattgaatactgtaggagatggaccgacatatatatctttcgatgtagatggtcttgaccctgtatttgctccaggaactggtacccctgaggtggggggtatcacaaccattgaggctcaaacgcttcttagaggcttaaagggtctcaatctaattggtgcagatgtggtcgaggttgctcctccttttgatcagactgggaatacagcactcgttggggcgactatgatgtatgagattctctgccttcttactgatcgcttcaagtga

SEQ ID NO: 272026 - DNA, 130 bp, Unknown
  Bacterial polypeptide expressing nucleotide sequence isolated from the Sargasso Sea
gtgtctctagaggacagcattaaaggttttaatggaattctaaagggagactatgacgatcttcctgagcaagcattttatatggtgggaactatagaagaggctgtagagaaagcaaaaacaatgtaat

SEQ ID NO: 272027 - DNA, 1261 bp, Unknown
  Bacterial polypeptide expressing nucleotide sequence isolated from the Sargasso Sea
atggtgaagccgacgctcgaagaaatccgcgccagcgatctgacgccgctcgaacgcgaactcgcgctcgcgtcgttcggcgccgaggcgttggcggatgcaccggctgcgctgacgcccgccgcggccgccgtcgcggctattgaagcggccttgcgtgagcctggccacggtcatccgggcgcggcgcggctggaggcgggcacgccgccgagccgcgaatccgctgccgcggaggccgcttcagacgccgcttcttcgagttccgcttcacccctccccgccccatacgatcccgcactcgacagcaacccgcacatgcaagcctggcgtagccgtctcgacgcactgcgcgagcgcaacgcaatcgccaaaccgatgcgagcctgcggacgtttgacccgcgcagccggcctggtgctcgaagccgtcggcttgcggctgtcggtgggcgctgaagtgatgatcgaactgccgcgcggcagttcgctgccgatggccgaagccgaagtggtcggcttctccggcgacaaactgtttctgatgccgaccaccgaggtgatcggcctcttgcctggcgcgcgcgtgtacccactcgaaagcgcgccgatcgccgatccaatggcgggcgccaagcgcctgccggtcggctgggaactgcttggccgcgtgctggacgcgtccggccgcccgctcgacgggctcggcccgctcggcgcgcatgccgatgcgccgctgtcggcgccggtcatcaacccgctgaaccgcgagccgattcacaaggtgctcgacgtcggcgtgcgcgcgatcaacgcgctgctgaccgtgggccgcggccagcgcatgggcctgttcgccggttcgggtgtcggtaaatcggtgctgcttggcacgatggcgcgctacaccagcgccgaggtgatcgtgatcggcctgatcggcgaacgcggccgtgaagtgaaggagttcatcgaacagattctcggcgaggaaggcctcgcgcgctcggtcgtcatcgccgcgccggccgacgtctcgccgctcttgcggatgcaggccgcgtcgtactcgacctcgctcgccgagtatttccgcgatcagggcaagcacgtgctgctgctgatggattcgttgacccgctatgcgatggcgcagcgcgagatcgcgctcgccgtgggcgagccgcctgccaccaagggctatccgccttcggtgttcgccaagctgcccggcgctcgtcgagcgtaccggcaacggcccg

SEQ ID NO: 272028 - DNA, 184 bp, Unknown
  Bacterial polypeptide expressing nucleotide sequence isolated from the Sargasso Sea
atgagtatccaagcatctgaaatatcttctattctaaaagatcagattaaaaactttgggcaagaagccgaagttgcggaagttggtcgtgtattatctgtgggggacggaattgctcgggtctatggccttgataacgttcaggctggggaaatggttgagtttcctggtggaatacaggcat

SEQ ID NO: 272029 - DNA, 721 bp, Unknown
  Bacterial polypeptide expressing nucleotide sequence isolated from the Sargasso Sea
atgcatcagtttaacgtttacaaaattggacctgaaattaaaataaatggtatagatttgtcttttacaaatgctagtctatttatgctaattagtgcaatttctatatccatttttttattattaggaacaaaagataaaaaaattattcctggaaaatttcaactattatcagaaatgctttacaattttatttctaaaatgattaacgataccgcaggtaaaaaagcaaaaccatattttccatttatttttagtctttttatattcgtattgttttgtaatatggtaggcatgttgccatattcttttacagtaacaagtcatataattgttactttagcatttgctatgtttatttttattggagttactatcttaggttttgttattcatggtttcaaatatttgaaaatttttgttcctagtggcgtaccggtagttttattacctattattatgataattgaaattatatcttatttgagtagaccggtaagtttatcagtgagattatttgctaatatgatggcaggccacacaatgttgaaggtttttggtggatttgttatcagtcttggcttagttgctggttggttaccactcaccttttctgttgctcttacaggtttagaaattttagtagcatttttacaagcttacgtttttgcaattttaacatgcatttatttaaatgacgcgttaaatttacatcactaac

SEQ ID NO: 272030 - DNA, 715 bp, Unknown
  Bacterial polypeptide expressing nucleotide sequence isolated from the Sargasso Sea
tatgcatcagtttgaaattaaaagattattagatatcaatattgcagggttcgatatctcctttacaaattcggctttatttatgctgattgcagtatttattataagttttacaactattatttctgttcgaaaaaattcaataattccctcaagaatgcagtcaattgttgaattatcttacgaatttgttgcagatatggttaggcaaaatgttggttctcaaggaaagaactatttcccctttatttttactttatttatgttcgtactctttttgaatatgcttggaatgataccatatggttttactgttactagtcatatagccgttacatttgctttagcaatgttaatatttataggcgttactattatagggtttgttaaacatggtttagggttttttggtttctttgtacctaaaggcgtgccaatttttatgcttccattattagttgtgattgaggtaatttcgtattttacaagaccgattagcctatctgttagattatttgccaatatgatggcaggccacactatgttaaaagtattttctggatttgttattttaatgggttttttaggtggctggcttcccctagccgttatggtagcatttacaggtttagaaattttaattgcatttttacaagcgtatgtttttgctatattaacatgtatctatcttaacgatgcattacatatgcactaa

SEQ ID NO: 272031 - DNA, 456 bp, Unknown
  Bacterial polypeptide expressing nucleotide sequence isolated from the Sargasso Sea
gtttgtgttatttttgtaatatggtaggaatgcttccttactcgtttacagttacaagtcatataattgtaactcttataatggcattatttatatttattgctgtaacaatcattggttttattaatcacggatttaaatatttaagtatttttgtaccaagcggtgttccagctgtactgttacctctaatcacggtaatagaaattatctcttatttgagtagaccagtaagtttatctgtaagattatttgctaatatgatggcgggacacacgatgttaaaagtgtttggaggttttgtggtaagtttaggaatattagggggatggttaccgcttagtttttcagtggcattaacgggtttagaaattttagtagcttttttgcaagcttacgtttttgcaatattaacctgcatctatttaaatgatgcattaaatttacaccattaaa

SEQ ID NO: 272032 - DNA, 318 bp, Unknown
  Bacterial polypeptide expressing nucleotide sequence isolated from the Sargasso Sea
catggccctaactcttcgggtgctttgccccgatcagaacgtcttcgatggtcaggctgacgaagtcatcctgcccagcacaaccggtcagctcggtgtgcttcctggtcacgtctccttgctcactgccctcgatgtgggtgtgctgcggatgcgtgatggcaaccaatggaccgccatcgccctgatgggtggctttgctgaagtcgacgacgacgaagtcagcgtgctcgtcaatgccgccgagcccgctagcggcatcaacgctgaagaagcccaaaagcaactcagcgaagctgagcaggcttggagcaaatt

SEQ ID NO: 272033 - DNA, 736 bp, Unknown
  Bacterial polypeptide expressing nucleotide sequence isolated from the Sargasso Sea
aatggcatcaaatccaatgtaccaattcaatgtatatagaattggtccagaaataaaaataggtgaagttgatttatcttttactaatgcaagtttattcatggtaattagttctctagcagtattgattatatttaatttaggttcaaaaaaaaattctttaataccaaataaaattcaactactcgccgaattgagttatacatttgtatccaaaatgataagtgatacagctggttcaaaagctaaaccttatttttcattcatattttctttgttcatgtttgtattattttgcaacatgtttggtatgattccttatgcatttactgtaactagtcatattattgttacttttgttctagcggcatttattttttttggtgttaccataattggttttattaaacatggatttgggtacttaaaactatttgtaccaagtggagttcctgttgttcttttgccattaatagtggtaattgaagtaatttcttatttgagtagacctgtaagcttatcagttagattgtttgctaatatgatggcaggtcatactatgatgaaagtattcggaggttttgtgattagccttggaatagtcggcggatggttaccgcttggcttttcagtagctttaacaggtttggagatattagttgcttttcttcaagcttatgtttttgcaatattaacctgcatctatttaaatgatgcattaaatttacaccattaa

SEQ ID NO: 272034 - DNA, 721 bp, Unknown
  Bacterial polypeptide expressing nucleotide sequence isolated from the Sargasso Sea
aatgcaccaatttaatgtttatagaattggtccagaaataaaattaggagaagtcgatatttctttcacaaatgcaagtctattcatggttatttgttctttagcaattttgttaatttttaatttaggaaccaaaaaaaattcattagtaccagataaacttcaactacttgctgaattaagctattcttttgttgcaaaaatgatcagcgacaccgctggtacaaaagcaaaaccatatttttcatttatattttctctatttatgtttgttcttttctgcaatatgttcggaatggtaccgtactctttcacagtcacaagtcatattatagtaacttttgttttagcggcatttatttttattggagttacaataataggatttattaagcatgggtttggatatttaaaactgtttgtgcctagtggggtgcctatagttttgctacctttaatagttgtgatagaaattatttcttatttaagtaggccaataagcttatctgttaggctttttgcaaatatgatggctggtcatactatgatgaaagtattcggaggtttcgttgtaagtctcggaataattggcggatggcttccgctaagtttttcggttgctttaacaggtttggagatattagttgcttttcttcaagcttatgtttttgcaatcttaacatgcatttacttaaatgatgcattaaatttacaccattaa

SEQ ID NO: 272035 - DNA, 4394 bp, Unknown
  Bacterial polypeptide expressing nucleotide sequence isolated from the Sargasso Sea
cctggtcctcatctcaagtgcggccgttggtgtcggaaccgttctggcggttcagtctctgaactccaccgctgaggatttgctcggttcgtttcgcgggccactcgaacaacgcatcggcgccgctctcggtcacccgctcaaaatcggcccctacaagggtttgaggccatggggtgtggcccttggtgagacggccatcgctcccaccagctccgatcgctccacgatcaagcttcaggggctcagtgttcatctcgatcccctggccagcctgcggcaatggcagccggtggtgcggctgaaactgcagggcctcgatggggttttggatcgccaggccgatggtcgttactggcggtttggggacgtgcctcaaggcggagatgcacctccggatctggacctgcgcttcgaactggttcaaccggccaggattcgcctgactccctctggcgaggagatccagctgtccagtcgtgggtcggtgcagatcgctcagaagcgattcacagcgatgtcgcggctgcgttggccagacggcgccggcagtcttgcggtggacgtcaagggacgctgggatcgccccgaactggtgctcagcagtcgtgtgcgatccctggatctctcgcgactggagccctttctccccgggccggatgccacggagctagcgggagaggctggaggggacctggcgattcgatggactcccgatcgctttcgctgccaggggcagctgcaggtcagggatcttgagcttcagaacacaaccctgccggatcccctgcgttcatccgctgttggattcagctgtcgcaacgatcggctgagcctggatcccagtcgatggcgcttgggggaatggcgggccgacgccaagggttttctgcaggtcagtggacccgttgatctgagaatcaacgtggcgtctctgaagcgcaaggatcgcgctcaacttcgactggatggcccctggtccaacccccgctggcgccttgcgggactggtggatctgcctgagctcgatggacctttgcgtgtgcagggccagctgcgcactccatggactgatcctgcgttccgtcagatccaggttcaaaacgctctaatcacgtcggctggtctgcgcttgcggctggacggcacgatcggcgatcagatcgatctgcgcagtcgggaactcagcctggctccttcgttctggcaacggtggccggttctgaagcagagccttggcgagacgtctgaactgtccggagcgctgcgggcgagcgggtccctggcatcacctgagctgttgctggatctttcccaggatcgcaatcttgttctgcagcagtgggatcttcgggcgtcctggtcgaaggcctccggggtcctggccctcgatcgtttcagcagcccggtgctgcgtgcggaggcgcagctgcccattcgttttcaaaacggcgcagctcagcttggagagctgaaggcgggtttcgccctcacgtcactgcccctggcccgcctttcggctctgacgtccattcctttggaaggccgtctatcggcccgcggacggtttcagggtcccctgagtgatgtgaacagcaccgtggcgctggatcttctccgacccggcgttggaccgttgcagttgccggagcgttggcaggggcaactgaccggatcgacccgatctgagttcaacctgcgtctggcctcccaggccccagccactgatggagacctgacggctcgactggcttcctccggttggccattgcaggcggacctccgtcgcggcggcggcagcttgaccgtgcggcccggcgccgagcgccagttgcggtggagagcggatcagctgtcgatcgccggacttcagctgtcgctgcccacggcatccgcatcaggtccattgcagggacgtctcagtggcgacggcgttctggcgttgaaacctgtggagctggtcggtgatctgcatcttgatgacccgaaactccgcgggattgccttgaagcggatcgagctggagggacgtgttgcggcgggtcgtttccagacccgcggtcggctgcagccccagcagggtgagattcagctgacagcccagggacgcgtgggcgggaacctgcgcagccggatcgaggcctccggactggatgtgccttggttggtgcagatggcccagcagctgcgtggtggccagctccccaccgctggccccctgggccgcgctgaggatctcggcacgttggtgatcgacaccttcgggggaagcctggaagggcatctgcgtgctcttcaggggtctcgtcagtggctggaggtctacggccgggatcacccccagccgcgtgtggatccaggtgaccttcgcggtcgcctcgacgctgttctcaaccttgccggtccggatttggcatcgctgtcgctggaggcagaggcccgggcgcatctgtggatggatggtgaagatcgggatcggatgcttcagctcgaacccgttgtggctcagctgagtggtcccctgcagggcggccagggacgcttcagccttctgcatctgccgttctcgcttctgactctggtcgccccggttccgtccgctttgcgaggggccatcggtgtcacgggctcctacgacctgaccggtcgcggcccgttgctgaccacggagttggccctggaacaggcgcgcttcggtgagcacgcccttcgccttgaacgacaagccgttgtgttggcttcggatgggcttcagctcgatctcgcgctccgcagtgatggtgctgccgaggcccttcaggtgcgcggcagcatcccgctgaatttgcgtgacgcgctggatcttgagctcgaaagccatggagatgccctgagcttcctggcggcccccgccggcgatgccctgacgttgacccggggcagcagtgaccttcgcctgattctgagtggatacctggatcagcctcaggccaacggttttctggtggtgcgtgatggtgccttcaccgcggctgagcagtccttcaagaacgtcaacgcctctctgttgttcgatttcaaccgcgtcgaggtcagccagctcgcggcgacgctggagtctggggggagcgtctcggctgcgggcgccatcggtctgttcaccccccgtgaggaggagacgccactcagcattcgtctgaccaaggggacgttccggcaggagagagtggatctggcggctgatggcgagatcacgttgcgtggtgccctgagccagccgttgatcagcggccagctgaatctcagacaaggggtgattcagccccggggaggattgctctcgcgtctacgcagggctggtggtgcatccccgaagcagggggttcaaccgttccaggcgaatgcctcaaccccggtctcgaccgcggctttgctggaggaaggctgggattttcaggatcccctggtgctgtttggccccggtgctcccgctcagttgccggcggcattccaggatctgatgcccaatctttctgcggttcgtttccgcaacttccgccttgggctgggccctgatctgcaggttcggatgccgcccttgatcagtttccgaggtggcggtcagctgctggtcaacggcccattggatccgtcattggagctgcggggcctgattcgcctcaaccgcggtcgactcaacttgttcaccagtacgttccgcctcgatccacgtgctcccaatgtcgcggtgttcaccccctcgctgggattggtgccctttgtcgacatcgcgatgaagacccgggtctcagatgcggtgcaacccggaacggccggcaatgccaatacagccgatgtcttcgacaccaatggactcggcaacatcggtgatggaggtggccagctgcgattggtgaaggtcacagtggaggccgccggaccggcggatcgtttggtgggcaatctggatctgcgcagtgttccgccgatgtcggagccccagctgttggcgctgatcggtggtaactccctctccggcctggcgggagccgggggaacagcccttgccacggtgctggggcagtcgctgctctcgccggtcctcggaacgttgaccgatgccatgggccagcgcatgcagatcgccttgttccccacctatgtcaccccggacatcaaggatgacaacgagcgcacgtcaggccgggtggctcccaccttcacgctggtgactgaaatcggtgttgatgtgaccgatcgctttgatttctcggtgctggcggctcccaacacctcagatgttccccctcaggcgacggtgacctaccaggtgaaccccaacacggccttgtctggatccgtggattccaatggcacatggcagagccagctgcagctgttcttccgcttctgag

SEQ ID NO: 272036 - DNA, 721 bp, Unknown
  Bacterial polypeptide expressing nucleotide sequence isolated from the Sargasso Sea
atgacacaattcgaagtctatagaattggtcctgaaattaaagtaggtgcttttgatatttcatttacaaacgctagtttgtttatggtcataagttcgctagctattttgattatatttaatctcggatcaaaaaaaaattcattgctaccaaacaaaattcagttgttagctgaattaagttatacatttgtttcaaaaatgattagtgatacggcaggctctaaagctaagccttatttttcttttatattttctttatttatgtttgtccttttttgtaacatgtttggcatgattccttacacctttacagtcacaagtcatattattgttacttttgtgttagcggcttttatttttatcggtgtaacaataattggttttataaaacacggtttgggctacctaaaattatttgtaccgagtggggttcctatagtgctattaccattaattgtagttattgagattatctcatatttaagtagacctattagtttatccgtcagactctttgctaacatgatggcgggtcacacaatgatgaaagtattcggaggctttgtaataagccttggggtagtcggtggatggcttccactgagtttttcggttgctttaactggcctggagatattagttgcttttcttcaagcatatgtttttgcaattttaacctgcatctatttgaatgatgcattaaacttacaccattaat

SEQ ID NO: 272037 - DNA, 433 bp, Unknown
  Bacterial polypeptide expressing nucleotide sequence isolated from the Sargasso Sea
ttgggtaaaaagacaggtgaattgattccgttttttagaggggcttctacagatgtaaataccactttggctatagctattttctctatgatagctattcaattctggggtttttcttctctaggatttaaggggtatggtggaaaatttattaacttttcacaaggtcctataaatgcatttgtaggaatattagaattatttggtgaatttgcaaaaactattagttttacgtttaggctttttggaaatatgttcgcgggtgaaatcgtacttatttcaatgggatttttattgcctttggttggaatgatgccgttcatgggtcttgaactttttgttggtgtcatacaggctctaatattttcaatgttaacattagtttttggggtaatggctgtcacatctcactcagatcatgacgaccattagg

SEQ ID NO: 272038 - DNA, 714 bp, Unknown
  Bacterial polypeptide expressing nucleotide sequence isolated from the Sargasso Sea
atgagttagcagaatacctttcagatgaattttttgtaatcacagttgatcaaaggggtaggggtagaagtagttatattgaagatcatcaaaaatatacccctaaaacatacattagtgacatgcatgaactcattcagtcgtttaattttaaagaatgttatcttattggcacatcgatgggagggtttatggcaatgacaatgtctgtgatgaattcagcattgtttccaaaaatagttttaaatgattgtggtcctgagattcatcaagttggaattaataagattagtacttatctaggtaaaaatgagtcatttgaaagcatagatgaggcagttgcaatactcaaagcaagacatgaatctaatttccccttactaaccgatactgattggaagcgatattgcatgaataatttaaaaatcaatgaagaccattcctataattttgactacgatcaaaacatacgagttgtatatgaaactgcaaaattaaatattggcgatatgtggaatgtttgggaagaaattaattctaatatctttgttattcgtggtgctttatctcaactcttatctgaatccacattcaagaagatgcaagcaaaagagaatgttatcagtattgagattccagataccggacatgctccactgcttacgtcaaaatttgaattagattcaatcaaagctttcttattatcgaattgaa

SEQ ID NO: 272039 - DNA, 356 bp, Unknown
  Bacterial polypeptide expressing nucleotide sequence isolated from the Sargasso Sea
ctttagcccgtatcgtgagctagctgccttttctcaattcgcttctgatttggatgaagcgacaaaacaacagcttgctaatggtaaagcatttaccgagttacttaagcagaaacaatatgctcctatgagtgttgcccaacaagctttaagtttatttgcagccgatagaggctacatggcagatgtcgatgttgataaaattttagactttgaagaatcccttcacggttatctaacttctgaaaagggcgaattagaagaacaaataaactcaaccggagattggaacgatgacatagaaagtcaatttaaagatctcgttgaagacttcaaaaaaacacaaaccttttaat

SEQ ID NO: 272040 - DNA, 706 bp, Unknown
  Bacterial polypeptide expressing nucleotide sequence isolated from the Sargasso Sea
atgtaccaattcaatgtttatagaattggtccggaaattaaattaggctcagttgatatctctttcaccaatgcaagtttattcatggtcattagttctttagctattttgataatttttaatctaggagcaaagaaaaaaaccctaatacctgataaattacaattattatcagaattaagttattcctttgtcgccaaaatgattagcgatacagcaggatcaaaagcaaaaccctacttttcatttattttctcattatttatgtttgtactattctgtaatatgtttggaatgataccttacgcatttacagtcacaagccacatcatagttacatttgtgcttgcagcatttatttttgttggagttacgattattggatttatgaaacatgggttgggatatttaaaattgtttgtaccaagtggggttccaatggttctacttccactaatagttgttattgaaattatttcgtatttgagtagaccaattagtttatcagtaagattatttgctaatatgatggctggtcacacgatgatgaaggtatttggaggctttgttataagcctaggaattgtaggtggatggctcccacttagtttttcggttgcacttacaggtttggagatactagttgcttttcttcaagcatatgtatttgcaattttaacatgcatttatttaaatgatgcattaa

SEQ ID NO: 272041 - DNA, 1870 bp, Unknown
  Bacterial polypeptide expressing nucleotide sequence isolated from the Sargasso Sea
aatgatccagcttgaaagtatctgtaaatcctatcccaatgggaccctatttacaaatgtaaatatatacataaaaaaaggtatgagaattggcctagttggccagaatgggtccggtaagacaaccttactgaggcttatgctaggtgaagaaagacaagattctggaaatattcaaaaggaaaagaatattgcaatcgggtatctggagcaagaaataatctcagggactggacggtcgatcattgaagaagtgctagcatcttaccctggtgctatagaaatagaaaagaagatggttagtttgtcaaatgaaattgagaaggatcctgacaatactacgttgatagatcggttaggcgaagctcaaaataaatatgaggccatgggtgggtggaccctggaaaaaaatgcaaaaaaaatattgggcggtcttggttttaaggatgaacaattttcagagcccatggagtcgttttcgggtggttggagaatgcgagttgcccttgcctcaatattgttacaagaacctgatattatatttctagatgaacctacaaatcatctggaccttgaggcgacaatatggctagaagattttctgaccgaatggaagggtgcaatgttggtcataagtcatgatcgtgcttttttagatcgatcagtaaatcatataatagatatagacctgaagagagttgcattatatcatggaaattatacagagtttaaaaatgaaaagaaaacgagaatagagcagcagagaagtgcatacaagaatcaacagaagcatataaaagacacacaaagatttattgagcgttttcgctataaaaatactaaagctacgcaagtacaaagtagagttaagaaccttaataaaatggagttgatcgaagagccaactgatgatagaaaagtattaagcctattgataccgcaaccagagagatcaccattaaaagtagctagttgtattaatgtgatgaagtcctatggtgacaatcaagttttcgaagaccttgattttaatgtggaaagaagtgaaaagataggacttgtaggttataatggcgcaggtaagtcaactttattgaaaatgcttgctggtgtggaagaggttacaagtggggatattatatatggaagcggtgtcaagataggatactatgcacaacatcaattggagatactagaaaaagatgaaacggtgtatgagtcattaagtaaaatttctgttggttggggggaaacgaagatcaggtcatatttaggaagttttatgttttcgggggaagatattgaaaagtttgttaaggtattgtctggtggggaaaaggcaagactggcactagccagaatgttagtttcgccttcacacttggtactgctagatgagccgacaaatcatttagatatgatcagtagaaatgttgtggaaaaagctttgtcagattttagtggttctattgtttgcatttctcatgatagacattttttgaatcaggtaacaaataaaacatgtgaagttggaaatggaggaataaaaatatatgatggtaactatgaatattttgaatggaagaaaaaagaagaaaaagatcttttagttaataatgatagagtagtagaaaaagcagggaaaaataaaaatagttatgcagaaaaaaagaggataagaaatagattaacttggatcaataaaagatctaatgaaattgataaagctatagagggtctaaataaagagataaatgatcctgagaatagcagcgaccattcgttattaaaagagaaattagacgatttagaattacttgaaggtgaatatctagaattgctagaagaaaaagaaaccttattaaaataa

SEQ ID NO: 272042 - DNA, 2174 bp, Unknown
  Bacterial polypeptide expressing nucleotide sequence isolated from the Sargasso Sea
aatgtctaaatctttatctaaattcattacaacaaacccaaaatcttttttatttatttttgttgttgctttaattttctcattattcaacttggataatttcaagcttgatgcttcctcagattctttagttttggaaagtgatgacgacttaaaatattacagagaagtaaactctgattactcctcttcagatttcttgatagttatttttgatccccaagaagacttattctctaaaaaaactgtagttcaggtccgtgaaatggttactgtgttcgaaaatattgatggagttcaatcagtattaagttatctagatgctcctttactttttagtcccaaaatgagcatgagcgaattagtagataatttgcgaactatagaggacgaaggagcagataaagatcttgcccgaatggaatttaaaaatagccctctctatactgaactacttactgataaagagacaaattacacggcgatgcaattaatacttgccaataatcctgaatacgatgcagccatcaataaacgctatgagattctagatttaatcaattctgatcaatactctcctgatgtgcatgacttagctttagaagctgtaaatgaggatattaagttattgaatgctcaagcttcgattgagagagacaccttaatcgaagacactagacaagccatgaatgagtttagaaatagtggagatatttatcttggaggcacagcaatgatagcttcagatatgatcagcttcatcaaaagtgatttacagtatttcgcattaggtgttttggttatgtttgtagtgaccttaagcattatattcaagaagttacgttgggtaacaatgcctttagtatcaagcgccctgatagccctttttgttataggcttcttaggttggatggactggagggtaacagttgtttcgtcaaattttatatctttgcttttgataatttctatttccttgactatccatttaattgttagatatcaggagttgtatgaaatcaatgcctctgcaacaagacaagaattagtcgcaatgacaataacacagatgcttaagccttgtttctacaccgccttaaccactattattgcctttgcctctttaggggtgagtgaaattaagccagtgatggattttggcaaaatgatggttgctggaatattttttgcttttttattttcgttcattctttttcctattttcatgctcttattcacttccgagaaaggcaaagaatcaagagattttagtagaggagtaactgttattttttcatcccttacagaaaagttaggcaattacatcactttaatagcaattgtgcttttttccatctctttatacggaatcaatcaattgactgttgaaaatagatttattgactatttcaagccatcgacagaaatttataaaggtatggatttgctagatacaaggctaggagggacagctcctctagatatagtaattaatgctccaagtgattggaatattcaggaagaagataattttgatgatgattttggtttcgaggatgatgaattccaaaatggatattggtggaataccatttcattagatagattagaagcaattcatgattatattgattctttacctgagataggaaaggtcttatctgtagctagtggaattaaggtagctagagaattaaaggacggtgagccattatctgaacttgatttggctttagtcaaaaatatgttacctgaagatataaaagaaaatttacttagttcttatatcagccaagatgaaaatcaagtgagaatatctgctagagtcatagaatctgctgaagggttaaaccgcaatgaactcttggaagaaatttcaactaatcttgaaaatgaatatggtctaactaaagatcagtttaggcttactggtttagcagttttatacaacaacatgctccaaagtttatttgattcccagattggaaccatagtcattgttttcacaattattttcttaatgttcctaatactcttcagatctttttatctgtccattattggtattattccaaacctattagctgcgagtgttgttctggggacaatgggcttattcggcatcccgcttgatattatgaccatcacggtagccgcaataagtgtaggtatgg

SEQ ID NO: 272043 - DNA, 466 bp, Unknown
  Bacterial polypeptide expressing nucleotide sequence isolated from the Sargasso Sea
cgacatgttagagatgttatgattaattcaagtgaaaagaaaatcaaaataacagaagtatttgatccttcaattccagatgttattggtaatgaagaccaattgattcaaatatttattaatcttattaaaaactcaatagaggcattcagtgatgaatcagactctgataatgaaattatcttatcaactaattatgagcatggattcattattaaagaaaaattaagtgaagaaagagtaaaattaccaattaaaatttctgtgatggataatggcccaggtattccagcctcaatatcacaagaaatctttcaaccatttgtaagtactaagaaaattggccaaggcgggcttgggttatcaatagtttccaaaatagttagtgatcataatggaactattgagcttgatttaactgatcaaggaacaaaatttattattagattaatggcggagtcataat

SEQ ID NO: 272044 - DNA, 721 bp, Unknown
  Bacterial polypeptide expressing nucleotide sequence isolated from the Sargasso Sea
atgtcccaattcgatgtttatagaattggaccagaaattaaagttggagcattcgacatatcttttacgaacgcaagtttgtttatgattttaagtactgtatctattttattaatctttaatttaggatcaaaaaaaaattcaatattaccaaacaaaattcaattattatcagaactcagctatacctttgtatccaaaatgattagcgatacagctggatcaaaagctaaaccatattttgcatttatattttctctattcatgtttgttttattttgtaacatgtttggaatgataccttatactttcactgtaaccagccatatcattgtaacatttgtgctcgcagcatttatatttattggagtgactgtaattgggtttattaaacatggatttgggtatttaaaattatttgttccaagtggagtacctgcagtattactccctttaattgttgttatagaaattatttcttatttaagtagacctataagtttatcagttagattatttgccaatatgatggctggtcatacaatgatgaaagttttcggaggctttgtaattagccttggaatagttggtgggtggcttccactaagtttttcggttgcgttaactggtttggagatcttagttgcttttcttcaagcttatgtttttgcaatcttaacctgcatctatttaaatgatgcattaaatttacaccattaat

SEQ ID NO: 272045 - DNA, 736 bp, Unknown
  Bacterial polypeptide expressing nucleotide sequence isolated from the Sargasso Sea
aatggcatcaaatccaatgtaccaatttaatgtatatagaattggtccagaaataaaaataggtgaagttgatttatcatttactaacgcaagtttgtttatggttattagttccttagcggtattgattatatttaatttgggttcaaaaaaaaattctttaataccaaacaaaattcaactacttgctgaattaagttatacttttgtatccaaaatgataagtgatacggctggctcaaaagctaaaccttatttttctttcatattttcattgttcatgtttgtattattttgcaacatgtttggaatgattccgtatgcgtttacagttactagtcatattattgttacttttgttttggcgtcatttattttttttggtgttaccataattggttttattaaacatggatttgggtacttaaaactatttgtaccaagtggagttcctgttgttcttttgccattaatagtggtaattgaagtgatttcttatttaagtagaccagtaagcttatctgttagattgtttgctaatatgatggcaggtcatactatgatgaaagtattcggaggttttgtgattagccttggaatagtcggcggatggttaccgcttggcttttcggtagctttaacaggtttggagatattagttgcttttctacaagcttatgtttttgcaatattaacgtgcatctatttaaatgatgcattaaatttacaccattaa

SEQ ID NO: 272046 - DNA, 2224 bp, Unknown
  Bacterial polypeptide expressing nucleotide sequence isolated from the Sargasso Sea
attgaaaacagtgttaaatacgctcagggatattacccaagctgtggcttctgcccacagcttagaaaccgcattagaagtcctagtttcatcgaccaaggctgcgatggaaacccaatgttgctcggtctatatcctagagcagcaagaactcgttttatccgcaaccgatggtctcgaaaagagtgctgtcggtcgagtgcgcatgcctttaactcagggcttggtgggcttagctgccgagcgtgaggaggcggtgaatttagccgatgcacgtttacatccgcgctttaagctctttcccgaggttgcagaagaagaataccgtgcctttttagctgtccctattatttatcaaaaagcggttgtgggtgtgattgtggtgcagcaagctagtgcacggcaatttagcgaaggcgaagaagcctttttaatgaccttggctgcgcagcttgcgatggcgatccgaggattaaaacaaaaggcgcaggtcagttcactccatcaacagattttattccaagggacatctgcatccagtgggatcgctattgcacacgcgttagtgctcggtggggagatttccctcgaacagcccgatgtgcgctgcgaggatattgcccttgaatccagccgtttagtcgcggcaatggggcgttgtaaagaggcgattggtgcgctatctcagcgtttcgaccgagaacaggatgaggaggtcgcctcaatattcaatgctttacagttactactcgatgatgccagcctcggtggtgaatatacccgtgaagtacagcagggctgggaggctgaatcggcggtgagccgggtttcgttgcgttatattcagcagtttttggcgatggaagatccttatctcaaggagcgggcgagtgatatccgcgatttggggcaaaaggtgctaaggcaattgattgagcctgagcgattagagcatgaacctgataaacctgtaattttagtgacgaaagaagccgatgctacaatgttggctgaatttcctcggcaaaaattagctgggattgtgaccgagctcggtggcgttaactcccatgcggcgattttagcgcgggcgcttggtgtacctgcgattacaggcgttgaacagttgctttccgctgatattgatcaaaagctgttagtcgtcaatgccagccgtgggcagcttatggtgtcgccatcgcctgctattgttagcgaatatcgcagccttatctcagcgcaaaaagcgttgcagcgccaatacgcacaggagttagcgctgccttctgtgatgcttgatggcacgcgaattagactctatctcaatgcgggattactcagtggtgtcgcctcggaaattgccgaaggggcagatggtattgggttatatcgcactgaaatcccctttatgttgcagcagcgttttccgagtgaatccgagcaggtaaaggtttatcaacaggtactctcagcggcttcgggtcgcccggtagtgatgagaaccttagacgttggcggcgataagcctttgccgtatttcccgattaaagaagacaatcctttcctcggttggcgtggtattcgactatcactggatcaccctgagctgtttcttgtgcagttaagggccatgttacaggctggcgcagaaggcaagcagttaagcattttgttacccatggtcagtaatttagatgaaatcgatcaagcgttagcctacttagagcaggcctatgttgaactcaaaaatgatgtcaacagcaatatcgaaatgccgcgtattggcataatgctcgaagtgcctgcaatgctatatcagttagatgaagtggcaaagagagtggattttgtgtcagttgggagtaacgatttaacccaatatttactcgcagtcgatcgcaataacccgagggtcagttcattatttgacagttatcatccggggattttgcgggccttacatcaggcaagaatagattgtgaatatcatcatcttgatatcagtatctgtggtgagttggctggcgagcccatgggcgcgatcttgcttgtggcgatgggatacaaccaattgagtatgaaccaaggcagtttagcgcgaattaactatctgctgcgccgagtctctggtgatgatttagcacagctactcgcgcaggcgttaagcctatctaacggtttccaagtgcgtgagctggttaaagaatattttactcagcaagga

SEQ ID NO: 272047 - DNA, 1105 bp, Unknown
  Bacterial polypeptide expressing nucleotide sequence isolated from the Sargasso Sea
tttgctagttgaggaaacaaatttttctaactttagtttattaaaaactagatttaaatcacaaaggacagaagatggaattgaatataaatttacaaataaagacctaagtgggattttcttagtacctaaagaaaaggatagaaatgtatcttttaattttgattacataaggattaatcaattagctggaagttctaaagatagttttctaggtctctacaacggcatagatagtgaatttgatttcagcaccaaagccattttaattaatggtcaggactatggtaattggaaattttctgtagtacctgatgataatcaattgatgctatatggaatagaaggtacttatgggaggtggcaaatcactaataatatgaatggaatatcctctttaaagataaaaaagaaaacatttggttggagatctagccttgaggctaatatttattcaggatcccctgaaaaagctatgaaacaaattgatatagaaccaaattttgaattggacactcttagtttagatgttgatttatcttgggataatttaccttggatatttgattacaatgttgtatctggagacatttcaacaaattttactggttttacaatcaggaatagtgaagagctagaaacccccaataatctactaagattagttaatatatttaatatcaccgactcatttgaaaagattactaatctagatttcagaaagctgtacaaaagaggttttagtgcagatagtgttaaaggtaaatttgggataacggaaaaaagtctaaaaattaaagagccaataatactaaaaagtggttcaagtgaatttagttggactggggagatttctagagataaaaaaggaaatttagataaacttaatttagaagtagtaatgactttgcctcttagagaatatttgcctgcctatgcctttgttctgggaggtcctttaacagccggaatcgtgtatatagcaggtaaggcttttgaaagaaatttagacaagttgagctcagggaagtggaaagttaatggtaagatttctgaaccgaaaacagaatttgatggatggtttgaagacaaaaaaaatcaataa

SEQ ID NO: 272048 - DNA, 291 bp, Unknown
  Bacterial polypeptide expressing nucleotide sequence isolated from the Sargasso Sea
gatgagtgaaaatggcataattaaacaaattatcggagctgttatcgacgttgagttcgataaagagaatatcccaaatatctatgatgcactggtcgtaaatgacaataatttggttcttgaaacacaacaacaacttggcgatggtgtagttaggaccgtggctatgggaacaactgagggtttaaagcgtggcctcaatgttattaatacaaaagccccaattagtgtacctgtaggagagggaacgctcggtagaataatgaatgttctcggtgatccaattgatat

SEQ ID NO: 272049 - DNA, 352 bp, Unknown
  Bacterial polypeptide expressing nucleotide sequence isolated from the Sargasso Sea
atggcaacgatgcattgtgaaattgtgagcgcagaaaaggagcttttttctggtgaaatagaaatgttatctgcccggggaactataggggagttaggtattatgccgggtcacgcgcctttgctaactggtattcagccgggcacagtgattttaaggcttgcagatggcacagaagaaatcttttttgcatccggcgggtttttggagatccagcctggatccgtcacggtgctggcagatgtagcggcccgtgctgaagatttggacgaggctcaggcggaagaggctcggcaagcagctgagaaagcgcaatctgaagctgcagcggcccaagatttctctctagccg

SEQ ID NO: 272050 - DNA, 151 bp, Unknown
  Bacterial polypeptide expressing nucleotide sequence isolated from the Sargasso Sea
atgagaaaaggacaaataacacagatcattggggcggtagtagacgtaaaatttgagggagaactaccagaaattttaactgcattagagtgcgataacggtggaaatagattagttttagaagttgctcaacacctaggggagtcaagtg

SEQ ID NO: 272051 - DNA, 721 bp, Unknown
  Bacterial polypeptide expressing nucleotide sequence isolated from the Sargasso Sea
atgtaccaattcaatgtttatagaattggtccagaaataaagttaggctcagttgacatttctttcactaatgcaagtttatttatggtcattagttctttagctattttgataatttttaatctaggtgcaaagaaaaaaactctaatacctgataaacttcaattactgtcagaattaagttattcctttgtcgccaaaatgattagtgatacagcgggatcaaaagcaaaaccgtacttttcgtttattttctcactttttatgtttgtgcttttttgtaatatgtttggaatgataccttacgcatttacagttactagccatattatagttacatttgtgttggcagcatttattttcgttggagttacaataattgggttcatgaaacatggattgggatatttgaagttgtttgtaccaagtggggtaccaatggttctactccctttaatagtagttattgaaattatttcttatttaagtagaccaattagtttatcagtaagattatttgctaatatgatggctggtcatacgatgatgaaggtatttggaggctttgttataagcttaggaattgtaggtggatggcttccacttagtttttcggttgcacttacgggtttggagatattagttgcttttcttcaagcttatgtatttgcaattttaacatgcatttatttaaatgatgcattaaatctacaccattaat

SEQ ID NO: 272052 - DNA, 601 bp, Unknown
  Bacterial polypeptide expressing nucleotide sequence isolated from the Sargasso Sea
aatctgggatcaaaaaaaaattcattaattccaaataaaattcagttgttagcagaacttagctatacctttatagctaaaatgataaatgatactgccgggtcaaaagcaaaaccttatttcgcatttatcttttcactttttatgtttgtgcttttttgcaatatgtttggaatgattccatacgcatttacagtaacaagtcatataatagtaacttttgtgttagcagcattcatttttattggagtaacaataataggctttataaaacacggccttgggtatctaaaactttttgttccaagtggagttccagttgtattattgcctttaattgttgttatagaaataatttcttatttaagtagaccaattagtctatcagtgcgattatttgcaaatatgatggcgggtcacacaatgatgaaagtattcggaggctttgttataagcctaggaatagttggtggatggcttccactaagtttttcagttgcattaacaggtttagaaatattagtagcttttcttcaagcctatgtttttgcaatattaacgtgcatctacttgaatgatgcattaaatttacaccattaac

SEQ ID NO: 272053 - DNA, 148 bp, Unknown
  Bacterial polypeptide expressing nucleotide sequence isolated from the Sargasso Sea
atggccctaactctgcgggtgctctgccccgatcagaacgtcttcgacgggcaggctgacgaagtcatcctgcccagcaccaccggtcaactcggtgttcttcctggtcacgtctcccttcttactgcccttgatgtgggtgtcttgc

SEQ ID NO: 272054 - DNA, 619 bp, Unknown
  Bacterial polypeptide expressing nucleotide sequence isolated from the Sargasso Sea
aatggccctagacatcaagcctaccaggtccgagctgatcaacctgaagcgcaggataaagcagacctctacgggatacaaccttctgaagatgaagagggatggcctattccacgaattcagaactctgctctcagaaatgatcgaggccagagagggactagtggggacatacagagatgcactgcaagcaatcaatctagcctcatcgatagagggtggattggcagtaaagagtgcagccatagcctcgtcgaagcatccagaagtgcaggtctcaaagaggaatattatgggcgtagttgttccaaaggtcgagggacagaacctcaaactatcggtcgaggataggggactggggatggttggaggttctccctacattgacgaggcggcggacgcctactcgctacttgttgagaaggtagtaaaggcggctgagatggaggccactctgaagaggcttctagaagaaattgaagctactaaaagaagggttaatgctctcgagttcaaggtaattcctgagatgaaagaggctcagactttcatccaactaaggcttgaagagatggagagagaggagactttccgcctcaagcgcttcaaaaacaagtga

SEQ ID NO: 272055 - DNA, 721 bp, Unknown
  Bacterial polypeptide expressing nucleotide sequence isolated from the Sargasso Sea
aatgcaccagttcaatgtttatagaattggtccagaaattaaaatagatcaaatagatatttcttttactaacgctagtttgtttatggtaattagctctttagttattcttattgtctttaatttaggttcattgaaaaagagaatggttccaggtaaaatgcaattactagctgaacttagttactcatttatttcaaaaatgattagtgatacagctggttcaaaagggaaaccatattttagtttcattttttcgctattcatgtttgttcttttctgcaacatgttgggtatgttaccatacgctttcacggtcactagccacataattgttacttttgttttggcggcatttatttttgttggggttaccgtaattggttttattaaacatggtcttgggtatttaaagttatttgttccaagtggtgtcccaattgttttgttgccattaattgtaattattgaaataatatcatacttgagtagacccattagtttatcagtaagactttttgcaaatatgatggctggacatacaatgatgaaagttttcggaggttttgttataagcctcggattagttggtggatggcttccactaagtttttcagttgcattaactggtttggagatattagttgcttttcttcaggcttatgtttttgcaattttaacatgcatatatttaaacgatgcattaaatttacaccattaa

SEQ ID NO: 272056 - DNA, 2056 bp, Unknown
  Bacterial polypeptide expressing nucleotide sequence isolated from the Sargasso Sea
atggtcgctaatctatattggttttttttctttcttttactttatattagcttttgtcttttttggggtgcgagaactctaagaaaaaataaaacaccagaggcatactatttagctgataggagtgtgtcaccttgggtattctttttttctgcaactgtagcaacgttcgcaggtataactattatatcttttccctctttggtccatgctgatggatactcctttcttgccactgcagctattgtaataactatcccacttggaagcatattattttttaaacgtcaatggatgttaagcaggaagtataacttcattacaccaggtgaaatgtattttaaatattatcaaagtaatacattaagagttgttgttttaattattggattattttttgctgttccatttttaggaataatcatgggttccactggtaacgttgttgaatttattagtggaggtgacattactagagactctgcaatgtgggccttaactgctgttgttcttttttacgttgtgtcgggtggctttaagccaatggtgagtgtcggagttctgcaatcatggttattttttgtgctttttcttacaattggtatcggcgcttttaactttcttggtggattagacttttttgaggatttatctattgcaaacagttttatttctttaggagcttggggaaaaacaaatggctatggcgggggtgatatgtctggatatttcaacgtccctggagtaattcaatggatagctggaataggtaaaaataacccctctggaggtccttggacttctgtgatgatcttgtcttttactctttcttatatgggtattgttctttcaccaacattttcaatgtggagctactctgtaaaatcaccaagatcattttatttttatcaggtatggggctctggggcagtagtgggtatatttttgtttatttttgtgcctttgttggcagttggtgctcacttacttggagctaacaatattattaatgctaatggatttgcaataaaacaaatctttcctgagctaagtttgcaaaacatatcaaatttagttttagtttttatagagagttttagttcaatatctccaatcattgttggatttttagcaatttgtataatcgctgctcttcagtcaacactttcagctttcataatgacatcaggaagtatggttgcaagagatttataccgaccttacatagactctaaaccaacatggaaaagagaattactagtagctagacttgctatgctacttattagtattgctgcattataccttgcaacatattttgaaacttcacttattctcttagggggtttagcaatagcatttggatttcaattatttcctgttcttcttggtatgttatggttcccttggataactaaaggaggggcaatacttggtttaattacaggattattgtttgtaactcttgcagaaacttttggacaaaaattaacaggtaattcactcccatggggaagatggcccttaacaatttactctggattatggggattatttttcaatgtaatcgtttgctttttatcatcaatattttcaagcaatgatcttgataaagatcatagaaaaagctttcatgatttcttaaaccaacatatgggcattcacccctctagaaaaaaaattaaatcattggcatatgtcttttttctaatttgggcttttttctccataggacctggtcttattttcggtaatttaatttttggaacatctgatcaaagttatgatcaatgggtgatgggcgtgccatcattatgggcttatcaaattatttggtgggctgcaggtgtctttatgatttggttcttggcaaataaaatggatttatcgacattgcctaaaaagccgattttgaatggagatgaatatctttcacctgatgatgttgaggaacaaggcaattacatagatagaatgggaggagggtatggttggccattgattttaattggtttagctgtggcaacagtaatactttcggtctacgcattatgat

SEQ ID NO: 272057 - DNA, 736 bp, Unknown
  Bacterial polypeptide expressing nucleotide sequence isolated from the Sargasso Sea
atggcatcaaatccaatgtaccaattcaatgtttatcggattggtccggaaataaagttaggcgcagttgacatttctttcactaatgcaagcttgtttatggtcattagttctttagctattttgataatttttaatcttggagcaaagaaaaaaactctaatacctgataaacttcaattactgtcagaattgagttattcctttgtagccaaaatgattagtgacacagcaggatcaaaagcaaaaccgtacttttcattaattttttcactttttatgtttgtgcttttttgtaacatgttcggaatgataccttacgcatttacagtgactagccatattatagttacatttgtgttggcagcatttattttcatcggagttacaataattgggttcatgaaacatgggttcggatatttaaaattgtttgtaccaagtggagttccaatggttttgcttccattaattgtggttattgaaattatttcgtatttaagtagaccgattagtttatctgtaagattgtttgccaatatgatggctggtcacacaatgatgaaggtatttggaggctttgttataagcttaggaattgtaggtggatggcttccacttagtttttcggttgcacttacgggtttggagatactagttgcttttcttcaagcgtatgtatttgcaattttaacatgcatttatttaaatgatgcattaaatctacaccattaat

SEQ ID NO: 272058 - DNA, 1405 bp, Unknown
  Bacterial polypeptide expressing nucleotide sequence isolated from the Sargasso Sea
aatgagaattatatctctattattacttttagtatcattttttacaaatggtcaattagaactcaataacctatttactgataatatggttcttcaaaggagctctaatgtcaatatatggggaaaatctagtccaaatcaagtcattaaagtttattctagttggaataaaacttcaacaaaaactaaagctgacaataatggagattggattctcaaaatcaatactagctcagatcaaagtccccaccaactaataatttcaactaaagacgaatcaaaagttataaataatgttcttttaggtgaagtgtggtttggatcaggtcagtcaaatatgcagatgactttcaacggatatgtaaatgaaccaattaatggttctcaagatgttattggaaaagccaacaatgataaaattcgattactaacagttgaaagaaagtttagtagtgaaaaactaagagattttaatggaaagtgggaattatctagtcccaaatctgtaagaaattttagtgcagctgcttattcttttgctacttatattaatgaaacattaaatgttcctgttggaattattgtgacttcttggggaggtacaccagccgaggcatgggctgaaaaaactcatctagataaaaattttaaaccaggagttttaaaaaataattttaaggacaggttcgaacacttcaatcttggatatctctttaacggaatgattaatccacttattccatatacaattaaaggtgcattatggtatcaaggagaaaacaacaggctaagggcaaataattactcaaagctaatgcaagttatggttgaaagttggcgtaatgagtgggggcaaggtgaatttcctttttactttgttcaaatagctccttttaggtatgatggcccagacaatcctagttctgcattattaagagattctcaattagatgcaatgtttaatattcctaactcaggaatggtatcaactgttgatataggtgctttaaattcaatacacccacctgaaaaaattaaagttggaaataggttagcatattgggcattaaataagacctatggttttgagtctataacaccatctggcccgatagtaaaatctgctaaaaaagagggctcagctgtaaaaattacgttcgattatgctcaaaatggcttttataattttaatggtccattaaaagattttgaattagcaggagatgatgaccaatattatactgcaactgcaaagatttctggaagatctataatagttgagtcagagaatgtcccagtcccaaccaaagttagatatgggtggaaaaattattttgaagctacactatttaatttagagggtttaccagcatcatccttttatattaaggaattgataaaatag

SEQ ID NO: 272059 - DNA, 671 bp, Unknown
  Bacterial polypeptide expressing nucleotide sequence isolated from the Sargasso Sea
aatgtaccaattcaatgtttatagaattggtccggaaattaaattaggctcagttgatatctctttcactaatgcaagtttattcatggtcattagttctttaactattttgataatttttaatctaggagctaaaaaaaaaactctaatacctgataaactacaattactatcagaactaagttattcctttgtcgccaaaatgattagtgatacagcaggatctaaagcaaaaccctacttttcatttattttttcattatttatgtttgtacttttttgtaacatgtttggaatgataccttacgcatttacagtcacaagccatatcatagttacatttgtgcttgcagcatttattttcattggtgtgacaattattggatttatgaaacatggattgggatatttaaaattgtttgtaccaagtggagttccaatggttctacttccattaattgtagttattgaaattatttcgtatttaagtagaccaattagtttatctgtaagattatttgctaatatgatggctggtcacacaatgatgaaagtgtttggaggctttgttataagcttaggaattgtaggtggatggcttccacttagtttttcggttgcacttacaggtttggagatactagttgctttttctcaagcatatgtatttg

SEQ ID NO: 272060 - DNA, 721 bp, Unknown
  Bacterial polypeptide expressing nucleotide sequence isolated from the Sargasso Sea
atgtaccaattcaatgtttatagaattggaccggaaataaaattaggctctgttgatatttctttcaccaacgcaagtttatttatggttataagctcattagctattttgataatttttaatttaggtgctaagaaaaaaactttaatacctgacaaattacaactgttgtcagaactcagttatacctttgtggccaaaatgataagtgatacagctggatcaaaagcaaaaccgtacttttcttttattttctcactatttatgtttgttctattttgtaacatgttcggaatgataccttatgcgtttacagtcacaagtcatattatagttacatttgtgttagcagcttttatctttattggagttacaattattggatttatgaaacatggtttaggatatttaaaattatttgttccaagtggagttccaatggtattgctaccgttaatagttgttattgagattatctcgtatttaagtcggccgattagcttatctgtaagactatttgcaaatatgatggctggtcatacgatgatgaaggtatttggcggttttgttattagcttaggaatcgttggtggatggcttccactaagtttttcggttgcacttacaggtttggagatattagttgcttttcttcaagcatatgtttttgcaattttaacatgcatttatttgaatgatgcattaaatttacaccattaat

SEQ ID NO: 272061 - DNA, 766 bp, Unknown
  Bacterial polypeptide expressing nucleotide sequence isolated from the Sargasso Sea
atggcaaatcttaaagaaattagagatcgaatagtttctgttaaaaatacacgaaaaataacagaagctatgagattagttgcagctgcaaaagttaggagggcacaagatcaagttcttaagagtaggccttttgcagataaacttgctcgggttttagaaaacattcaatctagagttcagtttgaagctgtagattctcctcttctatcaaaaagagatgtaagaagaatttctttagtatgcataactgctgatagaggattatgtggaggatacaataccaacataatcaagaaggtagaaatcaggtatgctgagctgattaaacaaggttatgaaccaaatttgatcttagttggtaaaaaggcgataggttatttccaaaataggaaagacaaatacacaattaaaagcacatttaaagagctggaacaggtgccaactgcaacagattctgaggggataactagtgaagtcttagctgaatttctttcagaaaattctgatagggtagaaattatatatacgaaattcatcactctagttagctgcgcccctgtcgttcaaacactactgcctcttgatcctcaaggtattgcagatgaaaatgatgaaatttttaggttaacaactaaagatagtaagttacttgttgaaaaatcaaatattgaaaaaagtgattcagagaagttaccatctgatattgtttttgaacaaagtcctgatcaactactagattcgttattaccatgtattacagaat

SEQ ID NO: 272062 - DNA, 292 bp, Unknown
  Bacterial polypeptide expressing nucleotide sequence isolated from the Sargasso Sea
aatgagtgatactggcgtaataaaacaaataataggtgctgttatcgacgttgagttcgataaagcccaaattccgaacatctatgatgccttggttgttagtgaaaacaatcttgttcttgaaacacaacaacaattaggtgatggagttgttagaactgttgccatgggaaccactgaagggttaaaaagagggctagacgttgaaaataccaaagcaccaataagcgttcctgttggcgaggcaactctaggaagaataatgaatgtattgggcgatccaattgatatg

SEQ ID NO: 272063 - DNA, 1246 bp, Unknown
  Bacterial polypeptide expressing nucleotide sequence isolated from the Sargasso Sea
aatgagctcagatcaattacaaggatataaaaaaacattaaattctccctatactggtataaagggttggattgactctaggctcccactgataagaatgatggaagctgaatatcttaaatttccagtaccaaaatcattaaattatttttggtcttttggaggtattgctatgttttgtttaataggtttaattttaactggtatatttttaggatttcattataagccgtcagctgaagacgcttttgactctgtagaaaggatcatgagagatgtcagttttggatggttaataagataccttcatgccaacttagtttcatttttctttatagctacttttattcatatctttagagccttatattttgggtcatacaaagcccctcgtgagttggtatatatttttggtttgacgatgttcatgttaatgatggcaactgcttttttaggatacacacttccatggggtcagatgtcatactggggagctactgttataacaaatcttttttcagctatccctgttgtgggtgatgcaatattacagctacttcttggtgattttaccgttggggactcagctgttaaccgattttatgtgctgcactggttgttagcatttgcgattgtaggtttagttgtatttcatgttattacactccacatgacaggttcaaataatccaactggttcagaacctcaaagttgggatgaaacagttagctttcatccttacgtaacaataaaagatttaaatgctgctctattttttttcatcattatggctttcattttattttattatccaaatatattaggacattctgataattatattaaagcgaatcccatgataactcctgcacatattgtgcctgaatggtatttcttacccttttacgctattctgagagctattcctgataagctaggcggggtaatagcgatgtttagttctattcttgcactgggattgcttccttggcttgatacatcaaaagttagatcatgtttgtttagacctatttggagatattgtgttcttttatttgctgtaaactttttggtcttaatgtatgtcggaggtaaacctgctgaagatatttatgtgcttatctccaggattggaaccgcatattggtttttatttatttttgtattggctccacttgttggatttcttgaaacccctagacaaccacttactattacaaattacttgcaaagcaaaaaagcttaa

SEQ ID NO: 272064 - DNA, 607 bp, Unknown
  Bacterial polypeptide expressing nucleotide sequence isolated from the Sargasso Sea
tatggcaacaaatccaatgcaccaattcgaagtatatagaattggcccagaaattaaattaggagaaattgatatatctttcactaatgctagtttgtttatgctaattagttcaattgctattttatttgtttttaatcttggaacaaaaaaaaattcagtacttcctagtaaaattcaacttctggcagaactcagctatacatttgtttcaaaaatgataagtgatacagctggatcaaaagcaaaaccatattttgcatttatcttttcactttttatgtttgtgctgttttgcaatatgtttggaatgattccttacacatttacagttactagtcacattattgtaacttttatcttggcaatttttatttttattggagttacaattattggttttattaaacatggatttggctacttgaaattatttgttcctagcggagtgccagttttattattgccgctaattgttgttatcgaaattatatcttatttaagtagaccaattagcttatctgttcgtttatttgcaaacatgatggctggtcatactatgatgaaagttttcggaggctttgttataagtctcggaatagttggt

SEQ ID NO: 272065 - DNA, 596 bp, Unknown
  Bacterial polypeptide expressing nucleotide sequence isolated from the Sargasso Sea
ttcttctatagttaaagcagtaaaaaataaggttaaagaccttaaagagaaaaatttagattttaaaattatctgtcttggaaaaaaaggagctgatatattaatgggtttatttggagataatcttataagctccgaaaatataaatgataaaaattcttatacattatccgaagacatatcagcgttattagttaaaaaacttgataataaagaatttggaacttgttctgtaatatataatcaatttaaatcggctatttctcaaatagttactgagcagtcacttattccatgtactatagactctgaagaagatgaaaatagccaagatgaagaaataaattttgagtttgaaccggatgaaaaaggaattttatctgaattgctacctaaaaatttgtctattcaaatttataaagcaattttagagagtggagcaggtgagcaaggtgcaagaatggcagctatggacaacgcaactagaaatgcaggtgaaatgattgataaacttaatttatcatataataggcaaagacaagctattataacaggtgaattaattgaaattatttctggagcagaggctttataaa

SEQ ID NO: 272066 - DNA, 651 bp, Unknown
  Bacterial polypeptide expressing nucleotide sequence isolated from the Sargasso Sea
tttctaaccctataactgtaaaagatctgtcggtccgtttatcaaaacgattaaaaaaatatgataaaaaaggtgaagagcattacaatttaatttcggcactacataaatctatccgcggttcagatcctgatgcagcattgtactggcttgccaggatacttgatggcggtgaagaccccagatttattgcccgcaggcttttgcgaatggctttagaagacgttggattggctgatccgcaagcccagtctatctgtctgcatgcttggcaaagttttgaaaggctgggaagtccagaaggagagcttgccttggcccaggcagcactctacttggcactggctccaaaatctaatgcttcctataaaggctttaatttgagcttggatttggtaaaaaagacaggctcagaaccgccaccaaagcatattttgaatgcgccaactgatttaatgaaggaccagggatatggcgcgggttatgagtatgaccatgatagtgcagatggtttttctgggcagaattattttcctgagaaaattgatcgattatctgcatatcagcccgttgagcgaggttttgaacgcgaacttaaaaaaagaattagttactttaaaaatttgcgtgaaaaaagaaaatcaatttaat

SEQ ID NO: 272067 - DNA, 165 bp, Unknown
  Bacterial polypeptide expressing nucleotide sequence isolated from the Sargasso Sea
tagctgaagtatttacagggtcacctggtaagtacgtaagccttgcagaatcaatccagggattcaagatgatcttaggtggggaattagatgacctcccagagcaatcattctaccttgtaggtaacattgatgaagcagtagagaaggcttcaaaattataag

SEQ ID NO: 272068 - DNA, 421 bp, Unknown
  Bacterial polypeptide expressing nucleotide sequence isolated from the Sargasso Sea
aatggcaacaataaaaattgatattgtttcagcagaaggagagatccattctggtaatgcaagcatgatatatgctcctgctcagatgggtgaagttggtatcgcacctagacatgctccgctattaacttcgctaaaacctggtgaagtaagggttgaagatgaggaaggaaaagagcattttttttatatcacgggcggcatgcttgaagttcagcctcatatagtaactgttctcgctgatacagcagtcagaggggatgagctcgatgaagcggccgctgagagcgcgaaaaaacaagcagaagaagcattagagggggcctctgatgaaacagacataaaaagagctcaagctgaactcgctgaagcaaatgcaagatatcgtgctgcacaaaaactcaaaggcattaaacagtaa

SEQ ID NO: 272069 - DNA, 736 bp, Unknown
  Bacterial polypeptide expressing nucleotide sequence isolated from the Sargasso Sea
tatggcagcaaaccctatgtctcaattcgatgtttatcgaattggacctgaaataaaagttggagcgtttgatatatcatttacaaacgccagtttattcatgattattagtacagtttcgattttactagtgtttaacttgggctcaaaaagaaattcagtattaccaaataaaatgcaattacttgcggaacttagttatacgtttgttgcaaaaatgataagcgatacagcaggatctaaagcaaaaccttactttgcctttatattttcgttattcatgtttgttttattttgcaacatgtttggtatgatcccttatacatttactgtaactagtcatatcatcgttacatttattttagcagcatttatttttattggagtgactgtcattggctttattaagcacggatttggttacctaaaattatttgtccctagtggggtaccagctgtactacttcccctaatagtagtaatagaaattatatcttacttaagtagaccaattagtttatcagttcgattatttgcgaacatgatggctggtcacacaatgatgaaagttttcgggggctttgtgataagtctcggattagttggtggatggcttccactgagtttttcggttgcattaacaggtttagagatcttagttgcttttcttcaagcttatgtttttgcaatcttaacctgcatctatttaaatgatgcattaaatttacaccattaa

SEQ ID NO: 272070 - DNA, 721 bp, Unknown
  Bacterial polypeptide expressing nucleotide sequence isolated from the Sargasso Sea
tatgtcccaattcgacgtttatagaattggaccagaaattaaagttggagcgttcgacatatcgtttacgaacgcaagtttgtttatgattttaagcactgtgtctattttgtttatctttaatttaggatcaaaaaaaaattcaatactaccaaataaaattcaattattagcagaactcagctatacctttgtatctaaaatgattagcgatacagctggatcaaaagctaaaccatatttcgcgtttatattttctctatttatgtttgttttgttttgcaacatgttaggaatgataccttatactttcactgtaaccagtcatatcattgtaacatttgtgttagcggcgtttatatttattggagttacagtaattgggtttattaaacacggatttgggtatttaaaattatttgttccaagtggagtacctgtagtattgctccctttgatagttataatagaaattatctcttatttgagtagaccaataagtttatcagttagattatttgctaacatgatggctggtcatacaatgatgaaagttttcgggagctttgtaattagccttggaatagttggtgggtggcttccactaagtttttcggttgcgttaacaggtttggagatattagttgcttttcttcaagcttatgtttttgcaatcttaacctgcatctacttaaatgatgcattaaatttacaccattaa

SEQ ID NO: 272071 - DNA, 530 bp, Unknown
  Bacterial polypeptide expressing nucleotide sequence isolated from the Sargasso Sea
tgttgctaaaatgattagtgatacagctggttctaaagcaaaaccatattttgcatttattttttcattgtttatgtttgttttgttttgcaacatgtttggaatgataccgtacacattcactgtaactagtcatattatcgttacatttgttcttgctgcatttatctttattggcgtaacagtaattggatttattaaacatggttttggttatttaaaattatttgtaccaagtggagtgccagcggtattacttcctttaatagtagtaattgaaattatttcttatttaagtagaccaataagtctatcagttagattatttgcaaatatgatggctggtcatacaatgatgaaagttttcggaggctttgtaattagtcttggaatagttggtggatggcttccactgagtttttcggttgcattaactggtttggagatattagttgcttttcttcaagcatatgtttttgcaattttaacctgcatctatttaaatgatgcattaaatttacaccattaat

SEQ ID NO: 272072 - DNA, 722 bp, Unknown
  Bacterial polypeptide expressing nucleotide sequence isolated from the Sargasso Sea
aatggcaacaaatccgatggaacaatttaaagttcataaaattggaccagaaattgaagtttcaggaataaatctatctttcacgaatgcgagtctttttatggttattagtgcaggattaattttggtattactgctttttggaactaggcaaaaaaagttagttccgggtaaaatgcaattaatatcggaaatgctttataattttatttcaaaaatgataagtgatacagctggaaaaaaagctaaacctttttttccatttatatttagtttgtttgttttcatacttttttgcaatatggtaggaatgttgccgtactctttcactgtaactagtcatattatagtgactttgacttttgctttattcatatttgttggtgttactatactaggatttgtaatgcatggatttaaatatctaaaaatttttattcctagtggggtaccaatagttttgctgccaataataagtattatagaaataatttcttacctcagtaggcctattagcctatcggttagactttttgcgaacatgatggctggacacacaatgttaaaagttttcggaggatttgtaattagtcttggtttgattggcggttggttacctttaagtttttctgtagctttaactggtttagaaattttagttgcttttttacaagcttacgtatttgcaattttaacatgcatttatttaaatgatgcattga

SEQ ID NO: 272073 - DNA, 676 bp, Unknown
  Bacterial polypeptide expressing nucleotide sequence isolated from the Sargasso Sea
atggcagcaaaaggcgaaaaacatagtcccctagaacagtttgaaataattccatttactagaactgaaattggtggatatgatatttcgtttacaaactcttccttatcaatgattataactgttgcagtaataacactttttttaacactgactgttaatccgcgatcactagtgccaacaagaatgcagttaatatctgagctgatgtataattttgttgcacagttattaagtgatactgttggtgataatgggaaaaaatacttcccatttgttttttctcttttcatgtttgttttaattggaaacatggttgggatgatcccatatcaatttacttttactagtcatatcattgtaacttttgctttagcatcagttgtattcataggggtaacaattttaggatttgttaatcatggaataaaattcttcacttttttctatatacctggggttccattttatatgcaccctttactaattccgattgaggtaatttcttatttatctcgtcccatcagtttgtctgtaagactttttgctaatatgttagcaggtcatacattactcaaagtctttgctggttttgttgtagcaatgccatttttcacaggagtacttcctcttgtttttattgttgcattaactggtttagaaatattaatcgcat

SEQ ID NO: 272074 - DNA, 430 bp, Unknown
  Bacterial polypeptide expressing nucleotide sequence isolated from the Sargasso Sea
gatggcagccatgacagtacagcttgatatagtaagtgcagagagcagcatcttctcaggtcgcgtagctagcctacaagtgaccggttctgaaggtgagttgggcatcatgcatggccacgctccactgttaagctatatcaaacctggcatggcgcgcatcgtcaaacaagacggcagcgaagaagtgttttacctttctggtggtttactggaagtacaaccttcttctgtttctgtgttagctgatgtggttatgcgtgccaaagatattgatgagcaggcagcattagaagccaagcgtcgtgcagaagcccatatggcaactgcgggtgcggactttaattatgacgccgctatggttgagttagcgaaagcaatggctcaattacgtgttgttgaaaccatcaagaaaaacattgccagataa

SEQ ID NO: 272075 - DNA, 277 bp, Unknown
  Bacterial polypeptide expressing nucleotide sequence isolated from the Sargasso Sea
aatgtcaataaaagcatcggagatctcttctatcatcagagatcagattaataactttgaaagccaagcagatatttcagaagtaggaactgtcctaaaagttggtgacggagttgctcaagtttatggtttggacaatgtccaagcaggtgaaatggtagaatttactggtggtgtccaaggaatggcacttaaccttgaagaggacaatgttggtattgttatttttggtgatgatagaggtattaaagaaggcgatacagtaaaaagaacacaa

SEQ ID NO: 272076 - DNA, 551 bp, Unknown
  Bacterial polypeptide expressing nucleotide sequence isolated from the Sargasso Sea
tgcagaactcagctataccttcgtgtcaaaaatgattagtgataccgctggtagtaaggctaagccgtatttctcgtttatcttttctctgtttatgtttgttttattttgcaatatgtttggaatgataccgtatgcattcacagtcactagtcatataattgtaacctttgttttagccgcatttatttttataggagttacagttattggtttcataaaacatggatttggttatttaaaattatttgtacctagcggtgtcccagtagttcttttacctttaatagtggtaattgaagttatttcatatttaagcaggcctgtgagtttatcagtaagattatttgcaaatatgatggcggggcacacaatgatgaaagtattcggaggctttgttataagccttggagtagtcggtggttggttaccattaggcttttcagtagctttaactggcttggaaattttagtagcatttctccaagcatatgtttttgcaatattaacctgcatctacttaaatgatgcattaaatttacaccattaac

SEQ ID NO: 272077 - DNA, 1075 bp, Unknown
  Bacterial polypeptide expressing nucleotide sequence isolated from the Sargasso Sea
aactaatatacataagcatgtcataaattcaattaactttccaattttaataattgataagaataagaccttattaatggtaaatccagctactgaagatttttttaaattaagctctaaagttttaataaagaaatcaattgaggaaattcttcctttttcgtccccagttttatctctgatagatagctctattaagaaagaatcgacatttaaagaatatagagttgatttatcaactcccatttccggatctcataaagatgtagatgttgaggtaaccccattaatagggctagaaaattattatcaaattattttagtagaggattttcatgaaaagaaattagtgcttcaaaatgaaaatcaaaaaaataaaatagcgatgtcaaatatgtctcaaattcttgcgcatgaggttaaaaatcctctctccggcattagaggggctgcgcaaatcttagaaaaaaatgttgaaagtaatgaaactattatgactgatcttataataactgaagtagatagaattagaagacttgttgataatcttcaaatttttgacgcatctactcctattgatctgagaccaattaatatacattcaattctacgtcatgttaaagatgttatgataaattcaagtaataaggaaattaaaataaaagaagtatttgatccttcaattccagatgttattggcaatgaagatcaattaattcaagtatttattaatcttattaaaaattcaattgaagcattcagtaatgagccagattccgataatgagattatattatcaactaattatgagcacggatatattgttaaagaaaaatcaagcgaagaaagagtaaaattgccaattaagatttctgtgatggataatggacctggtatatcagattcaatatcacaggaaatttttcaaccatttgttagtacaaaaaaagttggtcaaggtggacttgggctatcaatagtttccaaaattattagtgatcacaatggatcaattgagcttgacttaactgatcaaggaacaaaatttattattagattaatgtcggagttttaa

SEQ ID NO: 272078 - DNA, 864 bp, Unknown
  Bacterial polypeptide expressing nucleotide sequence isolated from the Sargasso Sea
tggggcagggccagcggatggggctgttcgccggctccggcgtcggcaaatccgtgctgctcggcatgatgacccgcggctcggtggccgacgtggtggtggtggggctcatcggcgaacggggccgcgaggtgaaggagttcatcgaggagatcctgggggaggaggggcgtgcccgctccgtggtggtggcggcgccggccgatgcctcgccgctgatgcggctcaaggggtgcgagacggcgctggccatcgccgagtatttccgcgatcaggggctcaacgtgctgctgctgatggactcgctcacccgttacgcccaggcccagcgcgagatcgccctggcggtgggcgagccgccggccaccaagggctatccgccctcggtgttcgccaaattgccggcactggtggagcgggccggcaacggcagcgacggccagggctcgataacggctttcttcaccgtattgacggaaggggacgatctgcaggatcccatcgccgatgcagcgcgggccatcctcgacggccacatcgtgctgtcgcgggagctggccgatgcgggccactacccggccatcgacatcgagaagtccatcagccgggtgatgcccatggtgacctcgccggaacacatggagctggcgcgcaccctcaagcagttctactccctctaccagcagaaccgtgacctcatcaccatcggtgcctacagccagggctccgacccccgcatcgaccgcgccatcatccagaaaccctatctggatcagttcttgcagcagggcatgcgcgaggtcattcactacgatgcgggcctgcaggccctgcagctggtggccatgccgctgatgcgttgac

SEQ ID NO: 272079 - DNA, 871 bp, Unknown
  Bacterial polypeptide expressing nucleotide sequence isolated from the Sargasso Sea
ccatctttcgaacttaactcatctattttatctcgggttcaggtattggttttagaaaggttaactaacaccaatttagaaagtctttttgatcgtgcggaaagtttattaggtttacaaattaatttagatttaaatgcgaaaacagagttattcaaacaagcagatggtgatggtcgaactttactgaatctaattgaaagtattatctcatgggaagtttctgacccattaactgtagaagatttatcggttcgattatcaaaaagattaaaaaaatatgataaaacgggtgaagaacattataacttaatttcggcactacataaatctatccgcggttcagatcctgatgcagcattatattggctcgctagaattttagatggcggtgaagatccgagatttatcgcaagaaggcttttgcggatggctttggaagatgttggtttggctgacccacaagctcaatctatctgtttgcaggcttgggagagtttcgaaaggctgggaagtccagaaggagagcttgcattagctcaggcggcactctacttggcattggctccaaaatctaatgcctcttataaaggttttgccaatagtttagaaatggttgaaaaaacgggttcagaacctccaccaaagcatatcttaaatgcgccaacagagttaatgagggatcaaggctatggtgcaagttacgaatatgatcatgacagtgaagatggtttttctggtcagaattattttcctgaaaatattgaccgatttactgcttatcaacctgttgaaagaggttttgagcgcgaactcaaaaaaagaattagctacttcaataatttgcgagaaaaaagaaagtcagtttgag

SEQ ID NO: 272080 - DNA, 4765 bp, Unknown
  Bacterial polypeptide expressing nucleotide sequence isolated from the Sargasso Sea
aatgaaatgggtttttatcagtgcgatcagtataaatatttcactcgcgaatatcattcacgaaacgggtgaattatctgaatttttaggaggtaactcaccagggtcagcatatgataattgggtaagtcacgttacagagggcatagcaagtgagggttttaatgattatggaccagactggctcgatgtgcaaacaacaggctttgggaattataataaactagaatctggtgacccaattcttagttattgggaagatattttttctggttttatcctgggtgatacaacactggttgactctttactccaggattctgttgagtctttttattatgaattggttatttttgaggacacagtttacaatcaagtttttcatattatcagagagcaactagatacgagcttcattgatataaatcaatcggataatgatctggatgatgtagtaggcagttttcgaaatggatggggaatgtatattattaatcctcaagcaacgcgagaacaagtgatcgtccaagtccctcacccctgtgatgattttattgctccatatattgctatggatatatttctagaaaccaatgcctttgcattcatgataaatggtgcaggtagagaggtattgtggactgaagttggtaattattcaaatagcaagtcattgtcagatccttctcgctatcccaacacaatttttcaaaaatttcaagaagtagccgtgcatccattggtaggcattgatccacactggccccttgtttttgcaatacatagttttgataatgaatctcatgcacctcgtaaatcagttattgttgcagctggatcacaaaattcatttactacaaaacctattcgggatattactgaggatcattttgacataataaatttcacatcagagtacccaattaacgaaggccagtttggtaattccaattccttacatgttacagaatattatgaagtattctatgatgatcaatgcgtatatgataatggagagactgagtttcccattacattagccacagaattgaaaggaccctcaaatggagtacaaatgctcgacctccaaggattgaccagtagttattctgtttatgaaccatggatacatatagaattagatgagaaacctatgcttttcgatagtagcggtatttcaaatgattccgcatatcataatggctcataccccactggactaaataatttttctttgatcagagaatattatcaaccatttatagaagcattagattcgtatttgatacactgggaaacagtgagtgaccaagaccctccagattcaattgagtttatttccgcttacaacgtggataattctgaccaggtttatcttaattggataccggtctatgataccaattttaaaacatttcaaataaggacagatacggatactcttttcaatgaaccggtaatttttgatcttgaggaccatgaaattctacaatacatgcgaagagatcatcagacactaacagggctggagaacacagaatcatggtggtttcagattcgtgggttggaccattttaataatgctgggccctggtctgaagctgtatctaatattttaccaggccatgatcatcctgacaccttgttgtattttactagtaataatgattttgagagtattatcaatgaagatattgatgtagatgattatgcaatagactccttaaatacatttccaggtagtagcccaactctcgtcatttttggcaatagctggaaatcaatacagatcgagcccttcaccccagacacaggaactatattacaggtttttgctatggtggatagtatttctgacattcaggccattggcttttcaaatggtgaaaattcgattcgctactctttctcaggacatgagaccctagacatagaagaatggatccctgtatatcagggtgttggacaggtcggagcatggcactcttatagactccctattggagatgattggcttgcatggtacgattcgctttccatactaaatgagatccatttcattaatgaccatgatgatacaagtagtgctcctggcagtgtccattttagtatggtcagagatattacaccagacctgccaattagcccatcggtctccattggatatgagttaggagacatcagagatgaaactgatcatcaaatgatcacagtatcattttattcaacagtacaagatactgactcatatgcattctcttatgattgggagtttggcgatggcggatcatcaagtgaagctgatccaacacatgattatattattgaggatgaccatgattatacagttattttgaccgttgaggatgaaacaggccaacggggatgggcaactacagcgatagaggtcgatcaggggaacacatctttccctataaaatttaattttgtaggtgatatcatgatgggaagaagatttgaagaagatgatggaattataacgacgcaaggtgttaacgctctttttgaaccaactcaggaattgcttggattatctgctgatataaccgttgctaatcttgaaatacctctttcagatcaaggatatccccacccatcaaaaagcataattttccgttctgctcctgaaaatgtaagtggtttgatctatgcagggatcgatgttgttactctagcaaataatcacatactcgattatatggagcctgcaatgatccaaacacaaaatatcttaagtgaggcagggatcatttattcaggagcaggaatgaatagctatgaggcatatctacctgcattcaaatcagtaaaaggacaaaccattgctttcattgcttccagcgatcgaacagggcaatataataactatcaaccttacctgaatgcaggagaaaataaatcaggattcgcctacatgactccatattatttaaaacagcagatccaatcagcagaggatcttgcagatttgatcgtagttgaaatgcatgcaggaagtgagtattcatatgaaccaggtttggattatgactcatatacaccgctagaaggatttactaatcttagaacgaaccctgcaagcgaaattgggttccagatgataccaaaggatggtatggaggctgaagattattcatggaggcttgaccgccctcaaatgtgggatcgagcaataagacattttgcgatagatgaaggtgctgatattgttattgttcaccaccctcatatcattcaaggagtagaattatatgatgggaaacttattgctcattctttaggtaattttatttttgatctgaattatcctgagacctatccttcaatgatcttaaatggagaagcagatgaatctggtttcatagctttttcaatagatccagtttatattgatgattatctcaccctgcctgctaaaggggagttaggcaattatatcttagactatatctctatgcgttcgaaagaactcaacacatatgtacatgtggatacagataaccaacgtgcatatgttattgtggatagtttatcaatgcctcatgatatcattgatcaaagtgtttggatagaaaattacaagcccgttgatttaaatggagaggattattttcaatccgagccaatcccactggcaaaggcagggagtatttcaaagatattggaaggggatccgacaataacatactatcgactcggaagagaaaaaatatggatgaaaaattttgaggatgagggaagctctttatggaatttgaacagcaataatgaaactctccaagattccatttttagaagaggtggcacagcattatctcacatccgctcaccaaattctcctgataatattgtaacaaatcttgaagaacgcataccttttaaaaacgaatattcacatacagttcatggctttattaaaacagaaaatggaaaagaagtttctattgaggtgcgttgcgcaagtggtagaactggtgaaagtttatttacatcatctatgggtgattcgatctcaggttcttttgattgggcaagatactggggagatatacctagtgatgaagaagcaaattattttgaccttaggttaaatagtggggttccagattcagggctagcgctttcgtggtttgatgatgtggggctagttgaatgggatagtctcaaaacattatcaggatatcccatattaattcctcaccctaatgactacgactatattcaattattctttaatgaactaccatcggaattaattgggctgcaaatacagcatacaacgattggagctttttcaccattgaatgcctatccaaaagttgtgaaaccagtaataactgtgcctggtaatttccatttttatgatgaatcaacagggccgatcggtgacagaatttggacaaatgatggcgagttgatcggctatggacaaacaccaaaactattctgtgaagagccgggtatatatgaggtatcactaacattgtatggcacaaatggatcagagcatacatcttcaatttctgtaattggtatagaacctggaacagaacaatatgaaataggtgatgtcaatggtgatggatctattaccgtgatcgatgcacttttatgttctaattatatacttggcctttttgaacttcagcctcaagagtttttagcggcagatgctgatggtaataatataattaatatacttgatgtattattggtatcagacctttctggtcaagatatctaa

SEQ ID NO: 272081 - DNA, 298 bp, Unknown
  Bacterial polypeptide expressing nucleotide sequence isolated from the Sargasso Sea
actgatctacctaattacaggtatttacttaagcctgaataccggaatatcacatgatgaatatcatgaacaattaaattgggaaattaatcttaaggcaataaaaaatttttttgaaactggttattataatgaattactagaatacaaggacagataccatggtattggttttaattttttaagccaaccttttcaatacttaatcaaagactttgtattggattacctagatgtaaatgaatatggatctattttaatatcaaaacatcctataatatttattttgttttttata

SEQ ID NO: 272082 - DNA, 1483 bp, Unknown
  Bacterial polypeptide expressing nucleotide sequence isolated from the Sargasso Sea
agtgatttaatagtaacaaaatcagaatcaactggatctggtattggaactacatctttaaatgatggattaacttatagtcaatactatgggacaagagttcaagatgaagaaatttcattaaatgtcccagaagtatctcgtatactagcaatttttgaatcaaatgatacaaataatccagatttaccaactttaattgcaactgatgcaacagcgtcatttactggaaacgtagtagttggagagcaatttattggtaatacatcaggtgctgtagctcgtgttgtttctgtagcatcaccaacttcaatttcatttgtttatgaaaatcaaaatactttcgaagtagatgaaaatatatcacttaaaacatcaggaatatttgcaacactgactagtgttctacctggtgatcgaaacttaattaataactatactttagatgatggacaaagattagaattcgcagatttttctagaattataagaaaatcagatgcggaaaaaccaactcgtaaattaagaattatttttgattatttacttaataatgaaagtgcaggaactgtcgaaacagttaatagttataatacattaagttatagtagagatataccatttgtttttgatagatttgcttccgattttattgactttagacctagagtaacaccatttaccgcaaatgataaatcaccattttcttttggatctagatctttttcttcaacacaatctgagattgtagcatccaataaaactgttgtggttgattattcttactatcagggcagagcagacagattatatctatcgaaagatggtttctttacagtaaaacaaggaactccatcaagactccctaagttacctttaccaaatgaggaagcctttgaagttgcttcaatcatatacccaccttatgttcgtagtgcaaatcaagaggtcaaagtaaagaaagttcgacataagagatacacaatgaaagatattggtagtcttgaacatagaattaaaaatttagaaaattacacaacattatctttattagaaactgatactaaaaatttatctattaaggatccaaatactggattagataaatttaaatctggtttctttgtagataattttacaagtcatctaacacataacctaacaggtgaatctaaatttgatattgatcttataagaggtgagtgtagacctagatcaacagagagaaatgtccccttaatacatgaaacaaaaagtacacttgcagatccaataaactctgactataattgggtcgaagattttgttgatggaaacatcacaagaaatggccctgctttattgcttgattatacagaagtagagtttttatcacaaccatttgcaacaagaacagaaaatcttaacccctttcatatagcactatttgctggaacaatacaattaaatccagaatcagatttttgggttgaggaagttcctc

SEQ ID NO: 272083 - DNA, 1804 bp, Unknown
  Bacterial polypeptide expressing nucleotide sequence isolated from the Sargasso Sea
atgagtctaagaataatcatttttctttcattttttttagttggatgcggtggttcaagctcaaatgatgaaaatagctctgatgaagcattattaacaataaatgtcactaattttccatccaatgtaaaaagctataagccagtaaatataagtgttacgtctaactatgattgctcatttattcttgaaagtgaagacatttattggatttcaaccaatgacaataaaaatttctcttacagagcacctattaccttattacatgaagcagaatttgatgtgcagatcagttcaattcagaatgcatattgtcctcaagggtcaataagtttgacccatacagtaacaagagatgaagacaatctaaggcatattcccacaccatctccctacaataattcagctctaaaaacagagtattttgcttcacataatttaggttttggtggaattgaagttactgatagatttacagcaactatatgttatccaacacccaatgattgtgaaactttagaaaatgctttatttggccaagatgcccataatatggcaactggagactttaatggggatggttttgaagatattgttgtggcctgggcactctttcctcacactatagaactcgagcaaaaagttcatgcacctgtgcacatttatttgaatgatggcaatggcaatttgtatgaagataattcaatctattattcgaacgaagcacctacgcatccagccccatataggcttgctattgctgattttaatggtgatggtattgatgacatatttgttggctcaatggggttacagtatcgtgatccagactccgctaatgactttattctgccctaccctgatctactattattaagcgactcatccggcagatttagcgatgcttcagcaaatattgatgatcaaaataatggcaatggcaaaatttgtggatttagtcatgatgctagcactggagactttgataatgatggggattacgatattttcgcatgcaatttattgttagttaatgatagtttaggtaattttgtgattcaccaagacctcgattttaatctacaacaagcctatggaaatcctatgagtagtttgattgtcgatttaaataacgatgattatgatgatcttgtcttctggaactttgataatcgtcccaatagcatatctgaagagggttttgcgctcgtcagcgatgggacagctaatgtagataactggactttagttgaattaccagaaggtccttttggtagaaatcacaataagtttaaccatgctgcatggggcgatttaaataacgatggcaataacgatgtagttgttggtattaccagagatttgccttattacgagggtgcttatgtgcaggtcttaatgggagatggaaacggcaatcttgtcgatgtgacagaaactaattttaatgctcagccacgtcaagcaacacaccatggtgaaagcaatatctacttgagagattttgataatgatggcgatctagatatttttcactctactagagattttgcatctaatttgcatggttcacacatagccttaaacgatggaaatgccagctttttaacgatttcagagactagattaccgcaaaaaccgaaagcaaacgaatgggacaataattcctacttatttaagggcatgccaataaatctagataatcaaggctgtttagatcttatttcaacttctgatagttggatggatagcagtgcaactagaaattatctgtattcgttaattaatttaaaatgcgactaga

SEQ ID NO: 272084 - DNA, 229 bp, Unknown
  Bacterial polypeptide expressing nucleotide sequence isolated from the Sargasso Sea
gatgagattttgagtaatttattaccaaaaaatatttcaacacaaatatttaaggcaatgttagagaattcagccagcgaacaaggatcaaggatgagcgcaatggataacgcaacccgaaacgcaggtgaaatggttgacaaacttactatccaatataatagaagtcgtcaggcagcaattacaaaagaactaatagaaatcatatcaggagcagaaagtttataat

SEQ ID NO: 272085 - DNA, 553 bp, Unknown
  Bacterial polypeptide expressing nucleotide sequence isolated from the Sargasso Sea
atgtaccaattcaatgtttatagaattggtcctgaaataaaattaggagaaatagatatttcatttaccaatgcaagtttgtttatggttataagctgcttgacaattttaataatatttaatttaggttcaaaaaagaaaaaaatagttccagataaattacaactgctagctgagctaagttattcatttgtggcaaagatgataagtgacactgctggaacaaaggcaaagccatatttttcttttattttttctttattcatgtttgtgcttttctgcaacatgttaggaatgataccttactctttcactgtaacaagccatattatagttacatttgttttggctgcatttatatttattggagttaccataataggctttatgaaacatggattaggctatctaaaactatttgttcctagtggagttccaatgatattgttgccattaatagtggttattgaaattatttcttatttaagtagaccgattagtttatctgttcgtttatttgcaaatatgatggcaggtcatacaatgatgaaag

SEQ ID NO: 272086 - DNA, 646 bp, Unknown
  Bacterial polypeptide expressing nucleotide sequence isolated from the Sargasso Sea
gtcaaaaaaactggctatattgttgtcagttctgacagagggctttgtggcgggctcaatgtaaacatgttcagaggactaattgccaacctcaaagaaaataaaaacaaccaaattgattcaaaactttgccttgttggagcaaaggctgttcagttttttaggtcagtggatgtggatgtcatagcagcagcatcacatcttggcgaagagccacaagttgaagacttggttggggcaatcaaaaccatgttggatgaatacaatgaaggaaaaatcgatcagctttttatcgtccacaatgattttgtaaacacaatgactcaaaaaccagagatcaaaacactgctgccaatagacccagaagatggcgaacaaatgcaagaacattgggattatatttatgagccagactcgaaagagcttttggattatattttgatgaggtacatcgagtcacaagtctaccgagcagtggttgaaaatgtagcatgtgagatggcagcaaaaatggttgccatgaaaagtgcaacagacaacgcaggaaaattaatagaccagcttgagcttgattataacaaagcaagacaggcagcaatcacacaagaaatttcagaaatagttggcggcgcagctgcagtttaaa

SEQ ID NO: 272087 - DNA, 253 bp, Unknown
  Bacterial polypeptide expressing nucleotide sequence isolated from the Sargasso Sea
atgagcacaggaaatatcgtacaagtaatcggagcggtagtggatgttgagtttccaaaagaagcaataccaagcgtatatgacgcactcactctaaaggatggagacttagtatttgaggttcaacaacaacttggtgatggcatagtcagaaccattgcaatgggtgcgagcgagggcctaaagagaggacttgaggttgaaaatacaggcgctcctatcagtgtcccagtaggacaggaaaccctcggac

SEQ ID NO: 272088 - DNA, 396 bp, Unknown
  Bacterial polypeptide expressing nucleotide sequence isolated from the Sargasso Sea
atctttttactaaagaagaatttgataaatgctttattttctataacaaatttaaaaatgtaattacacaaattcctcaatatcaacaaattatacctgcagctataaataaaaaagaagaaactaaagataataatttaatcagatatgaatttgagccagaagaagatgaaattttagaggaattattaccaaaaaatatctcaattcaaatttataaagcttttttagaaaatgcagcgagcgaacaaggctcaagaatgacagcaatggacaacgctacaagaaatgcaggtgaattagttgataaactcacaatcaattataacagaagcagacaagcatctatcacaaaagaattaatcgaaataatttcgggagcagagagtttataat

SEQ ID NO: 272089 - DNA, 176 bp, Unknown
  Bacterial polypeptide expressing nucleotide sequence isolated from the Sargasso Sea
tatggcaaacgaaaaggaaattcgaacaaaaattgggagtgttaaaaacacccaaaaaattacgaaggccatggagatggttgcagcaagcaagatgcgtcgaacacaagaaacaatgaaaaaagcgttgccatatgcagacaaaatcagagctgtgatagggcatatttataagg

SEQ ID NO: 272090 - DNA, 100 bp, Unknown
  Bacterial polypeptide expressing nucleotide sequence isolated from the Sargasso Sea
atgcctagtttagacgatttaagaaaaagaattacaagtgttaaatcaactcagaaaattacaaaagctatgaaaatggtagctgctgctaaattacgta

SEQ ID NO: 272091 - DNA, 535 bp, Unknown
  Bacterial polypeptide expressing nucleotide sequence isolated from the Sargasso Sea
aacattaaaaattatcacagttggttcaaaaggttatgatcaattgaaaagaacatataaagaaaatataattgaaaaaatttcatttaaagaatctaaacatgttaattattttgatgctgataaagtgggaaaaacaattcttgataaatttgaaaaaaaagagtttgatgtatgtacaattttttataaccaatttaaaaatgtgataactcaaataccacaagagcaacaaataattccattaaaaacatcagagtcagaaggttcttccatagaagataactatgaatttgaacctgaagaagatgaaattttaagcaacttattgcctaaaaatatatctactcagatctttaaagcgatgttagaaaattcagctagcgaacaaggctcgagaatgagtgcaatggataatgcaactagaaatgcaggtgaaatggttgataaacttactattcagtataatagaagtcgtcaagcagcaattacaaaagaactaattgaaataatatcaggagcagaaagtttataa

SEQ ID NO: 272092 - DNA, 199 bp, Unknown
  Bacterial polypeptide expressing nucleotide sequence isolated from the Sargasso Sea
atgagaaaaggaaaaattacacagattataggggcagtagtagatgttaagtttgacggaaaactaccagagatattaacagcattagagtgcattaatggtggcaataggttggttctagaagttgcacaacacttaggagagtctagcgtaagaactattgccatggacgcaacagagggtcttaaaaggggagatg

SEQ ID NO: 272093 - DNA, 492 bp, Unknown
  Bacterial polypeptide expressing nucleotide sequence isolated from the Sargasso Sea
taaaaagaacatacgaagagaatattattgaaaaaatttcatttaaagaatctaaacatgcaaattattttgatgcagataaagtaggaaaaataattattgaaaaatttgaaaaaaaagaatttgatgtatgtacaattttttacaaccaatttaaaaatgtaataactcaaataccacaagaacaacaaattattccattaaaagccactgagtctgagagcaattcatctgaagataactatgaatttgaacctgaggaagatgaaattttaagtaacttactaccaaaaaatatttctactcaaatttttaaagcaatgttagaaaattcagctagcgaacaaggttctagaatgagcgcaatggacaatgcgaccagaaacgcaggtgaaatggttgacaagcttactattcagtataatagaagtcgtcaagcagcgattactaaagaactaattgaaattatatcaggagcagaaagtttataat

SEQ ID NO: 272094 - DNA, 221 bp, Unknown
  Bacterial polypeptide expressing nucleotide sequence isolated from the Sargasso Sea
tttaagcaatttattgcctaagaatatttctacgcaaatatttaaagcaatgttagagaattcagctagcgagcaagggtctagaatgagtgcgatggataatgcaacccgaaacgcaggtgaaatggttgacaaacttactattgaatataatagaagtcgtcaggcagcaattacaaaagaactaatagaaatcatatcaggagcagaaagtttataat

SEQ ID NO: 272095 - DNA, 223 bp, Unknown
  Bacterial polypeptide expressing nucleotide sequence isolated from the Sargasso Sea
atattacaagatttacttcctaaaaatgtttctatacaaatttttaaagtattacttgaaagtgatgcaggtgagcaaggagcgcgtatggcggctatggataacgcgactcgtaatgctggagaaatgattgatagtttaactttaaaatataatagaacaagacaagcatttattactaaagaattaatagagattatttctggagcagaatcaatttaaa

SEQ ID NO: 272096 - DNA, 498 bp, Unknown
  Bacterial polypeptide expressing nucleotide sequence isolated from the Sargasso Sea
aaaatataacagacagctttgttgatacgaatgtatctagtgcaggttacaacatagcattagaaatttctgcaaagttacaatctttatattttgaaggaaaatttgataaatgtattcttgtatataataaatttaaatctgcaatttctcaagaagtgacacaacaacaattaatacctcttgatatatctaacaaaaacaaagaagataaatccaatgaaactgaaagttcaaataaggcaatatatacttatgaacctgatgaagaaacaatattgcaagatttacttcctaaaaatgtttctattcaaatttttaaagtattgcttgaaagcgatgctggtgagcagggagctcgtatggcggctatggataacgcgactcgtaatgctggagaaatgatagatagtttaactttaaaatataatagaacaagacaagcatttattactaaagaattaatagagattatttctggagcagaatcaatttaaa

SEQ ID NO: 272097 - DNA, 199 bp, Unknown
  Bacterial polypeptide expressing nucleotide sequence isolated from the Sargasso Sea
tatggctagtttagatgatttaaaaaaaagaatatcgagtgttaaatctacacaaaagattactaaagcaatgaaaatggttgctgcttctaaattaagaagagcccaagagagtgctgaaaaaggtagaccatattcagacaagatgaataatataatacttaatttgtctaaaagtatctcagataaagagaactct

SEQ ID NO: 272098 - DNA, 970 bp, Unknown
  Bacterial polypeptide expressing nucleotide sequence isolated from the Sargasso Sea
atggattttgatcaatataaaaaagcgattgaaaatgttgaaacaattcaagttgtaggtaaggttgtaaaagttattggccttgtaattgaggctcaaatacagggggtatctgtcggggatttatgtatgattgaattggccaatggtgaattaattcgagcagaggttgttgggtttaaagaagatcaagtattgctgatgccccttggtatgattactggtattcagcctggtagtaaagtttatccaactggaatgccaatatccgtaaaagtttcacctaatatgttaggccgggttttgaatggattgggtgaaccaatcgatggaaaagggccaatagattcagatgaatatgttccaattgatgaagatcctccggatccttttacaaggccacgtattcatgatgttttaagtgttggtgttaaagcaattgatggtttactcactttaggtaggggacagcgggttggtatttttgctggatcaggtgtcggtaagagtaccttaatgggaatgcttgcaagaaactgtgtcgctgaaatcaatgttatttgtttggttggagagcgtggtcgtgaggttaatgattttattgaagaatctttgggtgaagagggcattaagaaatcggttgttatttgtgcaacgtcagatacaccgccactgattcgagtaaaatgtgcgatggtgggtactgcagttgctgaatattttcgtagtttaggtaaagatgtattattaatgatggattcagtgacacgttttgctatggctcaacgtgaaataggtttggccactggtgagccaccaacaaccaaaggctatactccatctgtttttgcgatgttacctcggctaatggaacgtgcgggcacctctgagaaaggttcgattacgggtatttatactgtattggttgatggtggagatatggatgagcctattgcggattgtgcgagaa

SEQ ID NO: 272099 - DNA, 430 bp, Unknown
  Bacterial polypeptide expressing nucleotide sequence isolated from the Sargasso Sea
tatgagccaattaaatccatcagaaatttccagcgttctaaaagagaaaattgctggccttgatctatcagctgaaagaaaaaatgaaggcatagttgtaagtgtctcagacggtattgtaagaattcatggtatgggtgacgtcatgtatggtgaggttattgaatttgaaaatggcacaaaaggaatggcacttaacttagagcaagattctgttggtgcagttgttcttggtgattatcttgaaattattgaaggtcaaaaagctgtttgtactggaaaagttctagaggtgcctgttggggaggctatgcttggtagagttgtaaatacattgggtgtacctattgatggtaagggtgaaattaatgctgaacactcttcaccagttgaggttgttgctcctggggtattgcacgtcagtcagtag

SEQ ID NO: 272100 - DNA, 382 bp, Unknown
  Bacterial polypeptide expressing nucleotide sequence isolated from the Sargasso Sea
atgagcaacggaacagttacacaaattattggagcagtcatagatgttgaattcgataaagataacatcccaaaggtatatgaagctctaaaaatagatgagagcggaaccactcttgaagttcaacagcaactaggcgacggtgttgtaagaactatcgcaatgggtgcaacagaaggacttaagagaggactgtcagctacaagaacaaatgctcctatatcagttccagtagggccagagactttaggaagaattgttgatgtccttggaaaccctatcgatgaaaaaggccccattggtgaaaaatctaagatgccaattcatagaaagcctccgagctatactgatcaatcagcttcaaacgaagtcttagaaacag

SEQ ID NO: 272101 - DNA, 383 bp, Unknown
  Bacterial polypeptide expressing nucleotide sequence isolated from the Sargasso Sea
aatggagataaatccttcagaagtaacaaaaatattaaaagagcaaataaaaaaaattggtgacaaagtagaagttacagaagttggtcaagtattgtccgttggagatggtatagctagaatttatggcttagacaatgttcaagctggagaaatggtagaattttcagatggatcaaaaggcatggcgcttaatctagagagcgataatgtaggtgttgtaatttttggcgatgatagagctgttaaagaaggtgatacggtaaaaagaacaggcgctatcgtggatacaccagttggtaaagaattattaggtagagttgtagatggattaggtaatcctattgatggaaaaggtgcattagaaaaaagtattaaaaaaa

SEQ ID NO: 272102 - DNA, 361 bp, Unknown
  Bacterial polypeptide expressing nucleotide sequence isolated from the Sargasso Sea
tatgagtaatggaacagtaatacaaataattggagcggtaattgacgtcgagtttccaaaggaaaacttacctaaaatctatgacgccctaactgttgatgaaactgggcttgttttagaagtgcaacagcagttgggtgacggtgttgtcagaacaattgcaatgggtgcttcagaagggctcaaaagaggtgtgtcagttaccaatactgaaaatccaatatctgttcctgttggagaggcaacacttggaaggattatgaatgttctaggcgagccaatagatgaaaagggtcctgtagatgcaaaatcagcaatgccgatacatagaaatccgccttcatatgaggatcaggcagag

SEQ ID NO: 272103 - DNA, 740 bp, Unknown
  Bacterial polypeptide expressing nucleotide sequence isolated from the Sargasso Sea
gagagatttaatggctgctatttctagtggttacagtccgacatcgaatgaaagaaatcttcttaccggagatgaaaatgataatattcatatgcttattctctttacgtcagaaaggggtctttgtggtggatttaactctgtagttacgaaaagtttaagagaaaaaattgaaaatctactgcaggcaaataagacagttaagattatttgtgttgggaaaaaaggatacgatattttaaaaagacaatattcagaaatgattactgaggttatagatatgagagaagtaaaatctgtttcatatcaagatgcaaaaaatatttctgataagattattaaaatgttctttgatggtgagtttgataagtgctcaattttttataataaatttcaatctgtaatttcccaaatccctacagaacaacaagtagttccaattgaattggaagaagattcctcaaatgagagttctgtagatcaatcattttttgactttgaacctggagaatctgaaattttagaagagttgctaccactaaactttacagttcaaatttttaaggcacttttagagagcgccgctagtgagcagggtgctaggatgagtgcaatggataatgcatcaagaaacgcatccgatatgattgataatttaacgctattttataatagatctagacaagcagtaattacaaaagaattaattgaaattatttcaggtgctgaagcagtttaat

SEQ ID NO: 272104 - DNA, 196 bp, Unknown
  Bacterial polypeptide expressing nucleotide sequence isolated from the Sargasso Sea
gcagaaccagctgctgcgttcgttgcaggagtccgcggcctctgaattggccagccggatgaccgccatgaacaacgccagcgacaacgccaaggagctggccaagaccctgacccttgactacaacaaggcccgccaggccgccatcacccaggaaatcctggaagtggccggtggcgctgccgctgtgggttga

SEQ ID NO: 272105 - DNA, 736 bp, Unknown
  Bacterial polypeptide expressing nucleotide sequence isolated from the Sargasso Sea
atgccttctctcaaggaccttaaaaacaggatcgagtcggtcaaatcgacccgcaagatcaccaaggccatgcaaatggttgccgcggcgaaacttcgccgcgcgcaggaggccgccgagatggcgcgcccctatgccgaacgcttcaacgccgtgatggcgaagctggcggcctcggtgggtgacagcgacagcgcgccgcgcctgttgcgtggcaccggcgaggacaaggtgcatctgctggtggtgatgaccgccgagcggggcctttgcggtggcttcaactcgaacatcgccaagctggcgcgcaccgaagcggaatcgctcaaggcacaaggcaagacggtgaagatcatcaccgtcggcaagaagggccgcgatgccctgaaacgtgacctgggggacctgttcatcgaccacgtcgacatgaccgccgtgaagaacatcggctatgacgatgcgcaggcggtggccaagaacctgctggatcgcttcgacaagggcgaattcgacgttgccaagatcttctattcgaagttccagaacgtcgtgagccagatcccgaccgtgcagcaggtgatccccttccaggtggacgaggatgccgcagcggatgagcccgaggccagtgtcgtgtacgactacgagccggacgaagaggccattctggccgatcttctgccgcgtggcgtggccacggccattttcagcggtctgctgaaaacgggcctcgaac

SEQ ID NO: 272106 - DNA, 431 bp, Unknown
  Bacterial polypeptide expressing nucleotide sequence isolated from the Sargasso Sea
tatgccaaacttaaaagatcttaaggttaggataaacagtgtaaagtcgacgcagaagatcacttctgcaatgaaaatggtagctgcagctaaactgcgtcgggcccaagaatatgcagaagaggctcgaccatattctgcaagaatggatcgtatgatcgctgctttggccggtaagatgagtaacgtaggcggaccaaaattgttggcgggaacaggaaggagtgataaccatttattagtagtaatgactgccgatagaggactttgcggtggctttaattcatctattgtaagagctactcggaagagaatcgctcaattaaaaaatgatggaaagcaagtcaaattggtgtgtgtcggtcgaaagggcagtgatcaacttcaaagagaggctggagaactgattaccgaatcgttggaaggtatta

SEQ ID NO: 272107 - DNA, 298 bp, Unknown
  Bacterial polypeptide expressing nucleotide sequence isolated from the Sargasso Sea
tctgaaaaaaaagatgaatcagaaaaaaattcagaagcaaatgcaatctatgtatatgagccagatgaagaaacaattcttcaagacttgcttcctaaaaatatatctattcaagtttttaaagttttattagaaagtgatgctggtgaacagggagcacgtatggcagctatggataatgcaacacgaaacgctggtgaaatgatagatagtttaacattaaaatataacagaacgcgacaagcgtttataactaaagaattaattgaaattatttctggagctgaatcagtttaaa

SEQ ID NO: 272108 - DNA, 436 bp, Unknown
  Bacterial polypeptide expressing nucleotide sequence isolated from the Sargasso Sea
tatggaaatcaatccttcagaagtcacaaaaattttaaaagaacaaattaaaaatttcggagaaaaagttgaaatttctgaagttggacaagttttatcagtaggagatggaatagcaagaatttatggtctagataatgttcaagctggagaaatggttgaattttctgatggttctaaaggtatggctttaaatttagaaagtgaaaatgttggagttgtaatttttggtgatgatagaaatataaaagaaggagatgttgttaaaagaactggaagcattgttgatacaccagtcggaaaagaattattaggaagagttgtagatggtctaggaaatcctattgacggcaaaggagtattggacaaaggtgttaaaaaaagcagagtagaggtaaaagctcctggaattattccaagacaatctgttagtgaa

SEQ ID NO: 272109 - DNA, 370 bp, Unknown
  Bacterial polypeptide expressing nucleotide sequence isolated from the Sargasso Sea
atgacaatcaacccttctgaagtaacaaaattattaaaagatcagataaaaaattttggtgagaaagctgaagtttctgaaataggaaaagttttgtcagttggagacggtattgcaagagtttatggtttagataatgttcaagcaggtgaaatggttgaatttgaagatggctccaagggaatggcgttaaatttagaaaatgataatgttggtgtagtaatttttggtgatgacagaaatataaaagaaggagatacaattaaaagaactaacgcaatagtagatgttcctgttggtaaagagcttttaggaagagtagttgatggattaggaaatcctattgatgaaaaggagcattatcagcaaa

SEQ ID NO: 272110 - DNA, 231 bp, Unknown
  Bacterial polypeptide expressing nucleotide sequence isolated from the Sargasso Sea
aagatgagattttagaagatctacttccgaaaaatatttctactcaaatatacaaaggtttcttagaaaattctgcaagcgaacaaggttcaagaatgacagctatggataatgcgacaagaaatgctggagacctggtagaaaagttgactattaattacaatagaagcagacaggctgctattacaaaagaattaattgagataatatctggagcagaaagtttataga

SEQ ID NO: 272111 - DNA, 538 bp, Unknown
  Bacterial polypeptide expressing nucleotide sequence isolated from the Sargasso Sea
atggtagcacaaggaaaaattgtatggattagtggaccggcagtaaaagctgacggtatggctgatgcaaaaatgtatgaaaccgtatcagtcggagatgcaaaactaatcggtgaggtaattcgtcttaccggagatgtagcattcattcaagtttacgaatcaacaagtggtctaaaaccaggcgaacctgtagttggtacaggaaacccactcagcgttttactaggacctggaattatcggtcaaatttatgacggaattcaaagacctctaaaggatttagctgataaatctggctctttcattggaagaggaattacaacaactcctgttgatatgacaaaagaatatcacttcgtaccatctgttgcagttggagatgaggttcaagcaggaagcataattggaactgttccagaaacatcattaattgagcataaaattctagtcccaccagatcacaaaggtggaaaaattacaaaaattgtttcagaaggcgattacgcattagagactgagattgcatcagtgaggc

SEQ ID NO: 272112 - DNA, 412 bp, Unknown
  Bacterial polypeptide expressing nucleotide sequence isolated from the Sargasso Sea
gatgacagtgcaactggatgtagtaagtgccgaagagaaaattttctctggccttgtcgaatccgtgcaggtcacaggcagtgagggcgagctgggtattttacccttccacgccccgttactgaccaccctgaaacctggcatggtccgtatcgtgaaacagtttggcgaagaacacgtgatttacgtcgccggtggtgtacttgaagtacaaccggataccatcactgtactggccgatgtcgcggtacgcggcgaagacttagacgagcaagccgctttggcagcacaaaaacgtgccgaagaagcgatgcagcacgctggtgcagacttcaactatgctgaagctgccgcgcaactggccgaagccattgcccagctgcgcattattcaaaaaatgcgtaaaaaataa

SEQ ID NO: 272113 - DNA, 267 bp, Unknown
  Bacterial polypeptide expressing nucleotide sequence isolated from the Sargasso Sea
tatgagcaaaaaaggaaacataacacaagtaattggtgcagtcgttgacgtaaaatttgacggagaactgccagaaatattaacagccttagagtgtgataatggaggtaatagattagttttagaagttgcgcaacaccttggagagtcaagtgttagaaccattgctatggatagtacagagggactcaaaaggggtgatgaagtaaaagatacaggcgctccaattcaagttccagtaggtccagaaacattaggacgaattgt

SEQ ID NO: 272114 - DNA, 663 bp, Unknown
  Bacterial polypeptide expressing nucleotide sequence isolated from the Sargasso Sea
tatggcagcaaatccaatgtaccaatttaacgtttatagaattggtccagaaattaaaataggggaaatagatttatcctttactaatgcaagtttattcatggtcataagctcattagcaatattaataatttttaatttaggtgcacaaaagagaaatataattcctgataaaatacaattgctctcagaacttagttatacatttgtgtctaaaatgataagtgatacggctggttcgaaagctaaaccatatttttcatttatattttcactttttatgtttgttcttttttgtaacatgttcggtatgatcccctactcatttacagtaacgagccacataattgtaacatttgttttagcagcatttattttcattggagtgacaattattggatttattaaacatggatttggctatttaaaactttttgtaccaagcggagtgccggctgtcttgttgccactaattgtagttatagaaattatttcttatttaagcagacccatcagtttatctgtaagattgtttgcaaatatgatggcgggacatacaatgatgaaagtattcggaggctttgtagtaagtcttggaattgtcggtggatggcttccactgagtttttcagttgcattaacaggttttggagatattagttt

SEQ ID NO: 272115 - DNA, 244 bp, Unknown
  Bacterial polypeptide expressing nucleotide sequence isolated from the Sargasso Sea
aagtaagcttactgttgctcgagcaagaaagattcaaagatttatgtctcagccattttttgttgctgaagtatttactggaacacctggtaagtatgtagatcttgaagatacgatcaagggttttgatgccatctgcaaaggggagtatgatcatcttcctgaagcagctttttatatggttggtacaattgaagaagctatccaaaaggctgaaaaaatgtctgaagatgctgctgcttaa

SEQ ID NO: 272116 - DNA, 214 bp, Unknown
  Bacterial polypeptide expressing nucleotide sequence isolated from the Sargasso Sea
gaaaagcgtagctggaacattgagactcgatcttgcgcaatacagagaattagaagcttttgcaaaatttggctctgatctagataagaatactcaagcccaacttaccagaggtgagcgcatggtagaaattttaaaacaaggtcagtatgttccaatgccatgtcgaaaagcaagttgctattatatttgcagcctcaaagggctttcttga

SEQ ID NO: 272117 - DNA, 430 bp, Unknown
  Bacterial polypeptide expressing nucleotide sequence isolated from the Sargasso Sea
atgtctataaacccttcagaagtaactaaattactaaaagatcaaattaaaaattttggggaaaaagctgaaatttcagaaattggaaaagttttatcagttggtgacggaattgcacgtgtatatggtttagataatgttcaggctggagaaatggtggagtttgaagatggctctaaaggtatggcattaaacttagaaaatgacaacgttggagttgtaatatttggagatgatagaaaaattaaagaaggtgatacaattaaaagaactaatgcaattgtggatgttccagtcggaaaagaattattggggcgagttgttgatggattaggaaaccctatagatggaaaaggagcaatatcttctaaagaaagaaaaagagttgaggtaaaagcaccaaggtataattccaagacaatctgttagt

SEQ ID NO: 272118 - DNA, 257 bp, Unknown
  Bacterial polypeptide expressing nucleotide sequence isolated from the Sargasso Sea
aatgcctagtttggacgatctaaaaaaaagaattaaaagtgtaaaatctacgcaaaaaattactaaagcaatgaagatggttgctgcagcaaaattaaggaaggcccaagaaagcgcggagaaaggcagaccttacagtcaaaaaatgcaaaatataatattgaacttgaccaaatctattaatgatcctcaaaatgcaccaaaactgctagttggaactggagaagataaaaagtatttgtgtatagttttaaccg

SEQ ID NO: 272119 - DNA, 187 bp, Unknown
  Bacterial polypeptide expressing nucleotide sequence isolated from the Sargasso Sea
tatgagcaaaggaataattacacaagttattggagcagtagtagacgtaaaatttgagggtgaactaccagaaattttaacagcactggaatgtaaaaacggtaataacagactagttttagaggtagcacaacacttaggtgaaactactgttagaacaattgctatggatgccactgaaagacta

SEQ ID NO: 272120 - DNA, 500 bp, Unknown
  Bacterial polypeptide expressing nucleotide sequence isolated from the Sargasso Sea
tgatcaattaaagagacaatataaagaaaatataattgaaaaaatttcatttaaagaatctaaaaatgttaattattttgatgctgacaaagtaggcaaaattattattgatagatttgaaaaaaaagaatttgatgtttgcacaatattttataatcaatttaaaaatgttattactcaaataccacaagaacaacagattgtgcctttaaaatcaaatgaagaaaaagaaactaattcttacagttcttatgaatttgagccagatgaggatgaaattttaagtaatttattacctaaaaatatttctacacaaattttcaaagcgatgttagagaattcagcaagtgaacaaggttcaagaatgagcgctatggacaatgcaacacgtaatgcaggagaaatggttgacaaacttactattcagtataacagaagtcgtcaagcagctatcacaaaagaactaattgaaataatatcaggagcagaaagtttataat

SEQ ID NO: 272121 - DNA, 247 bp, Unknown
  Bacterial polypeptide expressing nucleotide sequence isolated from the Sargasso Sea
atgagaaaaggaaaaatcacacaggtaataggagcagtagtagatgtaaaatttgatggagaattaccagaaattttaacagctttagaatgtaacaatacaggtaataggttagttttagaagttgcacaacacctaggagaatcaagtgtaagaacaattgccatggatgctacagagggtttaaaaagaggagatgaagttacagacacaggctcaccaattaaagtacctgtaggactcagaa

SEQ ID NO: 272122 - DNA, 564 bp, Unknown
  Bacterial polypeptide expressing nucleotide sequence isolated from the Sargasso Sea
aatttcaattattagcagaactaagttactcattcgtatcgaaaatgataagtgataccgctggatctaaagctaagccttatttttcattcatattttcattatttatgtttgtattattttgcaatatgtttggaatgattccttattcttttactgtaacaagtcatattattgttacatttacactggcagcatttatttttattggggtaacaattattggttttataaagcatggtttaggttatttaaaactttttgtaccgagtggagttccgataattttgcttccattaatagtggtaattgaaataatttcttatcttagtagaccagttagcttatcggtaagattatttgctaacatgatggctggtcatacaatgatgaaagtattcgggggttttgtaataagccttggaatagttggtggatggcttccacttagtttttctgttgcattaaccggtttggagatattagttgcttttcttcaagcatatgtttttgcaattttaacatgcatctatttaaatgatgcattaaatttacaccattaac

SEQ ID NO: 272123 - DNA, 231 bp, Unknown
  Bacterial polypeptide expressing nucleotide sequence isolated from the Sargasso Sea
agcaagagcgagaaaaatacaaagatttttatctcaaccatttttttgttgctgaagtatttactggatccccaggaaaacttgtagaattagaatctaccattaaaggatttgatgcgatctgcaagggtgagtatgatcatctgcctgaagctgcattttatatggttggaactatagaagaagctattgagaaagctgaaaaaatggctaaagatgctgcagcataat

SEQ ID NO: 272124 - DNA, 615 bp, Unknown
  Bacterial polypeptide expressing nucleotide sequence isolated from the Sargasso Sea
atagtagtataaatagagaaacttttaaacttgttaaatctcttgagaatgaaggcaaaaatgttcaacttattcctgttggaaaaaaaagtagagatttttttaatcgcttaatgcaagataaaattgttgaaagcttttctgatttgaatgtttctattactggatatgaatcagccttacaagtttcaaataaacttcaacagttatactttgacggtaaatttgataagtgtattttgatttttaacaaatttaaatctgcaatctcacaagaagtaacacaacaacaattaattcctttagatgtatcgagctcattaaaagagaaaaagtcagatgataacactgaggccaaagcaatatatgattatgaacctgatgaagaaacaattttaaaagacttgcttccaaaaaacgtatctattcaaatttttaaagtactattagaaagcgatgcaggggaacaaggagctagaatggctgcaatggataatgccacacgtaatgcaggtgaaatgatagatagtttaacgttaaaatataacagaacgcgacaagcgtttattacaaaagaattaattgaaattatttctggagctgaatcaatttaaa

SEQ ID NO: 272125 - DNA, 226 bp, Unknown
  Bacterial polypeptide expressing nucleotide sequence isolated from the Sargasso Sea
tatggcgaataatttaactggaaaaatatcacaagttcttggagctgttgtggatgttgagttcgatggtgaactacctgcaatcatgaacgcgctaaaagttgataataacggcacaagattgatgcttgaagttgcgcagcatttaggtgaaaatgctgttcgaacaattgcaatggacacaacagacggattagttagaggtcaaacagctacagatacaggc

SEQ ID NO: 272126 - DNA, 484 bp, Unknown
  Bacterial polypeptide expressing nucleotide sequence isolated from the Sargasso Sea
atacttcgcgtttattttttctttatttatgtttgtgctgttctgcaatatgttcggtatgataccgtattcttttacagtcacaagtcatataattgtgacattcgttttggcttcatttatttttattggagttacgataattggatttattaaacatggatttggatatctaaaattgtttgtaccaagtggtgtaccaatagttttacttccattaattgttgttattgaaattatttcttacttaagtagaccaattagtttgtctgttaggttgtttgcaaatatgatggctggtcacacaatgatgaaagttttcggaggctttgttattagccttggaatagttggtggatggcttccactgagtttttcggttgcattaactggattggagatattagttgcttttcttcaagcatatgtttttgcaatcttaacatgcatttacttaaatgatgcattaaatttacaccattaa

SEQ ID NO: 272127 - DNA, 347 bp, Unknown
  Bacterial polypeptide expressing nucleotide sequence isolated from the Sargasso Sea
taatcaatttaaaaatgtaattacacaaattcctcaatcacagcaaatcattccattaaaaactgataattcagaagaaaataagtctgaagatagttatgaatttgaaccagatgaagatgagattttaagtaatttattaccaaaaaatatttcaacacaaatatttaaagcgatgttagagaattcagctagtgaacagggctcaagaatgagcgcaatggataatgcaacccgaaacgcaggtgaaatggttgataaacttactattgagtataatagaagtcgtcaagcagcaattactaaagaactaatagaaatcatatcaggagcagaaagtttataat

SEQ ID NO: 272128 - DNA, 589 bp, Unknown
  Bacterial polypeptide expressing nucleotide sequence isolated from the Sargasso Sea
caaaaaaaatacaattatccccaataaaatgcaattgttagctgaattgagttattcttttgtctcaaaaatgataagtgatactgctggtattaaagcaaaaccatatttttcttttatattttctttattcatgtttgttcttttctgtaatatgtttggaatgattccttactcttttacagtcacaagtcatataatagttacttttgtccttgcggcttttatttttattggagtaacaataattggctttttaaaacatggttttgggtatttaaaactttttgtgccaagtggagtgccaatggttttattgccattaataatcattattgaagttatatcttatttgagtaggcctatcagcttgtctgtgcgactttttgcaaatatgatggctggtcatactatgatgaaagtttttggaggttttgtggtaagtcttgggatagttggaggctggctaccacttagcttttcagttgcattaactggtttggagatattagttgcttttcttcaggcatatgtttttgcaatattaacgtgcatatatttaaatgatgcactaaatttacaccattaa

SEQ ID NO: 272129 - DNA, 450 bp, Unknown
  Bacterial polypeptide expressing nucleotide sequence isolated from the Sargasso Sea
ttaaagaaaccaaaaatgctaattattttgatgcagataaggttggtaaaattatcattgatagattttacaaaaaagaatttgatgtgtgtacaattttttataatcaatttaaaaatgtaattacccaaattccgcaagaacaacaaattattcctttaaaaacttctgatgttcaagatgataatgataactataattatgagtttgagccagaggaggatgagatattaaataacttattacctaaaaatatttctacacaaatatttaaggcaatgcttgaaaactccgcaagtgagcaaggttctagaatgagtgcgatggacaatgctacaagaaatgctggagaaatggttgacaaactcacaatagagtataatagaagtcgtcaggccgctattactaaagaattaatagaaataatttcaggagcagaaagtttataaa

SEQ ID NO: 272130 - DNA, 131 bp, Unknown
  Bacterial polypeptide expressing nucleotide sequence isolated from the Sargasso Sea
tatggcaagtttagacgacctaaaaaaaagaatagctagtgtaaagtctacacagaaaattactaaagctatgaaaatggttgcagcagctaaattaagaagagctcaagaaagtgctggagaagggaagg

SEQ ID NO: 272131 - DNA, 342 bp, Unknown
  Bacterial polypeptide expressing nucleotide sequence isolated from the Sargasso Sea
aatacagagaaatggcagcatttgcacagttcggttctgacctagatgcttctacacagaaattactgaacagaggttcaaaattaactgaacttttaaaacaagaccagtattcgccaatgccagtagcacaacaggtgatagcagttttttctggtgtaaggggttttttggatgatgtagatttagctaatattaaaatcgttgagaagcaaatttatgaggaaattaaaacaaacaaccctgatattattgatagtataaacactacaggtaaattagaacaagaaatagaaaaaagattgacatcagcaatagaaaaattcaaaaaaaataagtaaa

SEQ ID NO: 272132 - DNA, 538 bp, Unknown
  Bacterial polypeptide expressing nucleotide sequence isolated from the Sargasso Sea
actctcaagatttttactggttggatccaaagggcatgaccagttaaaaagggtatatggtaaatatatagtcgaaaaaattaattttaaagggtttaggaaaattacttataaagaagctgaaaatgttggaaaaattataattaaattgtttaacgagtcgcagtttgatgtttgtaaaatattttacaataaatttaaaaatgtaattacgcaaattccgcaagaacaacagttaataccagttgaggataaggaaaaaaaagatgaaaaaatacaggataatttctatgaatttgaaccagaagaaaatgaaatcttaaacgacttacttccaaggaacatatctactcaaatttttaaagcctttctcgaaaatgctgcgagcgaacaaggatctagaatgacagctatggataatgcaacgcggaacgcaggagatttagtagataaactaacaattaattataacagaagtaggcaagcagccattacaaaagaacttattgaaataatatcaggagcggaaagtctatag

SEQ ID NO: 272133 - DNA, 185 bp, Unknown
  Bacterial polypeptide expressing nucleotide sequence isolated from the Sargasso Sea
aatatttaaggcaatgttagagaattcagctagtgaacagggctcaagaatgagtgcaatggataatgcaacccgaaacgcaggtgaaatggttgacaagcttactattgagtataatagaagtcgtcaagcagcaattacaaaagaactaatagaaatcatatcaggagcagagagtttataat

SEQ ID NO: 272134 - DNA, 421 bp, Unknown
  Bacterial polypeptide expressing nucleotide sequence isolated from the Sargasso Sea
aaatttatcactttagttagttgcgcccctgttgttcaaacactattgccacttgaccctcaaggaattgctgaggaaaatgatgaaatttttaggttaactacaaaagatagtaagttacttgttgaaaaatcaaatattgaaaaaagcgattcagagaagttgccatcagatattgtttttgaacaaagtcccgatcaactattagattctttgttaccattatatttgcagaatcaggtactaagagctcttcaagagtcggcagcttcagaactcgcgtgtaggatgactgctatgaataatgcaagtgataatgctaaagaattagcaagtactttgaatctaacctataacaaagccagacaagcagctattacacaagaaatattagaagttgtaggaggttctgcagtttagc

SEQ ID NO: 272135 - DNA, 140 bp, Unknown
  Bacterial polypeptide expressing nucleotide sequence isolated from the Sargasso Sea
tatgcctagtttagatgatttaaaaaaaagaatttcaagtgtaaagtcaactcaaaaaattaccaaagctatgaaaatggtagcatcagcaaaattaagaaaagctcaagaaagtgctgaaaaaggaaggccattttctg

SEQ ID NO: 272136 - DNA, 286 bp, Unknown
  Bacterial polypeptide expressing nucleotide sequence isolated from the Sargasso Sea
aatggctagtctagacgatttaaaaaaaagaatatctagtgttaaatcaacacaaaaaataaccaaggctatgaaaatggtagcagctgcaaaacttagaagagcacaggaaagcgcagagaaaggtagaccatattctgaaaaaatgaataatattattttaaatctatctggcggaatttctgacaaacaaagtgctcctaaattattagttggcacaggtgaagacaaggttcatttatgtattgttttaacatcagatagaggtttatgcggaggcttttaa

SEQ ID NO: 272137 - DNA, 250 bp, Unknown
  Bacterial polypeptide expressing nucleotide sequence isolated from the Sargasso Sea
atgcctagtttagatgatttaaaaaaaagaattaaaagcgttaagtcaacccaaaaaattactaaggctatgaagatggtggctgctgctaaactaaagaaagcacaagaaaatgctgaaaagggaagaccatatagtgaaaaattaagaaatataattttgaatttaaccaagtctatctcagacgaaactaacgctccaaaactattagctggaaatggtaaagataaggtttatctttgtgtagtaa

SEQ ID NO: 272138 - DNA, 763 bp, Unknown
  Bacterial polypeptide expressing nucleotide sequence isolated from the Sargasso Sea
atgaaaaatgaaggagtaatttaccgaatatctggacctgtggttaccgccactggaatggaagcgggaatgtatgatgttgtccgtgttggccttgaaggtctcatgggtgaagtgattgaactgcacggcgataaggctgtaattcaggtgtatgaggatactagcggtattcgcccaggcgaaccggtactcaacaccagagaaaccttgtccgttgctttaggaccaggtctgttaacccagatttacgatggtatccagcgtccgttggctactctcgaagaagtcatgggtgtattcatcactcgtggtgttgacgcagatggttttgatatggagaagaaatggacctttgagccaaccgtctcagtaggagacgaagttgttggtggtcaagttattggaaatgtccaagaaactgaaaccattgttcacaagattatggtcaagcccggaatgggcggcgtggtcaaatcgatttcagcaggcgattacaatgtaacagaagacgtctgtactttcgaagatggttcagcgattcagatgctacagaagtggccggttagaactcctcgtccgttccaacagaagtacgcaccagatacaccacttatcaccggaatgcgcatcctagatttcctcttccctctagctaagggtggcgcagcaggtattccaggaccgtttggttcaggaaagacggtaacacaacaatctctagcaaaatactccgatgctcaaattgttgtctatatcggat

SEQ ID NO: 272139 - DNA, 625 bp, Unknown
  Bacterial polypeptide expressing nucleotide sequence isolated from the Sargasso Sea
aatcccttatttgagaaaagagactcaaagaatctattaatcattgccataacgtccaataaaggtttgtgtggaggatttaattctaatattataaaagaagtaaataatattaaaacaaccagtgcatctaaaagagtcgatttattaactattggaaaaaaaggtgatgacattctgtcaaagaagtttgaggttataagttcacataatgatgtttatgataattttaattataataacatcaaggaaattgctgaaacagtaatgcagaaattttctgataaggaatatgatgaagttacacttgtttacaatcattttaaaaatgcagcaactcaaatagtaaccaaagaacagtaccttccaattgaagacagtactgaagaaaataattctgtatctggagattatatatttgaaccaaatagacctaaaatcttaaatgaattaattccaaaatcgttatctatccagcttttcaaggcaatctcagattctattgcaggagaacatggtgcaagaatgactgcgatgcacaaagctactgataatgcttctgagttaagagatcagcttaagttaacttacaataaagcaaggcagacagcaattacaaatgaaa

SEQ ID NO: 272140 - DNA, 218 bp, Unknown
  Bacterial polypeptide expressing nucleotide sequence isolated from the Sargasso Sea
aatgagtaaagagggaaaaataacacaaattattggtgctgtggttgatgtaaattttgcaggtgatctaccagaaatttatacagctcttgaggctaataatgctggaaataaattaattttagaagttgcgcagcatttaggagaaaatgatgtgagaactatagcaatggatgcaactgagggattaaagagaggtgataaagtaattaacactg

SEQ ID NO: 272141 - DNA, 649 bp, Unknown
  Bacterial polypeptide expressing nucleotide sequence isolated from the Sargasso Sea
tgcgagtttatttatggttataagcacaatagctatacttattgtgtttaatttaggtgctaaaaaaaaatccttaattccagataaaattcaattacttgcagaacttagttattcatttgtgtcaaaaatgattagtgacacagcgggaactaaggcaaaaccttacttttcatttatattttctctttttatgtttgtattattttgcaacatgtttgggatgatcccttactcatttactgttactagccacataattgtaacttttgtgcttgctgcattcatttttataggtgtcacggttattggatttattaagcatggacttggttatttgaaactttttgttccaagcggagtaccaatggtacttttgccattaatagttgtaattgaaataatttcgtatctaagcagaccaattagtttatcagttagattatttgcaaacatgatggctggtcatactatgatgaaagtatttggaggatttgttgttagtctaggaattgtagggggatggctaccattaagtttttcagttgcactaacaggtttggagatactagttgcttttcttcaagcttatgtttttgcgatattaacctgcatctatttaaatgatgcattaaatttacaccattaa

SEQ ID NO: 272142 - DNA, 466 bp, Unknown
  Bacterial polypeptide expressing nucleotide sequence isolated from the Sargasso Sea
aatggaaataaatccttcagaagttacaaaaatattaaaagaacaaattaaaaaatttggggataaggctgaggttacagaagttggtcaagttttatctgtaggagatggtatcgcaagaatttatggattagataatgttcaagctggagaaatggtagaattttctgacggctcaaaaggaatggcattaaaccttgagagtgaaaatgtaggtgtagtgatttttggtgatgataaagcagttaaagaaggtgatactgtaaaaagaactggtgcaattgtcgacacaccagttggaaaagaattacttgggagagtagttgatggcttaggaaatccaattgatggaaaaggtgcgttagataaaagtttaaaaagaagtagggttgaggttaaagctcctggtataattccacgtaaatctgtaagtgaaccaatgcagactggtcttaaatcaattgat

SEQ ID NO: 272143 - DNA, 412 bp, Unknown
  Bacterial polypeptide expressing nucleotide sequence isolated from the Sargasso Sea
tgggtggagccgctcaactcctttaattaaaaaattaggtggaggagttagaattgctcttgctcagttcagagagctggaagcttttgcacaatttgcatcagatttggatgacgcgtcaagagagcagcttgagcttggtcagaaggtaacagaattgatgaagcaaaaacaatattcacctatgtcggtttcagagatggggcttgttctttttgcagtagataaaggttatttaaaagatgtggagctcaataaaattgctgattttgaatcagctttgatttcttatatgaattcagagcacaaagatttcatggatagtttagcggagagtggtgaatactcagatgaaatcctttcaaccctcacagaagctctcgataaatttaaagcaacgcaaacttggtag

SEQ ID NO: 272144 - DNA, 449 bp, Unknown
  Bacterial polypeptide expressing nucleotide sequence isolated from the Sargasso Sea
aatggaaataaatccttcagaagtcacaaaaattttaaaagaacaaattaaaaattttggagaaaaagcagaaatttctgaagttggacaagttttatcagtaggtgatggaatagccagaatttatggtttagacaatgtccaagctggagaaatggttgaattttcagatggctctaaaggtatggctttaaacttagaaagtgaaaatgttggagttgtaatttttggtgacgatagaaatattaaagaaggcgatgttgtaaaaagaacaggaagtattgtagatactccggttggaaaagaattattaggtagagtggttgatggattaggtaatcctatagatggaaaaggtgctttagataaaactgtcaaaaagagtagagtagaagtaaaggctccaggaattattccaaggcaatctgtaagtgagccaatgcaaacag

SEQ ID NO: 272145 - DNA, 358 bp, Unknown
  Bacterial polypeptide expressing nucleotide sequence isolated from the Sargasso Sea
gctcttgctcagtttagagagctggaagcttttgcacaatttgcatcggacttggatgatgcatctagagagcagcttgaacttggtcagaaggtaacagaattgatgaagcaaaaacaatattcgcctatgtcggtttcagagatggggctggttcttttcgccgtagataaaggttaccttaaagatgtggagctcaataaaattgcagattttgaatcagcattgatttcttacatgaattcggagcacaaagatttcatggataatttagccgagagtggtgaacactcagatgaaatccttgcaactttcacagaagctctcgataaatttaaatcaacgcaaacttggtagt

SEQ ID NO: 272146 - DNA, 142 bp, Unknown
  Bacterial polypeptide expressing nucleotide sequence isolated from the Sargasso Sea
atggcaagtttagacgatttaaaaaaaagaatagcaagtgttaaatccacacagaaaatcacgaaggctatgaagatggttgctgcagcgaaacttagaaaagcgcaagaaaatgcagaaaatggaaggccttattcagaaa

SEQ ID NO: 272147 - DNA, 379 bp, Unknown
  Bacterial polypeptide expressing nucleotide sequence isolated from the Sargasso Sea
ccattagactctacaagtagacaactagatccgttgataattggccaagagcattacgatacaacgagagctgtgcaaggagtgcttcaaaaatataaagagcttaaggatattatcgccattcttggaatggatgaattatctgaggatgataagttggcagttaaccgtgcacgtaagatacaaaggtatctatctcaaccattttacgtagcagagacttttaccggaaccccaggaaagtacgtttctttgaaagatacaattagcggcttccaagctattgtgaatggtgactacgatcatctgccagaacaagccttttatatgatcggtgagatttctgaagcagaaaaaagagcagaagaaattaaataat

SEQ ID NO: 272148 - DNA, 313 bp, Unknown
  Bacterial polypeptide expressing nucleotide sequence isolated from the Sargasso Sea
tatgagcaaaggaataattacacaagttataggagcagtagttgacgtaaaatttgacggagaacttccagaaattctaacagcaatagaatgtaaaaatggtgataacagattagttctagaggttgctcaacatttaggtgaaacaacagttaggacaattgcgatggatgctaccgaaggattaaaaagaggtgatgaagtaacaaatactaatgctcctatccaagtacctgttggacctgaaactcttggaagaattattaatgtaattggtgagcctatagatgaaagaggtgaggttaaaacaaaa

SEQ ID NO: 272149 - DNA, 370 bp, Unknown
  Bacterial polypeptide expressing nucleotide sequence isolated from the Sargasso Sea
aatgagcacaggaaatatcgtacaagtaatcggagcggtagtagacgttgagtttccaaaagaagcaataccaagcgtatatgacgcactcacccttaaagacggagaactagtttttgaggttcagcagcaacttggtgacggcattgtcagaaccattgcaatgggagcaagtgagggcctaaaaagaggccttgaggttgaaaacactggagccccaattagtgtgcctgtaggacaggaaaccctaggaagggttctagatgttctaggaaacccgatagatgaaaaaggccctgtcggcgccaaagcaaatagaccaattcacgcaaaagcacctacgtttgaagagcagtctacagaagcggat

SEQ ID NO: 272150 - DNA, 348 bp, Unknown
  Bacterial polypeptide expressing nucleotide sequence isolated from the Sargasso Sea
acaacgattttgtgaacacgatgacacaaaaaccagaaatcaaaacacttctcccaatagaccctgaagacagcgatcaaatgcaagaacactgggactatatttatgagccagactcaaaagagcttttggactatatattgatgagatatatcgagtcacaagtctatcgagcggtagttgaaaatgtagcatgtgaaatggcagccaaaatggtggccatgaaaagcgctacagacaatgcaggaaaattaatagaccagcttgagcttgattataacaaagcaagacaggcggcaatcacacaagaaatttcagaaatagttggcggcgcagctgctgtttaaa

SEQ ID NO: 272151 - DNA, 476 bp, Unknown
  Bacterial polypeptide expressing nucleotide sequence isolated from the Sargasso Sea
atatattataaaaaaaataagctttaaagataagaaaaaattatcttttgcagacgctgatacgattggaaatgaaattgttaaactatttaaaaataatgattttgataaatgtataattttttataataaatttcaaaatgtaatgactcaaattccacagacccaacaagttattccagcaaaaaataaagattataacaagagtgaaaatgatcattcgtcatatgaatttgagccagatgaagatgaaattttagaagatcttctgcctaaaaatatttccacccaaatatataagggttttcttgaaaactcagcaagtgaacaaggttcaagaatgactgccatggataatgcaacaagaaatgctggcgaattagttgaaaagttaactattaattataatagaagtagacaagcatctatcacaaaagaacttattgaaataatatcaggagcagaaagtttataaa

SEQ ID NO: 272152 - DNA, 244 bp, Unknown
  Bacterial polypeptide expressing nucleotide sequence isolated from the Sargasso Sea
tacgagcctgatgaggaagaagttttgtctaaaattctaccaaaaaattttattgtgcaaatttacaaagccattttagagtctagagctagtgagcaaggagcaagaatgacagcaatggacaatgctactaggaatgccggcgaaatgatagataatttatctttaaaatataatagacaaaggcaagctataattacaaaagaattaatagaaattatatctggggcagaagctttataat

SEQ ID NO: 272153 - DNA, 136 bp, Unknown
  Bacterial polypeptide expressing nucleotide sequence isolated from the Sargasso Sea
aatgagtgcaatggacaatgctacccgtaacgcaggtgaaatggttgacaaacttactatcgaatataacagaagtcgtcaggcagcaattacaaaagaactaatagaaatcatatcaggagcagaaagtttataa

SEQ ID NO: 272154 - DNA, 201 bp, Unknown
  Bacterial polypeptide expressing nucleotide sequence isolated from the Sargasso Sea
aatggcaagtaataaggcaggaaaagttacacaggtattaggggctgtggttgacgtcgcctttgaaggagaattacccccaattttaaatgcactatctacaaagataggtgaccaagatttggttttagaagtagcacaacaccttggtgaaaacactgtgcgaactattgctatggatgcaacagaaaggccttcaaa

SEQ ID NO: 272155 - DNA, 451 bp, Unknown
  Bacterial polypeptide expressing nucleotide sequence isolated from the Sargasso Sea
ttcaaaaataaaaaaaaaatttccttcaaagatgcctcactagtcggacatgaagttgtaaaattattcaaaaataatgaatttgataaatgtatcattttttacaacaaatttaaaaacgtaatgacacaaatacctcagtcacaacaattaatacctgcaaaaaaagaggatgatactaaaacagaacaagattcgtcctatgattttgaacctgaagaagatgaaatattagaagatcttctaccaaaaaatatctctacacaaatttataaaggatttttggaaaattctgcaagtgaacaaggatccagaatgacagctatggataatgcgacaagaaatgcaggtgatttagtggaaaaactaacaataaattataatagaagcagacaagccgctatcacaaaagaattaattgaaataatatcaggggcagaaagtttataaa

SEQ ID NO: 272156 - DNA, 529 bp, Unknown
  Bacterial polypeptide expressing nucleotide sequence isolated from the Sargasso Sea
aaaaaagagtagagatttttttatccgtgttatgaaagatcaaattgttgagagctttattgatttaaatctttcaaatactggttacgaatcagcactacaagtatcaaataagcttcaagatttatattttgatggaaagtttgataaatgtattttggttttcaacaaatttaaatcagctatttctcaagaagtaacacaacaacaacttattccgttagatgtatcagattcaacaaaagaagacaaagaagataataatgcagcaaaggcaatctatgattatgagcctgatgaagaaactattttaaaagatttattgcctaagaatgtttctattcagatttttaaagtacttttagagagcgatgctggtgagcacggagcacgaatggctgcaatggataatgctacacgaaatgctggtgagatgatagacggcttaacactaaaatataacagaacgcgacaagcgtttattactaaagaattaattgaaattatttctggagctgaatcaatttaa

SEQ ID NO: 272157 - DNA, 475 bp, Unknown
  Bacterial polypeptide expressing nucleotide sequence isolated from the Sargasso Sea
aacataattgaaaaaatttcctttaaagagtcaaagaatgctaactattttgatgctgaaaaagtcggtagagtaattattaaaaagtttgaaaaaaaagaatttgatgtatgtacaattttttataatcaatttaaaaatgtaataactcaaataccaaaagaacaacaaatcattcctttaaaatcatctgagaaaaaagagaatttttcatttgaggataattatgaatttgagcctgatgaagacgaaattttaagtaatttattacctaaaaatatttctactcaaatttttaaggcaatgttagagaattcagctagcgagcaaggctcaagaatgagtgccatggacaatgcaactagaaacgcaggtgaaatggttgataagcttactattgagtataatagaagccgtcaagcagcaattacaaaagaattaattgaaatcatatcgggagcagaaagtttataat

SEQ ID NO: 272158 - DNA, 376 bp, Unknown
  Bacterial polypeptide expressing nucleotide sequence isolated from the Sargasso Sea
tatgagaaaaggaaaaattacacagattattggagcagtagtagacgtaaaatttgatggagagttaccagaaatattaactgcattggagtgcgataatggaggtaatagactagttttagaagttgcccaacatctaggagagtcaagcgtaagaacaatcgctatggacgcaacggaaggtttaaaaagaggagatgaagtaacagatacagcagctccaattaaagttcctgttggtccagaaactttaggtagaattattaatgtaattggtgaacctattgacgaaaaaggagaagttaagtctaaagaaaattggccaattcacagagcagcaccagaatttaatgatcaatcaacagaaactgaaatt

SEQ ID NO: 272159 - DNA, 685 bp, Unknown
  Bacterial polypeptide expressing nucleotide sequence isolated from the Sargasso Sea
atgcggtggttacaacacaaatatataaaaaaggtagaaataagatacgcagaattagttaaacaaggatatcagccaaatttgattttggtaggaaaaaaagctattggatattttcaaaatagaaaggatagatatgttatcaaaagtactttcaaagaactagaacaggtgcccacagtccaagactctgaaggaattacaaacgagattttagctgaatttctctcggaaaattctgatagagtagaaattatttacacgaaattcatcacactagttagctgcgctcctgtcgttcaaacactactgccacttgatcctcaaggtattgctgaggaaaatgatgaaatttttaggttgactacaaaaaatagtaagttacttgttgaaaaatcaaatattgaaaaaagtgattcagataagttgccatcagatattgtttttgaacaaagtcctgatcaactattagattctttattaccactatatttacagaatcaggtactaagagctcttcaggagtctgcagcttcagaactcgcttgcaggatgactgctatgaataatgcgagtgataatgctaaagaattagcaagtactttaaatctaacttataacaaagcgaggcaagcggctattactcaagaaatattagaagttgtaggaggttcagcagtttagc

SEQ ID NO: 272160 - DNA, 117 bp, Unknown
  Bacterial polypeptide expressing nucleotide sequence isolated from the Sargasso Sea
aatgcctagtttagacgatctaaaaaaaagaattaaaagtgtaaaatctacacaaaaaattactaaagcaatgaagatggttgcggctgcaaaactaaggaaagcgcaagaaagcgc

SEQ ID NO: 272161 - DNA, 112 bp, Unknown
  Bacterial polypeptide expressing nucleotide sequence isolated from the Sargasso Sea
tcgtaatgctggagaaatgatagatagtttaactttaaaatataatagaacaagacaagcatttattactaaagaattaatagagattatttctggagcagaatcaatttaa

SEQ ID NO: 272162 - DNA, 157 bp, Unknown
  Bacterial polypeptide expressing nucleotide sequence isolated from the Sargasso Sea
atgcctagtcttgatgatttaagaaaaagaatttctagcgtaaaatcaacacagaagattacaaaggctatgaagatggtggccgcagcaaagcttcgtaaagcacaagaaatggctgaaaaatggaagaccactatagtgataaaatggatgtgat

SEQ ID NO: 272163 - DNA, 250 bp, Unknown
  Bacterial polypeptide expressing nucleotide sequence isolated from the Sargasso Sea
tatgcctagtttagatgatttaaaaaaaagaatttctagcgttaagtccacgcaaaaaataactaaagctatgaaaatggtggcagctgctaaattaaggcgagctcaagaaagcgcagagaaaggaagacctttttcggaaaaaatgaacaatataattcttaacctaagtagttcagtttcggataaagaaagtgcttcaaaatttttaattggaactggcaatgataatattcatttatgtgtagta

SEQ ID NO: 272164 - DNA, 280 bp, Unknown
  Bacterial polypeptide expressing nucleotide sequence isolated from the Sargasso Sea
aatggctaccatccatgtcgacattgtttccgcagaaggcgaaatccattcaggcgacgccgctatggtatttgcgccggcgaaaatgggcgagatcggtatcgcaccgcgtcatgcgcccctgcttacggccctgaaaccgggcgaggttcgcgttgaggacacggaaggcaaggaacacttcttctacatcacgggcggcatgatcgaagtgcagccgcatctcgtgaccgttcttgcggacaccgcgctgcgaggggatcaactcgacgaggccgca

SEQ ID NO: 272165 - DNA, 504 bp, Unknown
  Bacterial polypeptide expressing nucleotide sequence isolated from the Sargasso Sea
tagaccaaataaaaagggaatatgacaaatatataattaaaaaatttagcttcaaagataagaagcaaatttcatttaaagaggcagaaataattagtaaagaaataattgatttatttaataaaaatgaatttgataaatgtacattattttttaataattttaaaaatgtaattacgcaagttcctcaagctcaacaaattatacctgcagaacaaagcatctccgactccaaagataaaaataatttatcttatgaatttgagcctgaggaggatgagattttagaagacttacttcctaaaaatatatctacgcaagtttttaaagcatttttagaaaatgcagcaagcgaacaaggttctagaatgactgctatggataatgcaacaagaaacgctggagatttagtcgataagcttacaataaattataacagaagtagacaggcatctattacaaaggagttaattgaaataatatctggagcggaaagtttataat

SEQ ID NO: 272166 - DNA, 397 bp, Unknown
  Bacterial polypeptide expressing nucleotide sequence isolated from the Sargasso Sea
catggctttgttgcccttaccactcccgttcgctgaactggaagttggtcatcacctgtactggcagatcggcgatctgtatctgcacggccaggtgttcctgagctcctggatcctgatcggcatcctccttgctgtggtgcttgtcggcacccgcgggatgaagcgtgacccgatcggtctgcagaacctgctcgaattcctctggaacttcatccgcgacatcgcccgcgacaacatcggcgagaagtactaccgcgactggctgccgttcatcggcaccttgttcttgttcatcttcgtgagcaactggggcggagccctgattccctggaagatcttcgaactccccgagggtgagctcggcgctcccactgcagacatcaacaccaccgtg

SEQ ID NO: 272167 - DNA, 155 bp, Unknown
  Bacterial polypeptide expressing nucleotide sequence isolated from the Sargasso Sea
catggccggcgcaaaagagatacgtagtaagatcgcaagcgtccagaacacgcagaagatcactaaagcgatggagatggtcgccgcttccaaatgcgtaaatcgcaggatcgcatggcggccagccgtccttatgcagagaccatgcgcaaagt

SEQ ID NO: 272168 - DNA, 289 bp, Unknown
  Bacterial polypeptide expressing nucleotide sequence isolated from the Sargasso Sea
tctattaaagaaaataaagaaaatgatgaaaatttgtcgtacgaatttgagcccgaagaagacgaaattcttgaggatttacttccaaaaaatatatcaactcaagtatttaaagcttttttagaaaatgcagctagtgaacaaggttctagaatgacagcaatggataatgcaacaagaaatgctggtgatttagttgataaacttacaataaattataacagaagtaggcaagcgtctatcacaaaagagttgattgaaattatttctggagcagagagtttataat

SEQ ID NO: 272169 - DNA, 757 bp, Unknown
  Bacterial polypeptide expressing nucleotide sequence isolated from the Sargasso Sea
aagtctacacaaaaaatcacgaaagctatgaaaatggttgcggcagcaaaattaagaagagctcaagaaagcgctgagagagggagaccttattccgaaaaaatgaacaatattattttaaacttatctaatggtatatctgataaggaaaatgccctaaaattattatctgggacaggcgaaaataaagttcacctatgtgtagtaatgacatcagacagaggcctttgtggtggttttaattctaacataattaaaaaagcgaaaagttatttttcaaaaactttaaacgagggtaaacaattaaagattattactgtagggtcgaagggaaatgaccaactaaaaagagtttatggaggtaaaattattgaaaatatatcttttaaagaatctaaaaatgcaaattattttgatgccgataaagttggaaggatcataattgaaaaatttgaggctggtgagtttgatatatgtactattttttataatcaatttaaaaatgtaatcactcaaatacctcaagctcaacagattatacctttaaaaaataaagaagaggaaaataattctggtggaagttatgaatttgaaccagatgaagatgaaattttaagcaatttactaccaaaaaatatttcaacacaaatatttaaggcaatgttagagaattcagctagcgaacaagggtccagaatgagagcaatggacaatgctacccgtaacgcaggtgaaatggtgacaaacttactatcga

SEQ ID NO: 272170 - DNA, 349 bp, Unknown
  Bacterial polypeptide expressing nucleotide sequence isolated from the Sargasso Sea
ttttataatcagtttaaaaatgtaatcactcaaattcctcaagcacagcaaataatacctttaaataatgtggaagataaaaatagttcagatgaaagctatgaatttgagccagatgaagatgaaattttgagtaatttattaccaaaaaatatttcaacgcaaatatttagagcaatgctagaaaattcagctagtgaacaaggatcgagaatgagcgcaatggataacgcaactcgtaacgcaggagaaatggttgacaaactcactattgagtataatagaagtcgacaagctgcgatcactaaagaattaattgaaattatatcaggagcagaaagtttataat

SEQ ID NO: 272171 - DNA, 756 bp, Unknown
  Bacterial polypeptide expressing nucleotide sequence isolated from the Sargasso Sea
attcgatttctgctactttgccttattcaaataaattatctggattaatacaaaatatttccacttccggagaatcactagatagcccttttttcataaaaagagaaatcaagaaagtgttaattgttgcaatcacctctaataaagggctttgcggaggctttaactcaaatgtaattaaggaagttataaaacttttacagacggaatactcatctaaaaaagctgagattatttgtattggtaaaaaaggtggggatatcttatcaaaaaaaaacaatgtaattgaatcctttaattctgtttttgatgaattttcatatgataatgttaaacctatagcagagctatttatggaaaaattttctgatgaaagttatgatgaaattgtattggtttataatcactctaaaaatgcagctacccaaaccttaactgttgagccatatcttccaattgaagagaataaagatgaggagaaagctaccaataaaggtgattatatttttgaaccatcacaatcagagattttaaatgagttaatccctaaagcactaattgtgcaactttttaaagcaatttctgattctattgcaggagagcatggggcaagaatgactgcaatgcataaggcaacagataatgcttcagagttaagagatcaattaaagctaacatacaataaggcaaggcagactgctattactaatgaaatattagagattgtgggaggagctgaagcattaaattcataga

SEQ ID NO: 272172 - DNA, 217 bp, Unknown
  Bacterial polypeptide expressing nucleotide sequence isolated from the Sargasso Sea
ttttgatgctcttttacctctttatttacagaatcaattattacgtgcattacaggaatccgctgcttcagaattggcgagtagaatgactgcaatgaataatgctagtgataatgctaaggagttggctaaaaatcttactattgattataataaggctcgacaagcagcaattacgcaagaaattttagaagttgtcggtggagcttcagcatag

SEQ ID NO: 272173 - DNA, 97 bp, Unknown
  Bacterial polypeptide expressing nucleotide sequence isolated from the Sargasso Sea
gatggttgacaagcttactattcagtataatcgaagtcgtcaggcagcaattacaaaagaactaatagaaatcatatcaggagcagaaagtttataa

SEQ ID NO: 272174 - DNA, 218 bp, Unknown
  Bacterial polypeptide expressing nucleotide sequence isolated from the Sargasso Sea
tatggcaagtttagacgacttaaaaaaaagaatagctagcgtaaagtctacgcaaaaaattaccaaagctatgaaaatggttgcagcagctaagcttagaagagctcaagaaagtgctgaaaagggaaggccttattctgaaaaaatgaataatgttattttaaatttatcaaatggtatttctgataaagaaaatgcaccaaagttgttgtcaggaa

SEQ ID NO: 272175 - DNA, 165 bp, Unknown
  Bacterial polypeptide expressing nucleotide sequence isolated from the Sargasso Sea
tcaaattttaaaaactttgcaagacgctggagctatggactatactatcattgtttctgctactgcatctgacccagctccattacaatttttagcaccctatacaggttgtgcatttggagaattttttagagataatggtatgcacgcattaattatatatga

SEQ ID NO: 272176 - DNA, 169 bp, Unknown
  Bacterial polypeptide expressing nucleotide sequence isolated from the Sargasso Sea
aatggcaagtttagacgatttaaaaaaaagaatatcaagtgtaaaatctactcaaaagattacaaaggcaatgaaaatggttgcagcatctaaattaagaagggcacaagagaacgcattaaaaggaagaccgtattctgagaaaatgaataatatcatccttaatctt

SEQ ID NO: 272177 - DNA, 158 bp, Unknown
  Bacterial polypeptide expressing nucleotide sequence isolated from the Sargasso Sea
agctagcgagcaaggttcaagaatgagtgcaatgataaatgcaacagaaaacgcaggtgaaatggttgacaaacttactattgagtataatagaagtcgtcaggcagcaattactaaagagttaatagaaataatttcaggagcagaaagtttataat

SEQ ID NO: 272178 - DNA, 257 bp, Unknown
  Bacterial polypeptide expressing nucleotide sequence isolated from the Sargasso Sea
aatgccaagtttagatgatctaagaaaaagaattgctagcgttaaatctacccaaaaaattacaaaagcaatgaaaatggtggctgctgctaaattacgtaaagctcaggaaatggctgaaaagggaagaccttatagtgataaaatggatgtaataattcaaaatttaagcaaagcaatcaatgatccgtctaacgcaccaaaacttttagtcggaacaggagaagacaaaatacatctatgcgttgttatgacag

SEQ ID NO: 272179 - DNA, 845 bp, Unknown
  Bacterial polypeptide expressing nucleotide sequence isolated from the Sargasso Sea
attctgggccgtgcgttttcgggcacaggccggacgatcgataccggccctgcgttaacggaagagccaaaaattgagattgatgggccaacggttaatcctgcgcgacgcgtattagcgtcacatatgattcgtaccgacgtgccgatgatcgatgtatttaactgtttagttgaaagtcagaagatccctattttttcggtagcgggtgaaccttataaccaactgttagcgcaaatcggcacccatgctgatgctgatatcgttgtgtttggcggtattggtttaatctttgacgattattactactttcgccaagcctttgaagaagcgggggtgcatgcgcgcacggtcatgtttgtgcaccaagggtcggaccctaccgttgaggcgttgcttgtccctgatatggcgttagcggtagcggagcgctttgccgttgaagagggtaaacgggtactggtcttactgacggatatgaccgcttatgccgatgcattaaaagaggtgggcatctctatggagcatgtgccttctaaccgtggttatattggtgatctttactcacagctcgcgcgtcgttatgagaaagcatgtgattataaaggtgcaggctctgtgacaatcttatcggtaacaacgatgcccggtgatgatgtgactcaccctgtgcctgataacaccggttatataacggaaggtcagctctatttacataatggggtgattgatccatttggctccttatcacgcttaaaacagcacgttatcggcaaagtgacccgtgaagaccacagtcagattatgaatacgatggtgcgtttttatgccgaggccaaagacgc

SEQ ID NO: 272180 - DNA, 245 bp, Unknown
  Bacterial polypeptide expressing nucleotide sequence isolated from the Sargasso Sea
ctttgaacctaatgaagaagtacttctaaatgacataatacccaagaatattgcaatccaaatacattccgcccttttagaaaatatggctagtgagcaagggtctagaatgactgcgatggataatgctaccaggaatgcaaatgatatgattgatggactaactctattttataatagatctagacaagccttaatcacgaaagaacttatagaaataatttcaggcgcagaagccgtttaat

SEQ ID NO: 272181 - DNA, 599 bp, Unknown
  Bacterial polypeptide expressing nucleotide sequence isolated from the Sargasso Sea
gatgtcgacgacgaaccgcctgaacgtggtccccacggtgacggtgctcgcggtggtgaagaaccggctctccggggcgcagaaggggtacaagctcctgaagaagaaggcggacgccctgaccatgcgctaccgccagatcctcgctaagatcgtcgcggcgaagcgcgagatgggcacggcgatgcgcgcctcggcgttcgcgctgacggaggcgaagtacgtcgccggcgagggcatcaagcacacggtcctcgacggcgtcgaccgcgcgaacgtgcgcgtgcgcgccaagacggacaacgtcgccggggtgaagctgccccggttcgagcaccacctcgagggcgccgacggcggccgcgccgacatgaccggcctcggcggcggcgggaagcagctccagaactgtaagcgcgcgtacctgggcgcggtgaagctgctggtggagctcgcgagcctccagacggcgttcatcaccctggacctcgcgatcaagaccacgaaccgaagggtcaacgcgttggagaacgtcgtcacgccgaggctggaaaacaccgtcgcgtacatcaagggcgagctcgacgagttggagcgcg

SEQ ID NO: 272182 - DNA, 403 bp, Unknown
  Bacterial polypeptide expressing nucleotide sequence isolated from the Sargasso Sea
aatggaaataaatccgtcagaagtaacaaagatattaaaagagcaaattaagaaatttggagataaggctgaagtaactgaagtaggtcaggttttatcagtaggagatggtattgcaagaatttatggtttagataatgttcaagctggtgaaatggtagaattttctgatggttcaaaaggaatggcattaaatttagaaagtgaaaacgtaggtgtcgttatttttggtgacgataaatcagtaagagaaggcgatactgtaaaaagaacaggtgcgattgttgatactccagttggtaaggaattgcttggtagagtagttgatggtttaggaaatccaattgatgggaaaggcgcactggataaaagtgtaaagagaagtagggttgaagttaaagcg

SEQ ID NO: 272183 - DNA, 524 bp, Unknown
  Bacterial polypeptide expressing nucleotide sequence isolated from the Sargasso Sea
gggtgtgaacatggagactgcgcgcttcttccgcaatgacttcgaggagaacgggtccatggagaacgtcgtgctgtacttgaacttggcgaacgatccgactatcgagcgtatcgtgacgccgcgccttgccttgacggccgctgagtccgctcagctgaggattcttcagcaaaagtctggtgtccgggcaaggtttcggaatgtttttggtttgtttttggcggccgtgcattgtgaattgtgcactcatttattctgcgccacgatcgcaattgcatgcgattttccaaggttgcaggttcagattcggaatcgcaggacgcgcaaaagcatgacgctgagagcaaggtacttcgcgtacacgctggagcagcacgtgttctgcatcctgacggacatgtctgcctacgctgatgcccttcgtgaggtgtcggccgcccgtgaggaggtgcgacttcttttgatgcagttcctcgtaggtgttcctgaagtatttgcaggggttcagacagaaatttgaa

SEQ ID NO: 272184 - DNA, 274 bp, Unknown
  Bacterial polypeptide expressing nucleotide sequence isolated from the Sargasso Sea
gaaaatgccaaagaaggttcaatttatgattatgaaccggagcaggttgaaattttggaagagttactgccgaggtcgatcgccacacagattttttcggctcttttggagaatgctgcctcagaacagggggcaaggatgtctgctatggacaatgctactcggaatgctggagagatgatagacaagctgaccattcaatataaccgatctcggcaagctgctattacaaatgaacttattgagattatttctggcgctgaggcgttgtgat

SEQ ID NO: 272185 - DNA, 149 bp, Unknown
  Bacterial polypeptide expressing nucleotide sequence isolated from the Sargasso Sea
acaaggttcaagaatgacagcaatggataacgcaacacgaaatgcaggtgaaatggttgataaacttactattcagtacaatagaagccgtcaagctgcaattactaaagaattaatcgaaatcatatcaggagcagaaagtttataat

SEQ ID NO: 272186 - DNA, 259 bp, Unknown
  Bacterial polypeptide expressing nucleotide sequence isolated from the Sargasso Sea
atgccaagtttagatgatctaaaaaaaagaataaaaagcgtaaaatctactcaaaaaattacaaaagctatgaaaatggttgctgctgctaaattaagaaaagcacaagaaaatgctgaaaagggaagaccttatagtcaaaaaatgcaaaatataattttaaatttaactaaatctattaatgatcctcaaaacgctcctaaacttttagttggaacaggaaaagacaaaacttacttatgtgtggtactaaccgcag

SEQ ID NO: 272187 - DNA, 529 bp, Unknown
  Bacterial polypeptide expressing nucleotide sequence isolated from the Sargasso Sea
aaaaagcagagatttttttaaaagaataatgagtgataaaatcatggaaagttatgtagacatgagcattagaggaataacttattcttcagcatttacaatttctaaaaatattcaaaaattatatagtgaagaaaaatttgatgtttgcataataatatataataaatttaaatcagctatcacacaagaagtgacaaaaaaacaattaataccattaaaaattgagaaacaaaataatgatgaagaaaatgatcaaaaaaaatcaaattctatttataagtatgaaccagatgaaaaggaaattttaacagatttattaccaaaaaatatttcagttcaaatatttaaaattttattagaaagtgatgctggcgaacaaggagctagaatggcagccatggataatgcaacacgtaatgcaggagaaatgattgataatttaactttaaaatacaatagaactcgtcaagcatttataactaaagaattaatagaaataatttcaggagcagaatcaatacaatag

SEQ ID NO: 272188 - DNA, 922 bp, Unknown
  Bacterial polypeptide expressing nucleotide sequence isolated from the Sargasso Sea
caacatgaagctgaagaacgctttttatcgcagcccgacaaacatccgcaccgcatggtgcattacgggcattatgtgtttcgtacgccaaccccgcttagcgtaatagaaccgggtgtagacacgtacacaggtaacgctattttcttggaaggccacaggcaaaacagtgccatgtttgccgagcagcgtcagtctgcagggctcacccgctttagtagcttaacgccaagctttttggcgttagtgttggcaccactgtttatcattcttattggctacggcagtgtttcacgggaacgtgaagcaggcacactcactctattacttacccaaggcgctagccgttggcagttggtgttgggaaaactggtggccttaatgctggctagcggtatttttttactgcccttgttattagcttgcgtgtatgtcgccttttccaatgaaagcgccttagtggtaacccttttttgtttaggttacatgctttacttcatgttgtgggctgtggtggttaccgcctgctctacgttatttgaaaaaagcagtgccagttttaccgtgcttatcgtgatatggatgagcgcttgcatattgttacctagaatgggcagcagtgtggcgaccagtatagagccctctatcggtaagttagaagccgactttaaagtagaagaaaagcttcgcagcttaggcgatggtcacgatgttaacgatccggcatttgttaagcttaaacaagaccttctcgagaaatacaatgtcgattcggtagacgaccttcctgtgaattttcgaggcatagtggcgcaatattcagagcagcgccaagcggtagtcattaatgaatttgcagaaagccgcatgcaagaagaactagcccaagcgcatattgcaaggaaatttggttggctttccc

SEQ ID NO: 272189 - DNA, 703 bp, Unknown
  Bacterial polypeptide expressing nucleotide sequence isolated from the Sargasso Sea
acacagaattggtccagaaattaaattaggtgttatagatatatcatttaccaatgctagtttattcatggtaattagttcaattgcaatactagtaatattcaatttaggatcaaaaaaaaattctttagtaccaagcaaaattcagttacttgctgaattaagttattcttttgtttcaaaaatgattagtgatactgctgggtcaaaagcaaaaccatactttgcatttatattttcgttatttatgtttgtattattttgtaacatgtttggtatgattccatattctttcactgttacaagtcacatcattgtaacttttgtattagcagcattcatatttattggggtaacaattattggattcattaaacatgggttggggtatcttaagctttttgttccaagtggagttcctatgattttattaccacttatagtagtaatcgaaattatttcttatttaagtagaccaataagtttatcagtaagattgtttgcaaatatgatggctggtcatacaatgatgaaagtattcggcggctttgttgtaagcctaggaataattggtggatggcttccactaagtttttcggttgcattaactggtttggagatattagttgcttttctccaagcatatgtttttgcaatattaacgtgcatctatttaaatgatgcactaaatttacaccattaa

SEQ ID NO: 272190 - DNA, 293 bp, Unknown
  Bacterial polypeptide expressing nucleotide sequence isolated from the Sargasso Sea
tttgaaatttaatgaagaaaaagaggccaattctgacagtagttatgaatttgacccagaagaagatgaaattttaagtaatttattacctaaaaatatttctacacagatttttaaagcaatgttagagaattcagctagcgagcaaggttcgaggatgagcgcaatggataatgcaacaagaaatgcaggtgaaatggtggacaaacttacaattcagtataatagaagtcgtcaagctgcaattactaaagaattaatcgaaataatatcaggagcagaaagtttataat

SEQ ID NO: 272191 - DNA, 155 bp, Unknown
  Bacterial polypeptide expressing nucleotide sequence isolated from the Sargasso Sea
aagcgaacaaggatcaagaatgacggcgatggacaatgcaacaagaaatgcaggagaattagtcgataaattaacaatcaattataacagaagcagacaagcttcgattacaaaagaattaatagaaattatatctggagctgaaagtttataat

SEQ ID NO: 272192 - DNA, 178 bp, Unknown
  Bacterial polypeptide expressing nucleotide sequence isolated from the Sargasso Sea
atggctagtttagacgatttaaaaaaaagaatatcaagtgttaagtccactcaaaagattacaaaggctatgaaaatggttgctgcatctaaattaagaagagctcaagaaagtgcagaaaaaggaagaccatattctgaaaaaatgaacaacattatccttaatctttcaaaatagt

SEQ ID NO: 272193 - DNA, 261 bp, Unknown
  Bacterial polypeptide expressing nucleotide sequence isolated from the Sargasso Sea
aatgccaagccttgatgatttaagaaaaagaatttccagcgtaaaatccacacagaaaataacaaaagcaatgaaaatggtagctgcagctaaactaagaaaagcacaagagatggcagaaaaaggtaggccttacagtgataaaatggagataattattcaaaatttaagtaaatctataagcgacccccaaaatgcacctaagcttcttattggcactggagaagacaaaacccatttatgcgttgtaatgacagcgga

SEQ ID NO: 272194 - DNA, 565 bp, Unknown
  Bacterial polypeptide expressing nucleotide sequence isolated from the Sargasso Sea
tatttttggaaaagtattaggagaaggtaaaacgctaaaaattattactgtaggatcaaaaggatacgatcaattaaaaagattatatagtgataaaattgttgaaaaaatatcttttaaagagtcaaaaaatgcaaattattttgatgcagaaaaagttggaaaaataataattgaaagttttttaaaaaaagaatttgatgtatgtacgattttttataataaatttaaaaatgtgataacccaaatacctcaagaacaacaaataattcctttaaaatcatctgagtcagaaggttctacttcagaagataattatgaatttgaaccagaggaagatgaaatattgagtaatttattaccaaaaaatatttcgactcaaatttttaaagcgatgttagagaattcagctagtgaacaaggttcaagaatgagtgcaatggataatgcaactagaaatgctggtgaaatggttgaaaaacttactattcagtataatagaagtcgacaagcagcaattactaaagaattaattgaaattatatcaggagcggaaagtttataa

SEQ ID NO: 272195 - DNA, 847 bp, Unknown
  Bacterial polypeptide expressing nucleotide sequence isolated from the Sargasso Sea
atgcccaatcttaaagaccttaaaatccggatcgacagcgtcagatcgacgcagaagatcacgtccgccatgaaaatggtagccgccgccaagctgcgccgagcgcaagaagcggccgaggccgcccggccctatgcgatccgcatggaacgcatgctgggttctttggcgcaaagtgtcggcggcaccgagggagcgccacagctcctggccggcaccggcacgagcgaaactcacctcctggtggccttcacggcggaccgtggtctttgcggtggtttcaacggctccatcgtccgccaggttagaagcatgatcatagatctgaaggctgccggcaagactgtaaaagtcttctgcgtcggccgcaaaggccacgacgtcttgaaacgggagtttcccgccgagattattgagaacagagaaggccttggccgccgcgggattgagtatcacgaggcagcgggcgtcgccaatactatcactgagtttttcgaagccggcaaattcgacgtatgcacaattgtattcaaccggttccattctgcgatgacgcagattgtaacgccgcagcagctaattcccttcgagcccgccaatagcgttgacgaggaggaggagacgccaaccaatgaaggcccaaaagctgtttatgttttcgagccggaagaggctgaaatcctggctgatctgcttccgcgcaatctagcggtgcagattttccaagccctgttagagagctctgcctctgaacacggtgcgcggatgaccgccatggacaacgcaacccgcaacgcgggagaaatgattgatggcctgacactgacctataaccgaacacgtcagg

SEQ ID NO: 272196 - DNA, 208 bp, Unknown
  Bacterial polypeptide expressing nucleotide sequence isolated from the Sargasso Sea
ttaccaaaaaatatttcgactcaagtttttaaggcctttctcgaaaatgctgctagtgaacaaggatcaagaatgaccgcaatggataatgctacaagaaatgcaggtgatttagttgacaagcttactataaattataatcgaagtagacaagcttcaataacaaaagaattaatagaaattatatcaggagcagaaagtttataga

SEQ ID NO: 272197 - DNA, 661 bp, Unknown
  Bacterial polypeptide expressing nucleotide sequence isolated from the Sargasso Sea
tttggataacccgactaaatatctaattatcgttgcaacggctgagcgaggcttgtgcgggggttttaattctgcgatagtaaaactagctcgattgagaatatctgctctgttaaaagagaataaaaatgtaaaaatattgactattggaaagaagggtagagagcaactaaaaagggattatggaagtttatttgtagaacacgtcgacctcagttcagagaaaagtctgacatttgaaattgcaaaaaaaatagcagcaggtattattacaaagttccatggtgacgactttgaaatcgcagaaatattttacaatagatttgagtcagtcatttctcaaattcccagttctttccaaattttgcctgtagaggtttctcaacaaaattcagagcacgataatacaaattttgaatttgaaccagatgaagaagagatacttaatgaattaatacctaaaagtatcgcaacatctattttttcagtcctacaggaaaacgctgcatcagagcagggatcaaggatggctgcgatggataatgctacccgaaatgctggtgaaatgatcgataagctaactatcgattacaatagatcaaggcaagcggctattactaacgagttaattgaaataatttccggtgctgaagcactttaa

SEQ ID NO: 272198 - DNA, 688 bp, Unknown
  Bacterial polypeptide expressing nucleotide sequence isolated from the Sargasso Sea
ttatgcgggtggttacaatacaaatattataaaaaaggtagaaataaggtacgcagaattagttaaaaaagggtatcagccaagcttaattttggtagggaagaaagctattggatattttcaaaatagaaaggacagatatgtaattaaaagtactttcaaagaactagaacaggtacccacagtcaaggattctgaaggagttacaaatgagattttagccgaatttctttcagaaaattctgatagggtggaaattatttacacgaaattcatcactttagttagctgtgcccctgtggttcaaacactattgccacttgaccctcaaggaattgctgaggaaaacgatgaaatttttaggttgactacaaaagatagtaagttacttgttgaaaaatcaaatattgaaaaaagtgattcagagaagttgccatcagatattgtttttgaacaaagtcctgatcaactattagattccctattaccactatatttacagaatcaagtactaagagctcttcaagagtcggcagcttcagaactcgcttgcaggatgactgctatgaataatgcaagtgataatgctaaagaattagcaagtactttgaatttaacctataacaaagccagacaagcagctattacacaagaaatattagaagttgtaggaggttcagcggtttag

SEQ ID NO: 272199 - DNA, 721 bp, Unknown
  Bacterial polypeptide expressing nucleotide sequence isolated from the Sargasso Sea
aatgtaccaattcaatgtatatcgaattggtcctgaaataaaattaggtcaaatagacatatctttcacaaatgctagtttatttatggtaattagctctttagcaattttaattatatttaacttgggagcgagtaaaaaaactcttatacccaataaaattcaattacttgctgaactaagttattcttttgtctcaaaaatgatcagtgatacagctggctctaaagctaaaccatatttttcatttatattctcattatttatgtttgttttgttttgtaacatgctcggcatgatcccgtactcattcacagtaacaagccatataattgttacttttgtattagcagcatttatatttgttggggttacaattattggatttattaaacatggattaggatatttaaaactttttgttccaagtggagttccaatggtacttctaccacttatagttgttatcgaaattatttcttatttaagtaggccaataagtttgtcggttagattatttgccaatatgatggctggccacactatgatgaaagtattcggaggttttgtattaagccttggaatagttggtggatggcttccactaagcttttcagttgcattaacaggtttagagatattagttgcttttcttcaagcttatgtttttgcaattttaacctgcatctatttaaatgatgcattaaatttacaccattaa

SEQ ID NO: 272200 - DNA, 220 bp, Unknown
  Bacterial polypeptide expressing nucleotide sequence isolated from the Sargasso Sea
ttattgaatttattgccaaaaaatatttcaactcaaatttttaaagcaatgttagaaaattctgctagtgaacaaggttcaagaatgagtgcaatggataatgcaacccgaaacgcaggcgaaatggttgacaaactaacaattgagtataatagaagtcgtcaggcggctattacgaaagaattaatcgaaataatttcaggagcggagagtttataat

SEQ ID NO: 272201 - DNA, 487 bp, Unknown
  Bacterial polypeptide expressing nucleotide sequence isolated from the Sargasso Sea
atggaaataaacccttcagaagttacaaaaatattaaaagaacaaatcaaaaattttggcgataaagcagaagtaactgaagttggccaagtactttctgttggagatggtattgcaagaatttatggccttgacaatgttcaggctggtgagatggttgagttttcagatggctctaagggtatggcattaaacctagaaagtgaaaatgttggtgttgtaatttttggtgatgatagaaatattaaagaaggagatgttgttaagagaactggaaatattgtagatactccagttggaaaagaattattaggaagagttgtagatggcctaggaaatcctattgatggaaagggcgcacttgataaaagtgttcaaaaaagtagggttgaagttaaagctccaggaattattccaagacaatcagttagtgaaccaatgcaaacaggtttaaaatcaatcgatagtttggttccagttggaagag

SEQ ID NO: 272202 - DNA, 394 bp, Unknown
  Bacterial polypeptide expressing nucleotide sequence isolated from the Sargasso Sea
atggaaataaatccttctgaagtaacaaaaatattaaaagagcaaattaaaaaatttggggataaggcagaagtaacagaagttggacaggttctatctgttggtgatggtattgcaagaatatacggtttagataacgtacaggcaggagagatggttgagtttgctgatggttcaaaaggtatggctttaaacctagaaagtgacaatgttggtgttgtaatttttggcgatgatagagctgtaaaggaaggtgatacagtaaaaagaactggagcaattgtagatactcctgtgggaaaagaattattaggaagagtagttgatggattaggaaatccaatagatggcaaaggtgcactagacaaaggaataaaaagaagcagagtgaagt

SEQ ID NO: 272203 - DNA, 97 bp, Unknown
  Bacterial polypeptide expressing nucleotide sequence isolated from the Sargasso Sea
atggttgacaaacttactattgagtataatagaagtcgtcaggcagcaattactaaagagttaatagaaataatttcaggagcagaaagtttataat

SEQ ID NO: 272204 - DNA, 494 bp, Unknown
  Bacterial polypeptide expressing nucleotide sequence isolated from the Sargasso Sea
aatgggcagtggaaaagtcgtatcggttattggcgccgtcatagatgttgaatttccgagagaagaagtaccgcaagtttacgatgctctaaaaattgaccagagcggcactacgcttgaggtccagcagcaattaggtgatggggttgtcagaacaattgcaatgggtgcatcagagggaatcgctagaggcattcccgtctcaaatacaaatgcccccatctcggtccctgttggggatcctactcttggaaggataatggatgttctggggaatcccattgacgagaagggacccattaacgaatcagaaagaatgccaattcacagagacccgccctcctttgaggagcaagcgggtggaagagatcttctggaaactggagtaaaggttatagatttgatatgcccttttgccaagggcggtaaagtaggtcttttcggcggaagcggtgtaggaaagacagtaactatgctcgaactgattaataaca

SEQ ID NO: 272205 - DNA, 763 bp, Unknown
  Bacterial polypeptide expressing nucleotide sequence isolated from the Sargasso Sea
atgcccaatcttaaagaccttaaaatccggatcgacagcgtcaaatcgacgcagaagatcacgtcggccatgaaaatggtagccgctgccaagctgcgccgtgcacaagaagcggccgagtctgcccggccctatgcggtcagaatggaacgtatgctgggttctctggcgcaaagcgtcggtggcaccgagggggcgccgaagctcctggccggcaccggcacgaacgaaactcacctcctggtggccttcacggcggaccgtggtctttgcggtggttttaacggctccatcgtgcgccaagtgcgaatcatgatcatggatctaaaggctgtcggcaagaccgtgaaagtcttctgcgtcggccgcaaaggccacgacctattaaaacgggagtttcccgccgagattattgaaaacaaggaaggccttggccgccgcgggattgagtatcacgaggcagcgggcgtcgccaataccatcaccgagtttttcgaagctggtgaatttgacgtctgcacaatcgtcttcaaccggttccattctgcgatgacgcagattgtaacgccgcagcaattaattcccttcgaccccaccaacaacattgacgcggaggaggagacgccaaccgatagcgacccaaaagcggtttatgtcttcgagccggaagaggatgaaatcttggctgatctgcttccgcgcaatctagcaattcagatcttccaagccctattagagagctctgcctccgaacacggtgcgc

SEQ ID NO: 272206 - DNA, 169 bp, Unknown
  Bacterial polypeptide expressing nucleotide sequence isolated from the Sargasso Sea
attggaaaacgcagcaagtgaacaaggttcaagaatgactgctatggataatgcaactagaaatgcaggagatttagttgacaagcttacaatcaattataacagaagccgacaggcatctattactaaagagttaattgaaattatatcaggagcggagagtttatag

SEQ ID NO: 272207 - DNA, 193 bp, Unknown
  Bacterial polypeptide expressing nucleotide sequence isolated from the Sargasso Sea
tatgaagaaaaatggaaaaataacgcaaattattggagctgttgttgatgtaaattttgaatctgatttaccagaaatttacactgcacttgaagcaagtaactcaggaaataaattaattttagaagtagctcaacatttgggcgagaatgatgtgcgaactatagctatggacgctacggaaggtttaaaa

SEQ ID NO: 272208 - DNA, 262 bp, Unknown
  Bacterial polypeptide expressing nucleotide sequence isolated from the Sargasso Sea
aatggcaagtttagacgatttaaaaaaaagaatatcaagcgttaagtctacgcaaaagattacaaaagcaatgaaaatggttgctgcatctaaattaagaaaagctcaagaaagcgcagaaaaaggaagaccatactcagataaaatgaataatattattcttaatctttcaaaaagtatttcggataaagaaaattctcctaaactacttacaggttcaggcgatgataaagttcatttatgcattgttatgacttctgat

SEQ ID NO: 272209 - DNA, 205 bp, Unknown
  Bacterial polypeptide expressing nucleotide sequence isolated from the Sargasso Sea
tacgaaacctttatcactatctttcacgctatttggaaatattttggctgatgaacttgttgttggtgttctagtctttttacttccgctaattctcccaatacctgttatgttcctaggattatttactagtgcaattcacgcattgatttttgcaactctagcgccctactacattggagaagctgttgaagaacatcattag

SEQ ID NO: 272210 - DNA, 324 bp, Unknown
  Bacterial polypeptide expressing nucleotide sequence isolated from the Sargasso Sea
ccaatgacggtcgtgtgaccgtggaacccggtgccggcgctgccaacaccgaacccaagatcgcttcggacatcgtgttcgagcagaccccggaccagctgctgaatgctctgcttccgctctatctgcagaaccagatgctgcgttcattgcaggaatctgcggcctctgaactggccagccggatgaccgccatgaacaacgcaagcgacaacgccaaggagttggccaaaaccctgacccttgactacaacaaggcccgccaggccgccattacccaggaaatcctggaagtggctggtggtgcagccgctgtgggttgat

SEQ ID NO: 272211 - DNA, 198 bp, Unknown
  Bacterial polypeptide expressing nucleotide sequence isolated from the Sargasso Sea
tctcgcagccgttccacgttgccgaggtcttcaccggatcaccgggcaagctggtcggtctcgaagacacgatcgagggcttctcgggaatcatcaatggtgattacgaccatcttccggaagccgccttctacatggtcggcaccatcgaagaggccgtcgagaagggcaagaagctgatgcaggaggccgcgtaag

SEQ ID NO: 272212 - DNA, 165 bp, Unknown
  Bacterial polypeptide expressing nucleotide sequence isolated from the Sargasso Sea
agaattcagctagcgaacaaggttcaagaatgagcgcaatggataatgcaactagaaacgcaggtgaaatggttgacaaacttactattcaatataatagaagtcgtcaagcagcaattacaaaagaactaattgaaattatatcaggagcagaaagtttataat

SEQ ID NO: 272213 - DNA, 151 bp, Unknown
  Bacterial polypeptide expressing nucleotide sequence isolated from the Sargasso Sea
gaacaaggttcaagaatgagtgcaatggataatgcaaccagaaacgcaggtgaaatggttgataagcttactattcagtacaatagaagccgtcaagcagcgataactaaagaactaattgaaatcatatcaggagcagaaagtttataat

SEQ ID NO: 272214 - DNA, 835 bp, Unknown
  Bacterial polypeptide expressing nucleotide sequence isolated from the Sargasso Sea
atggcaaacttaaaagatataaggaataaaattaagtctgttaaaagtatacagcaagttactaaagctatgaaaatggttgcggcagcgaaactgagaaaatctcaagaaaatatggaaaaatcaaggccgtattctgggtcaatcaaagatactattaattctattctaccagacattaatcgtagtttattacctattttagataataggccaattcaaaagtctttatttgtagcaatttctgctgatagaggtatggcaggaggatttaatgctaacgtaattaaaaagactgaaaaaaagattagtgagtttggaaaaaataaatctgaattaatttgtattggaaagaaagcatatgaccactttaaaactcgtgattataatattgttaaatactatatagatttttggaatgagttaaaatttaattccgcaaaatcaattggagatgatattgtagaaagatatagaaataaggaaattgattctgtacattttatttataatgaatttaaaagtgttgcttcgcagattatacgatcagaacaattatttccgctagaatatcacatatcagataatgaagcccctattattaataaagattttatgccatctaaggatgaaattgtaagaacattaattccaaaatatattaatgtgcaaatatggcaatattttttagaatcaaatgcatctgagcaggcagcaagaatgttagcgatggagaatgctactgaaaatgcaggagaaatgatatcagatttaagtttagaatataataaagctagacaggctgcaataacaacagagataatgaaattgtaag

SEQ ID NO: 272215 - DNA, 378 bp, Unknown
  Bacterial polypeptide expressing nucleotide sequence isolated from the Sargasso Sea
cagaggagtttgatatttgtgttattttttacaatcaatttaagaatgtgataactcaaattcctaaagctcaacaaataattcccttgaatgtaaaaaattctgagagagataaatctgaggacagttatgaatttgaacctgatgaggatgaaattttgaacaatttattacctaaaaatatatctacacaaatattcaaagcaatgttagaaaacgtagctagtgaacagggttccagaatgagcgcaatggataatgcaacccgaaatgcaggtgaaatggttgataagcttactattgagtataatagaagccgtcaagccgcaattactaaagaactaatagaaattatatcaggagcagaaagtttataat

SEQ ID NO: 272216 - DNA, 625 bp, Unknown
  Bacterial polypeptide expressing nucleotide sequence isolated from the Sargasso Sea
aaacaagggtatcagccaaatttaattttggtagggaagaaagctattggatattttcaaaatagaaaggatagatatgtaattaaaagtactttcaaagaactagaacaggtacccacagtcaaggactcagaaggagttacaaatgaaattttagctgaatttctttcggaaaattctgatagggtggaaattatttacacgaaattcatcactctagttagctgcgcccctgtagttcaaacactactgccacttgaccctcaaggaattgctgaggaaaacgatgaaatttttaggttgactacaaaagatagtaagttacgtgttgaaaaatcaaatattgaaaaaagtgattcagagaagttgccatcagatattgtttttgaacaaagtcctgatcaactattagattcgctattacccttatatctacagaatcaggtactaagagctcttcaagagtccgcagcttcagaacttgcctgtaggatgacggcgatgaataatgctagtgataatgctaaagaattagcaagtactttgaatctaacctataacaaagccagacaagcagctattactcaagaaatattagaagttgtaggaggttcagcagtttagc

SEQ ID NO: 272217 - DNA, 469 bp, Unknown
  Bacterial polypeptide expressing nucleotide sequence isolated from the Sargasso Sea
ttaaaaaatatagttttaaagaaaaaaaaacagataacttttaatgaggcaaatattgtaggaagtgaaattatatctttattcaatcaaggtgaatttgataaatgtattttgttttataataattttaaaaacgtaattactcaaattccccaagctcaacagataattcctgcagaaataaacaaaaattataatgacgataaaaatagtttttcgtatgattttgaacctgaggaggatgaaattttagaagatttattgccaaaaaacatttctactcaagttttcaaagccttacttgaaaatgctgcaagcgaacaaggatctagaatgacagctatggataacgcaacaagaaatgcgggagaattagttgataagttaacaattaattataatagaagtcgacaagcatcaattacaaaagaattaattgaaattatttcaggagcggagagtttataaa

SEQ ID NO: 272218 - DNA, 196 bp, Unknown
  Bacterial polypeptide expressing nucleotide sequence isolated from the Sargasso Sea
atggcaagtttagacgatctcaaaaaaagaatatcaagcgttaaatccactcaaaagattactaaagctatgaaaatggttgcagcagctaaacttaaaagagcacaagaaagtgctgagaaaggcagaccatactcacaaaaaatgaataatgtgattcttaatttatctagcggcatatcagataaagaaaatg

SEQ ID NO: 272219 - DNA, 222 bp, Unknown
  Bacterial polypeptide expressing nucleotide sequence isolated from the Sargasso Sea
tatggctagtttagacgatttaaaaaaaagaataacaagtgtaaaatctacacaaaaaattacaaaagcaatgaaaatggttgcagctgcaaaacttagaaaagctcaagaaagtgctgaaaaaggaaggccttactctgataagatgcataatataatcttaaatttatctaagaatataaatgataaggaaaatgcaccaaagcttttaactggctcatg

SEQ ID NO: 272220 - DNA, 760 bp, Unknown
  Bacterial polypeptide expressing nucleotide sequence isolated from the Sargasso Sea
acagaatcagatgaccaaagcaagaccgtacgcagataaaatattaaatgttataaagcatttagcacacgctcatcctgagtatacttccgagttttttgctcagagagatgtatcaaagaagggttacatcataatatcctcagatagaggactttgcggaggtttaaataataacttatttaaacttgttgttgaaaatattgaaaaggatagcagttcaagcataaagcctgccttctccctgataggaggaaaagcctcatctttttttcaaaggatgggaggagatgtgatagctcaaacgtcgcaacttggcgacaaacccaaaatagagcaggtgcttgggttaataaaaaatactatcgacagttttattagcaaagatatagatgaagtttatattgtctataacaaattcatcaacactgtcagtcaagaacctatagtgcaaaaagtactacctatacaaacagaagataaaaatgaggagtatgattattattgggactatttatatgaaccagatgctgaagcagtgctagagtcactatttacaagatatattgagtctctaatttacagaggacttgttgaaaacttagcatgtgagcaagcttcaagaatggtagcaatgaaagcagcttcagataatgcttcagatctaatatcagaattacaattaatttataataaaaatagacaagctgctattacacaagaaatttcagagattatctctggtgcagcagcgctttaa

SEQ ID NO: 272221 - DNA, 559 bp, Unknown
  Bacterial polypeptide expressing nucleotide sequence isolated from the Sargasso Sea
tcaattattagccgagttaagttattcatttgtctccaaaatgataaatgatacggctggtacaaaagctaaaccttatttctcatttatattttcgttgtttatgtttgttttgttttgcaacatgttagggatgataccttattcttttactgtaactagtcatataatagttacgttcgtacttgcggcatttatttttataggagtaacaattattggttttataaaacatgggtttggatacttgaaattattcgtaccaagcggagttccaattgttttacttccacttattgttgtaattgaaattatttcttatttgagcagaccaattagtctatctgtaagactatttgctaacatgatggcaggtcatacaatgatgaaggtatttggaggttttgtggtcagcttgggaatagttggggggtggttaccgcttagcttttcagtagcattaacaggtttggaaattctagttgcatttttacaagcttatgtttttgcaattttaacatgcatttatttaaatgatgcattaaatttacaccattaa

SEQ ID NO: 272222 - DNA, 433 bp, Unknown
  Bacterial polypeptide expressing nucleotide sequence isolated from the Sargasso Sea
acatttaccgaagctgaaacaataggaaatgaaatcataaatctatttaagcaagatcaatttgataaatgtattcttttctttaataattttaaaaatgtaattacgcagattcctcaagctcaacaaattattcctgcagaaaacaacccatcaaaagaagaagaagaaaatcttattttttatgaatttgaacctgaggaagatgagatactggaggatttgttacctaaaaatatatctactcaagtttttaaagcttttttagaaaatgcagcaagtgaacaaggatcaagaatgacagcgatggataatgcaacaagaaatgcaggagaattagtcgataaactaacaattaattataacagaagcagacaagcttccattacaaaagaattaatagaaattatatctggagctgaaagtttataat

SEQ ID NO: 272223 - DNA, 361 bp, Unknown
  Bacterial polypeptide expressing nucleotide sequence isolated from the Sargasso Sea
atgcacaattttttataatcaatttaaaaatgtgattactcaaatacctcaagagcaacaaattatacctttaaacacatctgaaaaagaggagaattcacaagaagacaattatgaattcgagcccgaagaagatgaaatattgagcaatttgcttcctaaaaatatttctacacagatttttaaagcgatgttagaaaattcagctagcgaacaaggttcaagaatgagtgcaatggataatgcaaccagaaacgcaggtgaaatggttgacaaacttactattgagtataatagaagtcgtcaagcagcaattacaaaagagttaatagaaataatttcaggagcagaaagtttataa

SEQ ID NO: 272224 - DNA, 185 bp, Unknown
  Bacterial polypeptide expressing nucleotide sequence isolated from the Sargasso Sea
aatttttaaagcgatgttagagaattcagctagtgaacaaggttcaagaatgagcgcaatggataatgcaactagaaatgctggtgaaatggttgaaaaacttactattcagtataatagaagtcgacaagcagcaattactaaagaattaattgaaattatatcaggagcggaaagtttataat

SEQ ID NO: 272225 - DNA, 584 bp, Unknown
  Bacterial polypeptide expressing nucleotide sequence isolated from the Sargasso Sea
ttgtaaattagcaaaaattcgttttgaaaaaattcttaaagaaggaaaaaaattaaagatcattactgtaggctcaaaaggactggaccagctaaaaagaatttatggaaaatatatagttgaaaaaattacttttaaggataaaaaaaagattacatttcaagaagcggagtatgttggaaaaaaaattttagaactatttgaaaaaaaagaatttgataaatgtatacttttttataacaattttaaaaatgtagttacacaaattcctcaggcacaacaaataatacctacagaaaaagcaaaaaactccaaagataatgatgataatttttatgaatttgagccagatgaagatgaaatacttgaggatttacttccaaaaaatatttcaacccaagtatttaaggcttttctagaaaatgcagctagcgagcaaggttcacgaatgacagcaatggataatgccacaaggaatgcaggtgaattagttgacaagcttacaattaattataacagaagcagacaagcagctattactaaggaactaatagaaataatttcgggagcggaaagtttataat

SEQ ID NO: 272226 - DNA, 244 bp, Unknown
  Bacterial polypeptide expressing nucleotide sequence isolated from the Sargasso Sea
atggtagcaacttcatcaacttcagcaccagcaaagggtgtagtacgtcaagtaattggtccagttttggatgtagaatttccggctgggaaattgccaaagattttaaatgctttacgaatcgaggctaaaaacccagcagggcaagacatagcgcttaccgcagaggttcagcagctgctaggagaccatagagtaagagcagtagcaatgagcggcacagacggccttgtgaggggcatgg

SEQ ID NO: 272227 - DNA, 619 bp, Unknown
  Bacterial polypeptide expressing nucleotide sequence isolated from the Sargasso Sea
tggtggatttaatagcagcataaatagagaaacttttaagttagttaaatcacttgaggggaatggaaaaaaaattcaactaatgccagttgggaaaaaaagtagagacttttttaatagagtaatgaaggatcaaattatagagagttttgttgatttaaatgtttcaagtactggttacgagtctgcattaaatatttctaataagcttcaagaattatactttgatggtaagtttgataaatgcatattagtttttaacaaatttaaatcagctatttcgcaagaagtaacacaacaacaattaataccattagacgtttcaaattctgaaaaggaagaagaaaaagaaagttcttcaaatgcaatttatgattatgagcctgatgaagaaacaattttaaaggatttgcttccaaaaaatgtttctattcaaatatttaaagtacttttagaaagtgatgcaggggagcagggggcaagaatggccgcaatggacaacgcaactcgaaacgcaggtgaaatgatagatagtttaacgttaaagtataatagaacgcgacaagcgttcattacaaaagaattaatagagattatttctggagctgaatcaatataa

SEQ ID NO: 272228 - DNA, 84 bp, Unknown
  Bacterial polypeptide expressing nucleotide sequence isolated from the Sargasso Sea
ctttaaatctaacttataataaagcaagacaggctgcaatcactcaggaaattttagaagtagtaggaggttcagctgtctaac

SEQ ID NO: 272229 - DNA, 415 bp, Unknown
  Bacterial polypeptide expressing nucleotide sequence isolated from the Sargasso Sea
gatgttgctaaaaaaataataaagctatttaatgattctcagtttgatgtctgcgctatattttataataaatttaaaaatattataactcaaattcctcaagctcaacaaattataccaattgaaagtttaaaaaagtctgaagaaaaaaaatccgaaagtttttatgagttcgagccagatgaagatgaaatattgaatgacttacttcctcgcaatatatcaactcaaattttcaaagcttttttagaaaatgctgcaagcgagcaaggttcaagaatgacggcaatggatagtgccacaagaaacgctggtgatttagttgataaattaactattaactacaatagaagcagacaagccgcaattaccaaagaattaattgaaattatttctggagcagaaagcttataat

SEQ ID NO: 272230 - DNA, 280 bp, Unknown
  Bacterial polypeptide expressing nucleotide sequence isolated from the Sargasso Sea
atggaaaaaattggaaaaattacacaggtaataggagcggtggttgatgttcaattcgaaggacatttgccagaaattttaacagctttagaagtaaataatagcggaagcaaacttatattagaagttgcgcaacatttaggagagagtagtgttagaactattgcaatggatagtacggaaggtttaaaaaggggcgatgcagcaaaagataccggatcgccaataacaattcctgttggtccagaaactttaggaagaattataaatgttgtgggcg

SEQ ID NO: 272231 - DNA, 196 bp, Unknown
  Bacterial polypeptide expressing nucleotide sequence isolated from the Sargasso Sea
gcgggagctgatcatcggcgaccggcagattggaaaaaccgccattgctgtggacgcaataatcaatcaaaaagacagcgggattaagtgtgtttatgtagcaatcggccagaagatgtcaacaatagctactattgtacgtactcttgatgagcatggcgcgttggacaacacgattattgtagcggcaagtgct

SEQ ID NO: 272232 - DNA, 334 bp, Unknown
  Bacterial polypeptide expressing nucleotide sequence isolated from the Sargasso Sea
accaccggtcagctcggcatcctgcctggccacatctctttgctcaccgctatcgatgtcggtgtgctgcgcgttcgcgccgatggcggttggaactccatcgccttgatgggcggctttgctgaagtggatgccgatgaagtcaccgtgctggtgaatcaagctgaactgggcagcaccatcgacggcaacgccgccgaggccgacttccagaaagccaccaccgtggtggatggcatggaaggccagccagcttcccctgaaaaagtcaaagctcagcaacagctgaacatggctcgtgcacgcatgcaggccagcaagtctgcagattgag

SEQ ID NO: 272233 - DNA, 276 bp, Unknown
  Bacterial polypeptide expressing nucleotide sequence isolated from the Sargasso Sea
tatggcaagtttagacgatcttaaaaaaagaatagctagtgtaaaatctacacagaaaattacaaaagctatgaagatggtagcagcggcaaagcttagaagagcccaggaaagtgctgagaagggaagaccttattcagaaaaaatgaatagtataattcttaatctttctagcggaatttccgataaagaaaatgctccaaaattattatctggatcaggtaatgataaagtgcacctttgtgttgtgatgacttctgatagaggtttatgtgg

SEQ ID NO: 272234 - DNA, 295 bp, Unknown
  Bacterial polypeptide expressing nucleotide sequence isolated from the Sargasso Sea
aatggcaagcttagacgatttaaaaaaaagaatatcgagtgtgaagtctactcaaaagattactaaagctatgaaaatggttgctgcagcaaaacttagaagggcccaagaaagcgccgaaaaaggaagaccttattccgagaaaatgaataacataatacttaatctttcaggtggaatttcagataaagaaaatgctccaaaattattatcggggacaggagaagacaaagttcatctttgtgttgttatgacttctgatagaggactttgtggtggatttattcaaatataa

SEQ ID NO: 272235 - DNA, 178 bp, Unknown
  Bacterial polypeptide expressing nucleotide sequence isolated from the Sargasso Sea
gcagaagttttcactggttcaccaggtaagtatgttgatcttgaagatactattaagagttttgatggactggtaaaaggagaatatgatcatatgccagaagcagcattttatatggtaggcggcatagatgaagcaattgaaaaagctaaaaaattagaagctgaagccgcataat

SEQ ID NO: 272236 - DNA, 551 bp, Unknown
  Bacterial polypeptide expressing nucleotide sequence isolated from the Sargasso Sea
tgcagaagatgaaaaagatttaaagatcattaccgtaggatctaaagtaaacgaccaacttaaaagagcttatggtgataagataattttaaatatttcatttaaagaatctaaatacgctaattattttgatgccgaaaaagttggcaaaatggtgattgaaaaatttggtgctgaagagtttgacgtttgtactattttttataaccaatttaaaaatgtaattacgcaaattcctcaagcacaacaaataattcctttaaatgttgaaaattcagtggaagataaatctgaggatagttatgagtttgaaccagatgaagatgaaattttaagcaatttattaccaaaaaatatttcaacacaaatatttaaggcaatgttagagaattcagctagtgaacagggctcaagaatgagtgcaatggataatgcaacccgaaacgcaggtgaaatggttgacaagcttactattgagtataatagaagtcgtcaggcagcaattactaaagaactaatagaaatcatatcaggagcagagagtttataat

SEQ ID NO: 272237 - DNA, 352 bp, Unknown
  Bacterial polypeptide expressing nucleotide sequence isolated from the Sargasso Sea
tatgagcaaaggaacaattacacaagttattggggcagtagtagacgtaaaatttcatggagatcttccagaaattttaacagctttagaatgtaaaaatggagacaacagactagttttagaggttgctcagcatttaggagaatctactgttagaactattgcaatggatgctactgaaggattaaaaagaggtgatgaggtgactaatactaaagcacctattcaagttcccgttggtcctgaaacattaggaagaattataaatgttataggggaaccgattgatgaaaaaggagaagttaaaactaaagaaacttggcctattcacagagctgcaccagaatttaat

SEQ ID NO: 272238 - DNA, 502 bp, Unknown
  Bacterial polypeptide expressing nucleotide sequence isolated from the Sargasso Sea
aggaatgttaaagatcatgatgaccatagttctgatcataaatctgatgagcacaagcataaatctgtagaaaaaggaaaacaggaaggacttttaattccatattttagaagtgccaatacagaccttaatactactttggctatagctattgttgctatggtattagttcacttttggggattttcaattttaggatttgggtcccatttgtctaaatttattaatttcaaatctggtccagttgggttttttgttggaatattagaaggtattagtgaatttgctaggataataagctttacatttaggctttttggaaatatatttgctggagaagttttattgtttgcaatggcttttttgttaccacttattgggataattccatttttaggattggaactttttgttgggttgatacaggctttaattttttctgtgcttacattggtttttgcgtctatggctactgtaagtcatggtgatgaaggccactgat

SEQ ID NO: 272239 - DNA, 232 bp, Unknown
  Bacterial polypeptide expressing nucleotide sequence isolated from the Sargasso Sea
gcgccagaggttttagatagattgttttcgagatacgtggagtcgcttgtgtaccagggggtcgtagaaaacatcgcgtgcgagcaagccgcgcggatggtggctatgaaggctgcgtccgataatgctggaaagctcattgatgagctacagcttgtttataataaagctaggcaggcagccataacccaggagctgtcagaaatagttggaggagcagcggctgtatagt

SEQ ID NO: 272240 - DNA, 458 bp, Unknown
  Bacterial polypeptide expressing nucleotide sequence isolated from the Sargasso Sea
aatgaattccggagaaattgtacaagtaattggcgctgttgttgacgttaaatttccaactgattcagtaccgaaaatttttgatgctcttaagttggagtcttccaatgttacattggaggtacaacagcaactaggagacgggatagttcgctcaattgcgctaggttccactgacggcctaaggcggggtataaccgttaacaataccagagagggcattaaagtccccgtgggtgaaaagactcttggtcggataatgaatgttctgggcgaccctatagatgaaaagggtccaataggggaagaggagcggatggtaatacacagagaggctcctaagttcgtagaattgtctgcggcaacagagttgctagagactgggattaaagtgatcgatttgatttgccctttcgcaaaaggtggaaaggttggtttgtttggaggggcaggcgttg

SEQ ID NO: 272241 - DNA, 565 bp, Unknown
  Bacterial polypeptide expressing nucleotide sequence isolated from the Sargasso Sea
aatgttcttaaactccttgccaacaaattttgccgcattagaagtaggtcaacatctttattggcaaattggaaatataagacttcacggacaagtttttttaacttcttggatcctattaggtgctttattagttttcatctctgtagggacaaaaaaaatggaaaatgatcctaagggattgcagaatttacttgaatttttatgggactacatcagagatcttgcaagaactcaaattggtgaaaaagtgtatagagattggatgccttttataggaactctattcttatttgtgtttgtaagtaattggggaggagcgcttataccttggagattaataaaattaccaagtggagaattaggagctccaacagctgacattaatacaacgattgcattggcattgttagtttctctatcctatttctatgctgggcttagtaataagggttggagatattttgaatattatgttcatccaacacctataatgttgccttttaagattctagaagactttactaaacctttatctttatcctttaggctttttggaaatatt

SEQ ID NO: 272242 - DNA, 129 bp, Unknown
  Bacterial polypeptide expressing nucleotide sequence isolated from the Sargasso Sea
tatggcaagtttagacgacctaaaaaaaagaatagctagtgtaaagtctacacagaaaattacaaaagctatgaaaatggttgctgcagctaagttaagaagagctcaagaaagtgctgagaagggaag

SEQ ID NO: 272243 - DNA, 232 bp, Unknown
  Bacterial polypeptide expressing nucleotide sequence isolated from the Sargasso Sea
atgaaaaaaggaaaaatcacacaggttattggagcagtagtagatgttaaatttgacggagaattacctgaaattttgacagccttggaatgtaaaaacggagacaacagattagttctagaagttgcacaacatttaggagagtcaagtgttagaactatagctatggatgctacagagggacttaaaagaggagatgaagtaaatgatactggagcacctataaaagtcc

SEQ ID NO: 272244 - DNA, 127 bp, Unknown
  Bacterial polypeptide expressing nucleotide sequence isolated from the Sargasso Sea
catggataatgcgacaaggaatgcaggtgatttggtagataaattaacaataacttataatagaagtagacaagcggcaattacaaaagaacttattgaaattatatctggagctgaaagtttgtag

SEQ ID NO: 272245 - DNA, 212 bp, Unknown
  Bacterial polypeptide expressing nucleotide sequence isolated from the Sargasso Sea
aatgtcaggcggaaaagaaataaaaggacaaatttctagtattaaaaatactcagaagataaccaaagccatggaaatggttgcagcaagcaaaatgaaaaaagctcagagccgtatggcagctgcacgtccttacgcaaaaatgataaaaaatgttgttggccatcttgcaagtgcacatccagagtataaacacccctttttaattgata

SEQ ID NO: 272246 - DNA, 421 bp, Unknown
  Bacterial polypeptide expressing nucleotide sequence isolated from the Sargasso Sea
tatggcaagtatgcagtgtgaaatcgttagtgctgaacagtcgttgttctctggcaccattacgatgttatcggcacgcggtaccattggtgagttaggggtaatgcctggccatgcacctctactaaccggcatccaacccggagcggttactctgcgtatggaagatggcacggaagaagtattctacgcgtctggtggtttcattgagattcagcctggctacgtgactctgctggcagacactgcaatccgcgcggaagatctggacgaagctcaagcagaagaggctcggcaacaggcccaacgcgaaatggcagagaaagccgcgggcgcggacttcggtatggccgcagcaatgatggctgaagcggtggcacaacagcgaaccttagatgagctgagaaagcgtcgtcgctaa

SEQ ID NO: 272247 - DNA, 432 bp, Unknown
  Bacterial polypeptide expressing nucleotide sequence isolated from the Sargasso Sea
cctaaaaaacaggattgaaagcgtaaaaaatacgcgaaaaattaccaaagccatgcaaatggttgcggctgccaagctgaggcgggcccaagacgctgctgaggcatcacggccttattctgagcggttcaacactgtgctggcttcattggcagcatcggtgggcagttcaaaaagtgcccctgttcttcttcggggaacgggtaaacaagatgttcaccttctagttgttatgaccgccgagcgtggcttatgtggaggttttaattcaaatatagcaaagctagctcggagccatgctgctaaactgaaagaagatggtaagcatgtaaaagttattacggttggcaagaagggcagagatgcccttaaaagagatttgggcgagcattttgtcgaacatgtagatttaagtgaatttaaatcgataaa

SEQ ID NO: 272248 - DNA, 754 bp, Unknown
  Bacterial polypeptide expressing nucleotide sequence isolated from the Sargasso Sea
tatgtttttttattcaccattagaacaatttacgattatttcgttgattccaatgcatattggtaatttttatttttcatttacaaattcttcattatttatgtgtttgtcaacaggcctttttatgtgtctttgtgttcttgtaacagctcgtggaggatcattagttccaacaccatggcaatcccttattgaaatgatttatgaatttgttgtaagtttagtttcggaacaagttggagaaaaagggaaacaatattttcctatcttatttactctctttacttttttgttatgtagtaatctaattggaatgattccatatagtttcacaactacaagtcattttgttgtgacttttggattatctgtttcagtttttattgctgtgacaattatcggatttcaaattcatggcttacattttttcagttttcttcttcctccgggagcacctttaattctttcaccttttttagtagtgattgaacttgtttcatatatattccgtgcaattagtttaggtgttcgactttttgcgaacatgatggccgggcacactcttgttaaaattttaagtggttttgcttggagtatgttatcattaagtggtgtattaaaacttgcagcaagtattccatttgctgttgtttttgctcttatgtttttagaagttggagttgcttgtttacaagcatatgtgtttaccattttaacatgtatttacttaaatgatgctattcatcttcactaa

SEQ ID NO: 272249 - DNA, 322 bp, Unknown
  Bacterial polypeptide expressing nucleotide sequence isolated from the Sargasso Sea
tatgccaagtttagatgatttaaaaaaaaggatttacagcattaagtccacgcaaaaaataacaaaagctatgaaaatggtagctgccgctaaacttagaagagcccaagaaaatgcagaaagaggcagacctttttcagaaaaaatgaataatattatacttaatttaagcagttcaatttcagataaagatagcgcatcaaaatttcttattggaaccggtaaagataatgtacatttatgcgtggtgatcacagctgacagaggtctttgcggaggttttaatactaatatatgtaaaaaagcaaaaaattatttgaaa

SEQ ID NO: 272250 - DNA, 406 bp, Unknown
  Bacterial polypeptide expressing nucleotide sequence isolated from the Sargasso Sea
atggaaacaggtaaagtagtagaaataattggagcagttattgatgttcaatttcctcgtgaagcaatgccaaatatttttgatgcgctgttaatcgaagaaggcgatttaaccttagaagtacaacaacaaattggagacggaatagtacgaactattgctatgggtactacagatggtttgaaacgtggattggatgtaaaaaatactggtgctccaataagtgttcccgtgggagataagactctaggcagaataatgaatgttcttggtcagccagttgataatgctggaccaataaaagctgagaaaaaaatgcctatacatcgtgctgctccgacattttctgaacaagcatctgaaattgaattactagaaacaggtatcaaagtggtagatttgatat

SEQ ID NO: 272251 - DNA, 257 bp, Unknown
  Bacterial polypeptide expressing nucleotide sequence isolated from the Sargasso Sea
tatgagcaaaggaataatcactcaagtaattggagcagtagtagatgtaaaatttaatggagaacttccagagattttaacagcattggagtgtaaaaatggtgacaacagattagttttagaggttgcacaacatttgggtgaaactactgttagaacaattgcgatggatgcaaccgagggattaaaaagaggagatgaagtcactaatacaaaagcaccaatacaagttccagttggacctgaaactcttggaa

SEQ ID NO: 272252 - DNA, 136 bp, Unknown
  Bacterial polypeptide expressing nucleotide sequence isolated from the Sargasso Sea
aatgagtgcaatggataatgctacccgtaacgcaggtgaaatggttgacaaacttactatcgaatataatagaagtcgtcaggcagcaattacaaaagaactaatagaaatcatatcaggagcagaaagtttataa

SEQ ID NO: 272253 - DNA, 513 bp, Unknown
  Bacterial polypeptide expressing nucleotide sequence isolated from the Sargasso Sea
aaaaagggctcgatcaaataaaaagagattatggaaattatattgttcagaaatatagtttcaaagataaaaaacaaatcacatttaaagaggcagaaattgtgggaaaagaaataatgaaattatttaaacaaaacgagtttgataggtgctttttattttataataattttaaaaatgtgataactcaaattcctcaagctcaacaaattatacctacagaaaaaaaacttgaagagacaaaagatgaagatagcactttctatgaatttgaacctgatgaagaggaaattttagaggaattattgcctaaaaatatttcaactcaagtgttcaaagcatttctagagaacgctgcaagtgaacaaggatcacgaatgactgcgatggataatgctacaagaaatgcaggtgatttagttgataagcttacaattaattacaatagaagtagacaagcttcaattacaaaagagttaatagaaataatttccggagcagaaagtttatagt

SEQ ID NO: 272254 - DNA, 190 bp, Unknown
  Bacterial polypeptide expressing nucleotide sequence isolated from the Sargasso Sea
aatgccaagccttgatgatttgagaaaaagaattgctagcgtaaaatctacacaaaagattacaaaagccatgaagatggtagctgcagcaaagcttcgtaaagcacaagaaatggcggaaaaaggcaggcctttcagtgacaaaatggatgtgattatacagaatttaagtaaggcgattaatgacccc

SEQ ID NO: 272255 - DNA, 229 bp, Unknown
  Bacterial polypeptide expressing nucleotide sequence isolated from the Sargasso Sea
atggcaagtttagacgacctaaaaaaaagaatagctagtgtaaagtctacacaaaaaattactaaagctatgaaaatggttgcagcagctaaattaagaagagctcaagaaagcgcagagaagggaagaccttattctgaaaaaatgaataatgttattttaaatttatcaaatggtatatctgataaagaaaatgcaccaaagttattgtcaggcactgtcaggaaaa

SEQ ID NO: 272256 - DNA, 199 bp, Unknown
  Bacterial polypeptide expressing nucleotide sequence isolated from the Sargasso Sea
tctatctcaccattttttgttgctgaagtatttacaggttctcctggaaaactagtagacctagatgatacgataaaaggttttgacgctatatgtaagggagaatacgatcatttacctgaagcagcattttatatggtgggtggaatagaggaagcaattgagaaagcagaaaagttatctaaagacggcaaataat

SEQ ID NO: 272257 - DNA, 340 bp, Unknown
  Bacterial polypeptide expressing nucleotide sequence isolated from the Sargasso Sea
cgggaaatggcagcttttgctcaatttggatctgatttagatgcatcaactcaaaaacttttaaatagaggcgcaaaattaactgaattattaaagcaagatcaatattctccaatgacagttgcggagcaggtgatttcagttttcactggtgtaaaaggatatctcgatgacgttgaattaaataagattaaaaaatttgaaggcgatatcatagataaaattaaatctgataaacctgaaattatagatgaaatacaatcaacaggtaaattagacgaaaaaacagaaaaatctttatctcaaattatagaaaaatataaaaccgataataaataaa

SEQ ID NO: 272258 - DNA, 454 bp, Unknown
  Bacterial polypeptide expressing nucleotide sequence isolated from the Sargasso Sea
taatttaaattttgaaagttcatcaaaaatagttcgtataattcttgatgaatttgaacagggtaagtatgattcggttaaaattgtatataaccgttttaaaaatgcagctactcagactgtaactatagaatcctttttaccaatattaacaaaaaaagaaaacgatacatctgatagttcgttagatttaatagattacatttatgagccatctcaggaacaaattattaaccaacttttgccgaagtcattaaaaatacaattactaaaatctatcaaggactccattgctagcgagcacggcgcaagaatgacagcaatgcacaaagcaactgataatgcgcaagaactaagagaccagctcaaactttcttacaataaggcaagacaagcttcaataacaaatgagattctagaaatcgttggtggagctgaggccctgagtaactaa

SEQ ID NO: 272259 - DNA, 226 bp, Unknown
  Bacterial polypeptide expressing nucleotide sequence isolated from the Sargasso Sea
gaaattttaagtaatttactgccaaagaatatttctacgcaaatatttaaagcaatgttagagaattcagctagcgagcaagggtctagaatgagtgcaatggataatgcaacccgaaacgcaggtgaaatggttgacaaacttactatcgaatataatagaagtcgtcaggcagcaattacaaaagaactaatagaaatcatatcaggagcagaaagtttataat

SEQ ID NO: 272260 - DNA, 772 bp, Unknown
  Bacterial polypeptide expressing nucleotide sequence isolated from the Sargasso Sea
gcgcttggtggcggcagccaaggtgcgccgcgctcaggatttggtcctgcgcagccgtcctttcgcagaccgtctggccagggtgctggagagcctccaaagccgtattgctctggaagctgccgatacccctctgctgcaggcccgcgatccgcaacacatcactctcgtggcgatgaccggtgatcgaggtctctgcggaggcttcaacgccaacatcatcaagcgcaccgagcagcgttttgctgagctcaaggccaccggtcatgaggtggcgctgatcctggtgggtcgcaaggtttccacctactttcagaaccgtgattacccgatcacggccagcttcaccggtctggaccagctgcccacctcagctgatgccatgcaggtgtcggatgccattcaggctgaattcctcggcggcgccaccgatcgggttgagctggtgttcaccaagttcatcaacctggtgagcacgacccccgtttaccaaacacttctgccgcttgatccccaggggattgctcaggctgatgatgaaattttccgtttcatcgccaaagagggcgaatccgcagctggggcctccaatcaggccgacaaactcaagtcggatcttttgtttgagcagactcccagccagctgcttgatgttctgcttcctctttatttgcagaaccaggtgttgcgttcattgcaggaatccgcggccagtgagttggccagccggatgacagcaatgaataatgcaagtgataacgccaaggccttg

SEQ ID NO: 272261 - DNA, 244 bp, Unknown
  Bacterial polypeptide expressing nucleotide sequence isolated from the Sargasso Sea
atgcctagtttagacgacctaaaaaaaagaattaaaagtgtaaaatctactcaaaaaattactaaggcaatgaagatggttgctgcagcaaaacttaggaaagctcaagaaagtgcagagaaaggcagaccttacagtcaaaaaatgcaaaatataatattaaatttgaccaaatccattaatgatcctcaaaatgcaccaaaactgcttgtaggaacaggagaagataaaaagtatttatgtg

SEQ ID NO: 272262 - DNA, 164 bp, Unknown
  Bacterial polypeptide expressing nucleotide sequence isolated from the Sargasso Sea
aaacgctgcaagtgaacagggttctagaatgactgctatggacaatgctactagaaacgctggagatttggttgacaaacttacaataaattacaatagaagtagacaagcatctattacaaaagaattaattgaaataatatcaggagctgagagtttataat

SEQ ID NO: 272263 - DNA, 277 bp, Unknown
  Bacterial polypeptide expressing nucleotide sequence isolated from the Sargasso Sea
atggcagcagccaaagaaatccggaccaagatcgccagcgttaaaaatacgcaaaagatcaccaaggccatggaaatggtcgctgcatcgaaaatgcgcaaggcgcaggatcgcatggcagcggcgcggccgtatgcagacaagatgcgtaacgtggtcgcccatatcgcccatgcgaatgccgagtatcgacacccattcttgatcgaacgtgaggtcagccgcattggtgtcatacctggtgtcgaccgatcgtgggtttgtgcggtggattgaa

SEQ ID NO: 272264 - DNA, 391 bp, Unknown
  Bacterial polypeptide expressing nucleotide sequence isolated from the Sargasso Sea
atcattaaaaaactcggcggtggtgtcaggctggcattggctcattttcgtgagcttgcagcatttgcccagttcgcatctgatcttgatgaagccacgaggaagcagttagaaagaggtcagagagtaacagagctaatgaagcaaaaacaatacgctcctctgactgtagcagaaatggctgtgtccctttatgctgcgaacgagggctatctcgacgatgtcccagcagacaagattgtcgatttcgaggcagcattacacgcaaactttgttgactcagcctctgatcttgctcaaaagatcaatgacactggcgactacaacgatgaaatcgaaggggagctcaaaaagttcgttgaagattttaaaacaacaggcacctattaat

SEQ ID NO: 272265 - DNA, 280 bp, Unknown
  Bacterial polypeptide expressing nucleotide sequence isolated from the Sargasso Sea
cgataatgatgagagtaaatctgatcagacttatgaatttgagcccgatgaagatgaaatattaaatattttgttgccaaaaaatatttcaacgcaaatttttaaggcaatgttagagaattcagctagcgaacaaggagcaagaatgagtgcaatggataatgcaactagaaacgcaggtgaaatggttgataaacttactattgagtataatagaagtcgtcaagcagcaattacgaaagaactaatagaaattatatcaggagcggagagtttataa

SEQ ID NO: 272266 - DNA, 322 bp, Unknown
  Bacterial polypeptide expressing nucleotide sequence isolated from the Sargasso Sea
atggaaatcaaagcagcagaaatatcgtctgtaattaaagatcaaatagctaattttgaaactaaagcagatgttgctgaggttggaactgtattaagtgtcggagatggtattgcgcgtgtgtatggtcttgatcaagtacaagctggagagatggtagaattcccaggtggcattaaaggtatggccctcaaccttgaaatggataacgttggtgtttcaatctttggtgatgatactggaattaaagaaggtgatacagttaaacgtacaggagaaattgttgatgttcctgttggtaaagaattagttaggccgtgtt

SEQ ID NO: 272267 - DNA, 562 bp, Unknown
  Bacterial polypeptide expressing nucleotide sequence isolated from the Sargasso Sea
taaaaatattttaaaagaaggaaaaaaattaaaaataattactgtaggtggaaaaggatatgatcaaattaaaacggaatatggaaaatatataattgaaagaaaaagttttaaagaaaaaaagaaaatttcatttaatgaagcccacgaaataggaaaaaaaataattaatctatttgagcaagatcaatttgataagtgcttaatattttacaacaattttaaaaatgtgataactcaaattccacaggctgaacaaataattccaacatcaattaaaaaagataaacttaaagataataattcttcatcttacgaatttgaaccagatgaagatgaaattttagatgatttacttcctaaaaatgtatctactcaaatttttaaagcttttttggaaaatgcagcaagcgaacaaggatcgagaatgacagctatggataatgctacaagaaacgctggtgatcttgtagataaactcacaattaattacaacagaagtagacaagcatcaatcacaaaagaattaatcgaaataatttcaggtgcagaaagtttataa

SEQ ID NO: 272268 - DNA, 174 bp, Unknown
  Bacterial polypeptide expressing nucleotide sequence isolated from the Sargasso Sea
aatgaataaagaaggaataattacacaattaattggtgcagttgtagatgttaaatttcaaaatgaattacctgaaatttacactgctttagaagctaataatgggggcaataaacttatattagaggtagcacaacatctcggcgaaaatagcgttaggactatagctatgga

SEQ ID NO: 272269 - DNA, 643 bp, Unknown
  Bacterial polypeptide expressing nucleotide sequence isolated from the Sargasso Sea
atgtaccaattcaacgtttacagaattggacccgaaattaaattaggtgatatagatttatcatttactaatgctagtttgtttatggttttaagtgcattaacagtcttaataatattcaaacttggttcaaaaaaaaacattataatacctaacaaaattcaattattagctgagttaagttatagttttatttcaaagatgataagtgataccgctggaactaaggctaaaccttatttttcattcatattttcactttttatgtttgttttgttttgtaatatgttgggcatgataccttattcttttaccgtcacaagtcacattatagtaacatttgtattggcagcttttatatttataggagtaacaattataggatttttaaaacatgggttaggttacttaaaattgtttgtgccgagtggagtgccaatagttttattgcctcttattgttgttatagaaataatttcatatcttagtagaccaataagtttgtcggtaagattatttgctaacatgatggctggacatacaatgatgaaggtttttggaggttttgtagttagtttaggtatagtcggaggctggttgcctctaagtttttcagttgcacttacagggctagagattctag

SEQ ID NO: 272270 - DNA, 484 bp, Unknown
  Bacterial polypeptide expressing nucleotide sequence isolated from the Sargasso Sea
tatggaaaatatataatcaaaaagcttagctttaaggataggaagcaaatatcttttaaagaagcagaggaagttggaaaaattattttagaattatttaaaaatcaagaatttgataagtgttctattttttataataattttaaaaatgtaattacccaaatacctcaagctcagcagataatacctgcagaaaaaaaagaagaaaataaagaaaaatcagaaatagatttttatgaatttgaacctgaagaagatgaaattttagatgaattacttccaaagaatatatcaacccaagtttttaaagcatttttagaaaatgctgcaagcgaacagggctcaagaatgacagcaatggataatgcaactagaaatgcaggagatttggttgataagctaaccattacttataacagaagcagacaggcttctattacaaaagaattaattgagattatatcaggagcagagagtttataat

SEQ ID NO: 272271 - DNA, 238 bp, Unknown
  Bacterial polypeptide expressing nucleotide sequence isolated from the Sargasso Sea
tatgagcaaaaagggaaaaattacacaagttattggagcggtagtcgatgtcagctttgaagaaaatttacctgaaatacttactgctttagaagttgacaatggaggaaacaaattaatattagaagttgctcagcatctaggtgaaaacgaagtgagaactatagcaatggactctacagaggggctaaagagaggagatcaagttatcgatactactttgccaataagtgtgcca

SEQ ID NO: 272272 - DNA, 89 bp, Unknown
  Bacterial polypeptide expressing nucleotide sequence isolated from the Sargasso Sea
aagtactttgaatttaacctataacaaagccagacaagcagctatcactcaagaaatattagaagttgtaggaggttcagcagtttagc

SEQ ID NO: 272273 - DNA, 343 bp, Unknown
  Bacterial polypeptide expressing nucleotide sequence isolated from the Sargasso Sea
ttgccccagtttggtagtgacttagaccaggctacccaaaaacagcttcaacgtggacaacgcctggtagaaattctgaagcaaccacagtatcagccaatgccctgggtggatcaggctatttccatttttgctgcaacgaacggattcctggacgatcaaccaatcaacaagctaggcaaatttgaatctgaattcttaacatttatacaaaccaaaaaagctgatttacgtaaatcgatcgaagaaaaagaaatgattgatgaaactgcggaaacggaattgaaatccgcgttgaatgaatttgcagaagcattttctgcagaaaacagttccacttaat

SEQ ID NO: 272274 - DNA, 148 bp, Unknown
  Bacterial polypeptide expressing nucleotide sequence isolated from the Sargasso Sea
atggcaaacgaaaaggaaattcgaacaaaaattgggagtgttaaaaacacccagaaaattacgaaggccatggaaatggttgcggcaagtaagatgcgtagaacacaagtaaccatgaaaaaagcgttgccatatgcagacaaaatca

SEQ ID NO: 272275 - DNA, 163 bp, Unknown
  Bacterial polypeptide expressing nucleotide sequence isolated from the Sargasso Sea
agaagtctttactggttctcctggtaagtacgtatctctgaaagacactatccgtggcttcaagggaattctgagtggcgagttcgaccacattccagaacaagcgttctacatggttggttctatcgacgaagctgtcgagaaagctaacaaaaagaaataa

SEQ ID NO: 272276 - DNA, 772 bp, Unknown
  Bacterial polypeptide expressing nucleotide sequence isolated from the Sargasso Sea
aatgcccagtttaaaagaccttcgcaataggattacaagcgttaagtcgacacagcgcataaccgccgcgatgaagatggtagcggctgcgaaattaaggcgtgctcaagaacatgcattggcggcgcggccatatgctgaacggatggaggatatgcttcgttcgcttggtgatagttctggagctggaggttctcggcttcttgttggaacaggttcagataaaactcatctcctggtgttaatttcagcagatcggggcctttgtggcgggttcaacattagtctaatgcgtgggttgcgcgaggcaattaaacgcttacagtccgagggtaaaactgttcagcttttcattgtgggtcgtaaaggcgttggtcttgctaggagagaattcgcggatttgatagtagaggtagcagaggatatatcaaaaccctctccttcttttgaggctgcgtctaatatcgctgacagccttttacaaagatttagcaaaaacgagttcgatagttgtactgttttttacaataaatttgtatctgccttgacccagacagtaacaccgcagcaactgataccattttcactcgctgaggacggtactgagtcgattgttacggcgtccagtgcacacgaatttgagccgtcagaagaacaaattcttgatgagctcctgccgcgtaatatatctatgcagatttttagagccatgttggaaagttttgcatctgaacagggcgcgcgtatgactgcgatggataatgctactcgc

SEQ ID NO: 272277 - DNA, 834 bp, Unknown
  Bacterial polypeptide expressing nucleotide sequence isolated from the Sargasso Sea
tatggcaaatcttaaagagattagagatcgaatcgtttccgttaaaaatacaagaaaaataacggaggccatgagacttgttgcagctgcaaaagttaggagagctcaagatcaagttcttaagagtagaccttttgcagataaacttgcgcgggtcttagaaaatattcaatctagagtacaatttgaggctgtcgattctcctctattatccaagagagaagtgaagagtattagcttggtttgtataactgcggatagaggtttatgcggtggttacaatacaaatataataaaaaaggtagaaataagatatgcagaattagtcaaacaagggtatcagccaaatttaattttggtagggaagaaagctattggatattttcaaaatagaaaggatagatatgtaattaaaagtactttcaaagaactagaacaggtacccacattcaaggattctgaaggagttacaaatgagattttagctcaatttctttcagaaaattctgatagggtagaaattatttatacgaaattcatcactctagttagctgcgcccctgtcgttcaaacattattgccacttgaccctcaaggaattgctgatgaaaacgatgaaatttttaggttaactacaaaagacagtaaattacttgttgaaaaatcaaatattgaaaaaagtgattcagagaagttgccatcagatattgtttttgaacaaagtcctgatcaattattagattctttattaccattatatttacagaatcaggtactaagagctctcaaagagtcggcagcttctgaactcgcttgcaggatgaccgcgatgaa

SEQ ID NO: 272278 - DNA, 415 bp, Unknown
  Bacterial polypeptide expressing nucleotide sequence isolated from the Sargasso Sea
catcactttagttagctgtgcccctgtcgttcaaacactattgccacttgaccctcaaggaatcgctgaggaaaacgatgaaatttttaggttgactacaaaagatagtaagttacttgttgaaaaatcaaatattgaaaaaagtgattcagagaagttaccatcagacattgtttttgaacaaagtcctgatcaactattagattccttattacctttatatttacagaatcaagtactaagagctcttcaagagtcggcggcttctgaactagcttgcaggatgaccgctatgaataatgcaagtgataatgctaaagaattagcaagtactttgaatctaacctataacaaagccagacaagcagctattacacaagaaatattagaagttgtaggaggttctgcagtttag

SEQ ID NO: 272279 - DNA, 788 bp, Unknown
  Bacterial polypeptide expressing nucleotide sequence isolated from the Sargasso Sea
acttagaagagcccaagaaagtgcagagaaaggaagacctttttctgaaaaaatgaataatataattcttaacttgagcaattcaatctcagataaagaaaatgcatcgaaatttttagtagggactggcaaagataatattcaattatgtgtaattattacggcagacaaaggcttatgcggaggatttaatacaaatatatgtagaaaagctagaagttattttgaaaaaattttaaaagaaggaaaaactcttaaaattttcacagttggatctaaaggtgaagatcaacttaaaagagcttatggaagttatataattgagaaagtgaattttaagggatataaaaaaattacatacaaagatgcagaagaagttggtaataaaattattaaattatttaatgattcacaatttgatgtttgtaaaattttttataataaatttaaaaatgttatgactcaaattccacaaattcaacagataataccggttgaaaatgaagatggtgagaaacataaaaattcagaaaaccattatgagtttgaacctgaagaaaatgaaattttagataatttattaccaagaaatatttctacacaaatttttaaagcttttcttgaaaatgctgcaagtgaacaagggtctagaatgacagctatggatagtgctactagaaatgctggagaattagttgataaattgactataacttataacagaagtagacaagcggtaataacaaaagaacttattgaaataatatcaggtgcagaaagcttataaa

SEQ ID NO: 272280 - DNA, 379 bp, Unknown
  Bacterial polypeptide expressing nucleotide sequence isolated from the Sargasso Sea
atggatattaacccatcagaagtaacaaaaatattaaaagaacaaattaaaaaatttggagataaatctgaagtaacagaaattggacaagttttatctgtaggagatggaatagcaagaatttacggactcgacaatgttcaagctggtgagatggtagaatttgctgatggctccaaaggtatggcgttaaacttagaaagtgataacgttggagtagttatttttggtgatgatagagcagttaaagaaggtgatacagtcaaaagaactggagcgatagttgacacaccagttggtaaagaattacttggaagagttgttgatggattaggaaacccaatagacggcaaaggagctttagacaaaaggtattaaa

SEQ ID NO: 272281 - DNA, 247 bp, Unknown
  Bacterial polypeptide expressing nucleotide sequence isolated from the Sargasso Sea
tatgaaaaaaggaaagatcacacaagttataggtgcagtagtagacgtaaagtttgatggagatttgccagaaattttaacagcattagaatgcaagaatggtgacaataggttagtgttagaagttgcacaacatttaggagagtcaagtgtcagaacaattgcaatggatgctacagagggattaaagagaggtgatgaagtaatagacactgaagcacctataaaagttcccgttggtccagaa

SEQ ID NO: 272282 - DNA, 436 bp, Unknown
  Bacterial polypeptide expressing nucleotide sequence isolated from the Sargasso Sea
attaacatttttagatgcagaggaattggtaaacaaatcgttgatttgtttaaaaataaagaatttgataaatgctttattttttataataaatttaaaaacgttatctcacaaattccacaacaacaacaagtaatacctgctaagattgaggaaaaagataaaaaacaggaagaaatgtcttcatatgaatttgaacctgaagaagatgaaatcttagatgatttattaccaaaaaatatatctactcaaatatttaaagcctttttggaaaattcagcgagcgaacaaggttcaagaatgacagcaatggataatgcgacaagaaatgcaggagatttagtagataagttgacaattaactataatagaagcagacaagcatctatcacaaaagaattaattgaaataatatctggagctgaaagtttataaa

SEQ ID NO: 272283 - DNA, 243 bp, Unknown
  Bacterial polypeptide expressing nucleotide sequence isolated from the Sargasso Sea
tttttgaacaaagtcctgatcaactattagattccttattaccattatatttacagaatcaggtactgagagctcttcaagagtcggcagcttcagaactcgcttgcaggatgactgctatgaataatgcaagtgataatgctaaagaattagcgagtactttgaatctaacctataacaaagctagacaagcagctattacacaagaaatattagaagttgtaggaggttcagcagtttagc

SEQ ID NO: 272284 - DNA, 673 bp, Unknown
  Bacterial polypeptide expressing nucleotide sequence isolated from the Sargasso Sea
ttttttaaagcaacggccagaaaaaaaacgggttggctatattgtgattacaaccgatcgcggactgtgtggtggcctaaacgttaatttatttcggcacctggttaaagaaatgcaaatctggcatcaacaagaagtcggtgttgatttgtgcattatcggaaaaaaaggagagagtttcttccgacgtcatggtggtgaggtcttggggttagcgaaccagctgggcgatacacctgaaattaccgagttagtcggcgtggttaaagtcatgcttgaccgatttgaaagcggtgatttagacgccgtctatttagcgggtaacgattttgtcaacaccatggtgcagcgaccgatgattcgtcaattgttaccgttgcagccggatgaaaaagaatcgggtacggggtattgggactatctgtacgaaccggattctgcacaggaaattttggatgcgttgttaagacggtatattgagtctcaagtctaccaaggagtcattgaaaatttagcgtgtgagcagagtgcgcgaatggttgcgatgaaaagtgcaaccgataacgcaggtgatattattaaagagcttaagttgatttataacaaagctcgtcaatccagtatcacccaagaaatttcagaaattgtgagcggcgcagctgctgttgaataa

SEQ ID NO: 272285 - DNA, 512 bp, Unknown
  Bacterial polypeptide expressing nucleotide sequence isolated from the Sargasso Sea
atcaaaaggatatgaccaactaaaaagaacatataaagaaaacataattgaaaaaatttcttttaaagagtctaaaaatgcaaattattttgatgctgataaagtaggaaaaataattattgataagtttgaaaaaaaagaatttgatgtttgtactattttttataatcaatttaaaaatgtaattactcagatacctcaagagcaacaaattattcctttaaaagcctctgaagcagaaaaaaattcatcagaagataattatgaatttgaacctgaggaagatgaaattttaagtaatttacttcctaaaaatatttctactcaagtttttaaagcaatgttagagaattcagctagcgagcaaggttcaagaatgagtgcaatggataatgcaacaagaaacgctggtgaaatggttgataagcttactattcagtataatagaagtcgacaagcggcaattactaaagaactaattgaaataatatcaggagcagaaagtttataat

SEQ ID NO: 272286 - DNA, 235 bp, Unknown
  Bacterial polypeptide expressing nucleotide sequence isolated from the Sargasso Sea
atgagaaaaggaaaaattacacaaattattggagcggtggtagatgttaaatttgatggcgaactaccggagatattaactgcattagagtgtgataatagtggtaacagactagtcttagaagttgcacagcatttaggcgagtctagtgtaaggacaattgctatggatgcaacagagggtttaaaacgaggtgacgaagtgactgatactggagccccaataaaagttcctg

SEQ ID NO: 272287 - DNA, 439 bp, Unknown
  Bacterial polypeptide expressing nucleotide sequence isolated from the Sargasso Sea
atggaaatcaaaactgataatattaccgcattacttcaagagcagattaagaagtttgatttatctgttgatgtatctgaggttggtgaagtaattgaaataggggatggcgttgcccgcgtttcgggtcttgaaaaagttatgagttcagaacttgtagagctcccaaatgacgtttacggtatggctcttaatttggaagatgataacgttggtgtggttttatttggtgaatctagccacgttaaagaaggcgatcttgcaaaacgaacagggaaagtcgttgaggtgccagttggcaatgcaatgcttgggcgcgttgttaatccattaggccaacccgttgatggtaaaggagcaattgaaactaaagacttccttcctattgaaagaaaagcattaggtgttatgtcgcgttcaccagttaatcaaccctaca

SEQ ID NO: 272288 - DNA, 262 bp, Unknown
  Bacterial polypeptide expressing nucleotide sequence isolated from the Sargasso Sea
aatgccaagtcttgatgatttaaaaaaaagaattaaaagtgttaaatctacacaaaagataacaaaagcaatgaaaatggttgcggcagctaaattgagaaaagcacaagaaaatgctgagagaggacgaccttacagtcaaaagatgcaaaatattattttcaacttaactaagtcaataagtgatccagaaaatgcgcccaaacttcttgttggtacaggaaaagatgaagtacatctatgtgtggtattaacagctgat

SEQ ID NO: 272289 - DNA, 459 bp, Unknown
  Bacterial polypeptide expressing nucleotide sequence isolated from the Sargasso Sea
aatgagcaaagaaaatggagtaatataccggatttccggaccagttgtgacggcgatagggatagcacctcgaatgtatgaggtggtaagagtagggaatgaaggtttgatgggagaagtaatagaattacatggagatcaatcggtgattcaggtgtacgaagagacatctggaatcaaacctggtgaaccggtgataaggacgggccaaactctgtctgtccaacttggtccaggacttctgacacaaatctacgatgggattcagagacctcttccaaagttggaagagacaatgggcgtcttcattacgagaggcgttgatgctgatggtcttgatttgaaaaagaagtgggaattcaatcccaaggttagttctggggatgaagtttcatctggagatgtgatcggtatagtccaagaaaccgaaactatcgaacatcgagtgatggtaccacc

SEQ ID NO: 272290 - DNA, 112 bp, Unknown
  Bacterial polypeptide expressing nucleotide sequence isolated from the Sargasso Sea
cgaaacgcaggtgaaatggttgacaaacttactatcgagtataatagaagtcgtcaggcagcaattactaaagaactaatagaaatcatatcaggagcagaaagtttataat

SEQ ID NO: 272291 - DNA, 408 bp, Unknown
  Bacterial polypeptide expressing nucleotide sequence isolated from the Sargasso Sea
aagaattatactttgagggtaaatttgataaatgcatattagtttttaataaatttaaatcagctatttctcaagaagtaacacaacaacaattaatcccattagacgtttcaaattctgaaaaggaagaagaaaaagaaaattcttcaaatgcaatttatgattatgagcctgatgaagaaacaattttaaaggatttacttccaaaaaatgtttctattcaaatatttaaagtacttttagaaagtgatgcaggggaacagggggcaagaatggccgcaatggacaacgcaacccgaaacgcaggtgaaatgatagatagtttaacgttaaagtataatagaacgcgacaagcgttcattacaaaagaattaatagagattatttctggagctgaatcaatataaa

SEQ ID NO: 272292 - DNA, 535 bp, Unknown
  Bacterial polypeptide expressing nucleotide sequence isolated from the Sargasso Sea
gccagttgggaaaaaaagtagagacttttttaatagggtaatgaaggatcaaattatagagagttttgtcgacttaaatgtttcaagtactggttacgagtctgcattaaacatttctaataagcttcaagaattatactttgatggtaaatttgataaatgcatattagtttttaacaaatttaaatcagctatttcgcaagaagtaacacaacaacaattaataccattagacgtttcaaattctgaaaaggaagaagaaaaagaaaattcttcaaatgcaatttatgattatgagcctgatgaagaaacaattttaaaggatttacttccaaaaaatgtttctattcaaatatttaaagtacttttagaaagtgatgcaggtgaacagggggcaagaatggccgcaatggacaacgcaacccgaaacgcaggtgaaatgatagatagtttaacgttaaagtataatagaacgcgacaagcgttcattacaaaagaattaatagagattatttctggagctgaatcaatataa

SEQ ID NO: 272293 - DNA, 736 bp, Unknown
  Bacterial polypeptide expressing nucleotide sequence isolated from the Sargasso Sea
aaggtttaacaccgtactagcttcactggcagcatccgtcggtagttcagacagcgcccctattctccttaggggaacgggtagacaagatgtgcatttattaattgtaatgaccgcagagcgtggcttatgtggaggttttaattccaatatagcaaagctagctcggagccatgccgctaaacttaaacaaagtggtaaaagattgaaaattattacggtcggcaagaagggcagagacgcccttaaaagagattttggcgagtattttgttgaacatgtagacttaagtgaatttaaatcgataaaatatgtaaacgctcaggcgattgccaaagctttgttagctcgatttgatgatagtgaatacgatgtagccacaattttttattcaaaatttgtaaatgtggtgacccaaataccaaccgcccaacaaataatccctgcaatctttgatgatcaatcatcggcgtctgataaggccgtgtacgattacgagccagacgaagaaacaatacttgccgacttacttcctcgaggtgttgccactcagatatttgcggctttattggaaaatggagcatctgagcagggtgctcggatgtcggcgatggataacgctacgcgaaatgcaggtgacatgatagataaattgactattgaatttaataggtctcgtcaggctgtaattaccaacgaattgattgaaattatttcaggcgctgaagcgctgtaa

SEQ ID NO: 272294 - DNA, 209 bp, Unknown
  Bacterial polypeptide expressing nucleotide sequence isolated from the Sargasso Sea
ggttaggtatattgaatctttggtttatcaagcggttgttgagaacggggcttgtgagcaagccgcaaggatgattgcaatgaaaagtgccactgataatgctggggatttaattgatgatttgcaattggtttataacaaggcacgccaagcggcaattactcaggagttgtctgagatagttagtggtgcggctgcaattagttaaa

SEQ ID NO: 272295 - DNA, 382 bp, Unknown
  Bacterial polypeptide expressing nucleotide sequence isolated from the Sargasso Sea
aatggaaggcaaaatagatcagctttttatcgtccacaatgattttgtaaacacaatgacacaaaagccggagatcaaaacactgctgccaatagacccagaggatggggagcaaatgcaagagcattgggattatatttatgagccagactcgaaagagcttttagattatatcttgatgaggtacatcgagtcacaagtctatcgagcagtggttgaaaatgtagcatgtgaaatggcagcaaaaatggttgccatgaaaagtgcaacagacaatgcaggaaaattaatagaccagcttgaacttgattataacaaagcaagacaagcagcaatcacacaagaaatttcagaaatagttggcggcgcagctgcagtttaa

SEQ ID NO: 272296 - DNA, 169 bp, Unknown
  Bacterial polypeptide expressing nucleotide sequence isolated from the Sargasso Sea
atgccgagtttagatgatttaaaaaaaagaattaaaagtgttaaatctactcaaaagattacaaaagctatgaaaatggttgctgctgctaaacttagaaaagcacaagaaaatgctgaaaaagggcgaccatatagtaaaaaaatggaaagtattattttaaatctca

SEQ ID NO: 272297 - DNA, 595 bp, Unknown
  Bacterial polypeptide expressing nucleotide sequence isolated from the Sargasso Sea
ttatactaatattgtcaagcaggcaaagaattactttaacaaaattttaaaagaatctaaaaatcttaaaataattactgttggaaccaagggtttagatcaattaaaaagagaatatggcaagtatattgttaaaaaaattgacttcaaaaataaaaaaaaaatttccttcaaagatgcttcgttagtcggagatgaaattgtaaaattgttcaaaaataatgaatttgataaatgtataatcttttataataaatttaaaaacgtaatgacacaaatacctcaatcacaacaattaatacctgcaaaaaaagtagaggatactaaaacagatcaagaatcatcctatgattttgaacctgaagaagatgaaatattagaagatcttctaccaaaaaatatctctacacaaatttataaaggatttttggaaaattctgcaagtgaacaaggatctagaatgacagctatggacaatgcgacaagaaatgcaggtgatttagtggaaaaactaacaataaattataatagaagtagacaagccgctataacaaaagaattaattgaaataatatcaggagcagaaagtttataa

SEQ ID NO: 272298 - DNA, 477 bp, Unknown
  Bacterial polypeptide expressing nucleotide sequence isolated from the Sargasso Sea
agattttagctgaatttctttcagaaaattcggatagggtggaaattatttatacgaaattcattactctagttagctgcgcccctgtcgtacaaacactattgccacttgaccctcaaggaattgctgaggaaaacgatgaaatttttaggttgaccacaaaagatagtaagttacttgttgaaaaatcaaatattgaaaaaagcgattcagagaagttgccatcagatattgtttttgaacaaagtcctgatcaactattagattctttattaccattatatttgcagaatcaggtactaagagctcttcaagagtcggcagcttcagaactagcttgcaggatgactgcgatgaataatgctagtgataatgctaaagaattagcaagtactttgaatctaacctataataaagctaggcaagcagctattactcaagaaatattagaagttgtaggaggctcagcagtttagc

SEQ ID NO: 272299 - DNA, 817 bp, Unknown
  Bacterial polypeptide expressing nucleotide sequence isolated from the Sargasso Sea
aaaattttatcaggagtcgtaagacctgataaaggtgaagtttttttaaatgatgaaagtattaagctaaactctcctttagatgctaaaaagaataatattggaatggtattccaacatttcaatttatttgaaactttatctgtatttgaaaacttaagtatagatagcgataaaaaaaatgaagacctgagactgtcggttaataatatcttaaaaaaatataattttagaattgatttagatattccagttttaaatttatcagccggtcaaaaacaaaaagttgaaattataagatgtttaatcagaaaccctaaagtgttgataatggacgaaccaacatcagttttaaccgaacaagaaacggaagatctatttgtttcattaaaacagttttcagacgaggggatattaataatttacattactcataaattaaaagaagtgctttcactttgtgatgaagtagcagtcatgagaaaaggcaaagtagtatctgtaagtaaaacaaaagaagagaaaattgaaactttggctaataagatggttggagaaaatttaagtacggtcaaaaaaaaaaataataatttcaaatttagtgaagaaattttaaaaatctcaaacttaaattttagaagtgacgacccttacgaaacaaacttaattaatttaaatttttcaataaaaaaaggagaatgtttagggatagcagggatttcaggaaatgggcaaagtgaattgtttcaaattttaagtggagaaataattactgaatatacctctataaaatttagagataaagaaattagtaagc

SEQ ID NO: 272300 - DNA, 370 bp, Unknown
  Bacterial polypeptide expressing nucleotide sequence isolated from the Sargasso Sea
atgactgcggctgcgattgagcagctagacgttcaggaaatttacggccgtgtgaccaaggttttagggttgctggttgaaattgctggctttggaagcggtatttcgattggttcgatcgtgcatttgcgccccgatcatgcgggcgcgcctgatgatattccgtgtgaagtgattggttttcgtgatgggcatgcgcttttgatgccgtttggcactttggaaggcgttggtctgggctgtaaggcggtattgcagaaaacgcaaagtgtgattttacctgacgagcgctggttagggcgcgtgatcaatgcgctggggcagccgattgacgggaaagggcctttgccaaagggcgggtatcctgtgc

SEQ ID NO: 272301 - DNA, 380 bp, Unknown
  Bacterial polypeptide expressing nucleotide sequence isolated from the Sargasso Sea
tcctaataaaaatgtctatcaaggcgaagctgaagaagtaatccttcctagtactactggtcaaattggtgtgctaccaggacacatctctttagttactgctatagatattggcgttttaaggctaagaatgaattcccagtggaaatcaatcgctctgatgggtggcttcgctgaaattgaatcagatgaagttatagttctagtaaataatgctgaaattggttctgaaattaatgttcaaaatgctgaacaagatcttaaagaagcaaaattagcaattagcaaattttctgaaaatgaaaaaaatccagagaaaattaaagccttgaaagaggtttcaaaggctgaggctaggattcaagctgcaaagaactaat

SEQ ID NO: 272302 - DNA, 794 bp, Unknown
  Bacterial polypeptide expressing nucleotide sequence isolated from the Sargasso Sea
aaaagccatgaaaatggtcgctgcagcaaaattaagaaaagcccaagaaaacgctgaaaaaggtaggccttatagtgaaaaaatgagaaacattattaataatcttgctaattctataactgagaaagagacagcaccaaaattaatcgcaggtactggacaagataaaacctatttatgtgttcttatgactgctgacagaggtctttgtggaggtttcaatactaatatctgcagattagcaaaaactaattttcaaaaaatcttaaaggagggaaaaacgttaaaaatcattactgtgggcacaaaaggtttggaccaaataaaaagagattacggcaaatatgttattaaaaaattaagttttaaagaaagaaaaaaaatttcttttctggaagctgaggaggtaggtcaaattattttggatcttttccataaaaatgaatttgataagtgtatactattttacaataattttaaaaatgttattactcaaattcctcaagctcaacaaattataccagctaaaaaagagaagtcatcgagtgagtctacaacagatgatttttatgaatttgaacctgaggaggatgaaatattagaaaatcttttacccaaaaatatttcaactcaaatttttaaagcttttttagaaaatgcagcaagtgaacaaggatctagaatgaccgctatggataatgcgaccagaaatgctggagaattggttgaaaaattaactataaattacaatagaactagacaagcttctattacaaaagaattgatgaaataat

SEQ ID NO: 272303 - DNA, 340 bp, Unknown
  Bacterial polypeptide expressing nucleotide sequence isolated from the Sargasso Sea
gagcttgcagcatttgcccaatttgcatctgatcttgatgaagccaccaggaaacaactagaaagagggcagagagtaacagagctaatgaaacagaagcagtatgcaccacttactgttgcagaaatggctgtatctttatacgctgcaaatgaaggctatctagacgacgttcctgccgataaaattgtcgactttgaatcagcacttcatgcaagctttactgatggagcctcggatctcgctcaaaagatcaatgaaacaggcgactacaacgaagaaatcgaagcagaccttaaaaagttcgttgaggactttaaatcaacaggcacctactagt

SEQ ID NO: 272304 - DNA, 721 bp, Unknown
  Bacterial polypeptide expressing nucleotide sequence isolated from the Sargasso Sea
atgtaccaattcaatgtttacagaattggaccagaaattaaattaggatcagtagatatttctttcacaaacgcaagtctatttatggttatcagtactttagcggtattaattatttttaatttaggtgctaaaaaaaaatcattaatacctgacaaaattcaattgttggcagaactcagttattcctttgtatcgaaaatgattagcgatacagccggctctaaagcgaagccttatttttcatttatattttcgttattcatgtttgtactattctgcaatatgtttggaatgattccttattcatttactgtaacaagtcatataattgttacatttgctttagctgcatttatatttattggggtgacaattatcggttttattaagcatggacttggttatttaaaactttttgtaccaagcggggttccaatagttctacttccgctaatagtaataattgaaataatttcatatcttagtagaccggttagtttatctgtaagattatttgcaaatatgatggcaggtcacacaatgatgaaagtattcggaggctttgtaataagtcttggaattattggtggatggcttccactaagtttttcggttgcactaactggtttggagatattagttgcttttcttcaagcatatgtttttgcaatattaacctgcatctacttaaatgatgcattaaatttacaccattaac

SEQ ID NO: 272305 - DNA, 397 bp, Unknown
  Bacterial polypeptide expressing nucleotide sequence isolated from the Sargasso Sea
aatggtaattgaaaaattcgaggcaggtgaatttgatgtttgtacaattttttacaatcaatttaaaaatgtaattactcaaattcctcaagcacagcaaataatccctttaaataatgagggagaagaaaatagttcagaagaaagttacgaatttgaaccagatgaagatgaaattttaagcaatttattgccaaagaatatttctacgcaaatatttaaagcaatgttagagaattcagctagcgagcaagggtctagaatgagtgcaatggataatgcaacccgaaacgcaggtgaaatggttgacaaacttactatcgaatataatagaagtcgtcaggcagcaattacaaaagaactaatagaaatcatatcaggagcagaaagtttataa

SEQ ID NO: 272306 - DNA, 353 bp, Unknown
  Bacterial polypeptide expressing nucleotide sequence isolated from the Sargasso Sea
tatgagcaaaggaataatcacacaagttattggagcggtagtagacgtaaaatttgatggtgaactaccagaaattttaacagcattggaatgtaaaaatggtgataacagactagttttagaggtagcacaacacttaggtgaaactactgttagaacaattgctatggatgctactgaaggactaaaaagaggtgatgaagttatcaacacaaatgctcctattcaagttccggttgggcctgaaactcttggaagaattattaatgtaattggggaaccaatcgacgaaagaggtgaagttaaaaccaaagaaagttggccaattcatagagctgcacctgaattttatg

SEQ ID NO: 272307 - DNA, 361 bp, Unknown
  Bacterial polypeptide expressing nucleotide sequence isolated from the Sargasso Sea
atgtgcaatttttataaccaattcaaaaatgtaataactcaaataccacaagaacaccaaataattcctttaaaagcctctgagtcagaaggatcttcattggaaaataattatgaatttgaacctgaagaagatgaaattttaagtaatttattgcctaaaaatatatctactcagatctttaaagcaatgttagagaattcagctagcgaacaaggttcaagaatgagcgcaatggataatgctaccagaaatgcaggtgaaatggttgacaagcttactattcaatataatagaagtcgtcaagcagcaattacaaaagaactaattgaaattatatcaggagcagaaagtttataat

SEQ ID NO: 272308 - DNA, 450 bp, Unknown
  Bacterial polypeptide expressing nucleotide sequence isolated from the Sargasso Sea
tatgactataaacccatcggaagtaactaaattattaaaagatcaaatcaaaaattttggtgagaaagctgaagtttcagaaattggaaaagttctatcagttggtgacgggatcgctcgtgtttttggtttagataatgttcaagcaggagaaatggtagagtttgaagatggctcaaaaggaatggcattaaatttagaaaatgacaatgttggtgtggttatttttggagatgatagaaatatcaaggagggtgatactattaaaagaacaaatgccattgtagatgttccagtcggtaaagaacttttgggtagagtggtagatggattaggtaatgcaattgatggcaaaggtccaatctctgtaaaaaatcgaaaacgtgttgaagtaaaagcccctgggatcatcccaaggcaatcagttaatgaaccaatgcaaacaggttt

SEQ ID NO: 272309 - DNA, 504 bp, Unknown
  Bacterial polypeptide expressing nucleotide sequence isolated from the Sargasso Sea
aatggaaataaatccttcagaagtaacaaaaatattaaaagaacagataaaaaaatttggagataaagcggaagtaactgaagttggacaagttttatccgtaggtgatggtattgcaagaatatacggtctagataacgttcaagcaggagagatggtcgaattttctgatggttcaaaaggtatggctttaaatttagaaagtgacaatgttggcgttgtaatttttggtgacgatagagctgtaaaagaaggtgatacagtaaaaagaacaggagcaattgttgatacccctgtgggaaaagaattattaggaagagtagttgatggattaggaaacccaatagatggcaaaggcgcactagataaaagtataaaaaaaagtagagttgaagttaaagctccaggaataattccaagaaaatctgtaaatgagccaatgcaatcaggacttaaatcagtcgatagtttagttccaattggggagaggtcaaaagggaatta

SEQ ID NO: 272310 - DNA, 646 bp, Unknown
  Bacterial polypeptide expressing nucleotide sequence isolated from the Sargasso Sea
tatttatgtgttgtaattacagcagataggggtttaggcggtggttttaactctaatatttgtaaactagccaaaagtcactttaaaaaaattttaaaagagggcaaagaattaaagataattacagtaggcagcaaaggacatgatcaaataaaatcagaatacggtgactacataattcataaaaaaagttttaaagaaaagaaacaaattacatttaaagaagctaacgaaatcggaaagaaggtaatcgaattatatgaacaagagcaatttgataaatgtttgatattttataataattttaaaaatgttattacacagatacctcaggctgaacaaataattcctacttttataaagcaagaggacaaaaataaagataaagtattattttatgaatttgaaccagatgaggacgagatattagaagaattattaccaaagaatgtatctatacaaattcttaaagcatttttagaaaacgctgcaagcgagcagggttcaagaatgactgcgatggataatgcaacaagaaatgctggtgatttggtcgataaacttacaattaattataatagaagcaggcaagcatctattacgaaagaactaattgaaattatttcaggagctgaaagtttataat

SEQ ID NO: 272311 - DNA, 308 bp, Unknown
  Bacterial polypeptide expressing nucleotide sequence isolated from the Sargasso Sea
aatgcaaataaatccctcagaagttactaaattattaaaagagcaaataaaacgttttggtgaaaaagctgaagtatctgaaataggaaaagtactctcagtaggagatggtatcgctagagtttatggacttgataacgttcaggccggggagatggtagaatttgatgatggatctaagggtatggctcttaatttagaaaatgacaatgtcggagtagtaatattcggtgatgatagaaaaattaaagagggtgatactgtaaaaaggactaattcaattgtagatgtacctgtagggaaagaat

SEQ ID NO: 272312 - DNA, 376 bp, Unknown
  Bacterial polypeptide expressing nucleotide sequence isolated from the Sargasso Sea
aatgtattctggcgatattcaatttgttgttgtccctggggaggagggagagctaggaatttatcctaaacatatccctctaattaccagaattaaacctggctctctaagattcaaaaactcaaataatgaagatgaagttattgtagtagctggaggaattttagaagttcaaccaaacctcgtaactgttttggccgatacagcaattagagctaatgatatagatcaaaaaagatctgaagaagcaaaacaaattgctgaggcaaaattaaaaaataatcctgatgatattgatttggctaaggctcatgcagagttagcttttgcaattgctgaattaactgctattaaaaaatataggggaaagaaatag

SEQ ID NO: 272313 - DNA, 730 bp, Unknown
  Bacterial polypeptide expressing nucleotide sequence isolated from the Sargasso Sea
aacacccgcaagatcaccgaggccatgcgcctcgtggctgcggccaaggtgcgtcgcgctcaggagcaggtgctccgcagtcgtcccttcgcggaccggctggcgcggatcctggaaaacctccagtcccgcatgcgcttcgaggatgcgtcgtctcctttgatggagcaacgcgacgtggagaccatctccctggtgtccgtcaccggcgaccgtggtctttgcggcggctacaacgccaacatcatcaagcgcactgaacagcgcttcgctgagctgacgggcaaaggcttcaatgtgaagctggtgctgatcggcaacaaggccatcggttatttcaccaagcgtgactacccggtgcaggccaccttctccggtctggagcaggtgcccacagcggatgaagccaacaccatctccaccgatgtgctggccgaattcatcggtgctggcaccgaccgcgtcgagctgatcttcaccaagttcatcaacctggtgagctgcaaaccggtggtgcagaccctgctgcccctggatccccaggacattgctgatcctgaggatgagatcttccgtctcaccaccaaggacggccgtctgacggtggaacccggtgctggccctgccaacaccgaaccgaagatcccatcggacatcgtgttcgagcagacccctgagcagctgctcaacgccctgctgcccctctacctgcagaatcagatgctgcgtt

SEQ ID NO: 272314 - DNA, 862 bp, Unknown
  Bacterial polypeptide expressing nucleotide sequence isolated from the Sargasso Sea
atgtctggattaaaagagataagaaatagaattagttctgtatcttcaacgatgcagattaccaacgctatgaaaatggtttctgcagctaaattgaagaaggctcaagactcaatttctgctaccctaccatattctaataagctctccgagcttataaaaaatatctctgcctcaacagactccgatgacacaaatcccttatttgagaaaagagagttaaagaatttactaatcattgccataacatctaataaaggtttatgcggtggatttaattctaatattataaaagaagtaaataatattaaaacaaccagtgcattcaaaacagtcgatctattaactattggaaaaaaaggcgatgacattctttctaagaagtttgaggttataagctctcataatgatgtttatgataattttaattataataacattaaggaaattgctgaaacagtaatgcagaaattttctgataaggaatatgatgaagttacacttgtttacaatcattttaaaaatgcagcaactcaaatagtgactaaagaacagtatcttccaattgaagagagtgttgatgaaaataattctgtatctggagattatatatttgaaccaaataggcctaaaattttaaatgaattaattccaaaatcgttatctatacagctcttcaaggcaatctcagattctattgcaggagaacatggagcaagaatgacagctatgcataaagctactgataatgcatcagagttaagagatcagcttaagctaacttataataaagcaaggcagacagcaattacaaatgaaatcctagaaattgtaggaggtgcagaagcgctaaactcttaag

SEQ ID NO: 272315 - DNA, 202 bp, Unknown
  Bacterial polypeptide expressing nucleotide sequence isolated from the Sargasso Sea
aatgccaagtctggatgatttaaaaaagagaattaaaagtgttaaatctacccaaaaaatcactaaggctatgaaaatggtagctgcggcaaaactaagaaaagcgcaagaaaatgctgaaaagggaagaccttatagtcaaaagatgcaaaatataattctaaatctaacaagatcaattagcgatcctcaaaatgcacca

SEQ ID NO: 272316 - DNA, 322 bp, Unknown
  Bacterial polypeptide expressing nucleotide sequence isolated from the Sargasso Sea
atggcaatttctctaaaagttttagctcctaataaaaatgtttatcaaggcgaagctgaagaagtaatccttcctagtactacaggtcaaattggtgtactaccaggacatatctctttagttactgccatagatattggtgttttaaggctaagaatgaattcccagtggaaatcaatagcccttatgggaggcttcgctgaaattgaatcagatgaagttatagttctagtaaataatgctgaaattggttctgaaattaatgttcaaaatgctgaacaagatcttaaagaagcaaaattagcaattagcaaattttctg

SEQ ID NO: 272317 - DNA, 565 bp, Unknown
  Bacterial polypeptide expressing nucleotide sequence isolated from the Sargasso Sea
atgtcaggcggaaaagaaataaaagggcaaatttcaagtattaaaaatactcagaaaataacaaaagctatggaaatggttgcagcaagtaaaatgaagaaagctcaaagtcgaatggcagcagctagaccttatgcaaaaatgattaaaaatgtagtagggcatcttgcgagtgcacacccagaatataagcatccttttttggtaaaaagagaaaaagttaaaagagtaggtttaattattataagcacagacagggggttatgtggaggattaaatacaaatttattcaagcaagctcttaaacaaattaatgaatggaataagaattcgatagaagttgatgtgtgcgcaattggttcaaaagctgaaaaattttttaaaagattaaatgttaatctagttgcgcaagtctctcatcttggagacagcccagaaataaatgatgtaattggttcaataaaaattatgttagacaatttcacagataaaaaaatagatgaacttcatttagctgagaataaatttataaatactatgtcacaagaacctggcttaataaatt

SEQ ID NO: 272318 - DNA, 258 bp, Unknown
  Bacterial polypeptide expressing nucleotide sequence isolated from the Sargasso Sea
ttttagggatggatgagctatctgaggaggacaagttagcagttaacagagctaggaagatacagagatatttatctcaaccattttatgttgctgaaacatttacaggcacgccaggtaaatatgtatctctaagcgagacaattaaaggtttccaagcaattgtaaatggtgactatgatcatttacctgagcaagcgttctacatgataggagagatttctgaagctgaaaaaaaagctgatgaggttaaataat

SEQ ID NO: 272319 - DNA, 211 bp, Unknown
  Bacterial polypeptide expressing nucleotide sequence isolated from the Sargasso Sea
atggcaagtttagacgacctaaaaaaaagaatagctagtgtaaagtctacacaaaagattactaaagctatgaaaatggttgcagcagctaaattaagaagagctcaagaaagcgctgagaagggaagaccttattctgaaaaaatgaataatattattttaaatttatcaaatggtatatctgataaagaaaatgcaccaaagttattgt

SEQ ID NO: 272320 - DNA, 232 bp, Unknown
  Bacterial polypeptide expressing nucleotide sequence isolated from the Sargasso Sea
aatgagtaaagaaggaaaaataacacaaattattggtgcagtggttgatgtaaattttgaaggggatcttccagaaatttatacagctcttgaggctaataatgctggaaataaattaattttagaagttgcgcaacacttaggagaaaacgatgtgagaactatagcaatggatgcaactgagggattgaaaagaggtgataaagtaattaatactggctcccccaataag

SEQ ID NO: 272321 - DNA, 724 bp, Unknown
  Bacterial polypeptide expressing nucleotide sequence isolated from the Sargasso Sea
atggccagcggaaaagagattaaaagcaagatcggcagtattaaaaatactcaaaagatcactagcgcaatggaaatggttgctgcgtctaaaatgaaaaaggcgcaagaacgagtggcttcaagccgtccatacgctgaaaaattacgtaaagtgattggtcgtgttgctcaagcaaatcttgattttactcacccgttcttagaagaacgtgaagtaaaacgagttggttatattgttatctctactgaccgtggtctgtgtggcggtttaaactcaaacgagtttaaaaaagtcgcattagagattaaagcgtggaaagaaaaaggcgtagatgctgattttgctactttaggtagtaaagcagctggcttctttcaacgttttggtggtcaagtacttgctaaaaaagcaggtcttggagataagccttcagtacaggacgtaattggtccagtaaaaataatgctagatgcattctctgaaggtaaaattgaccgtttattcctggtatataacaactttgttaataccatgaagcaagagccaatagtagatcagttactccctttgccaaaagctgaagaagaagtatctacacatgcgtgggattacttatatgaaccaaacccagaggctattttagagtctttgttagtacgtttcattgagtctcaggtataccaaggtgtagttgaaaacgctgcctctgaacaggctgccc

SEQ ID NO: 272322 - DNA, 691 bp, Unknown
  Bacterial polypeptide expressing nucleotide sequence isolated from the Sargasso Sea
atggcgaatctcaaggaaatccgagaccggatcaaatcggtcaagaacacccgcaagatcaccgaggccatgcgcctcgtggctgcggccaaggtgcgacgcgctcaggaacaggtgctgcgcagccgtcccttcgcggatcggctggctcgggtgctggagaatctccagtcccgcatgcgcttcgaggatgccgatgcacctctgatggagcagcgcgacgtcgagaccatcaccctggtgtcggtcaccggcgaccgcggtctctgcggcggctacaacgccaacatcatcaagcgcaccgaacagcggttcgctgagctcaagggcaagggcttcgaggtgaagctggtgctgatcggcaacaaggcgatcaactacttcaccaaccgcagctatccgattcaggccaccttctccggcctagaacaggtgcccacggctgatgaggccaacgggatcgccaccgatctgctggctgagttcctggcggcggccaccgaccgcgtggaactgatcttcaccaagttcatcaacctggtgagctgcaagccggtggtgcagaccctgctgcccctcgacccccaggacatcgccgatcccgaggatgagatcttccgtctcaccaccaaggacggccgcctgaccgtcgagcccggtgccggtcctgtcaacaccgagcccaagctgg

SEQ ID NO: 272323 - DNA, 118 bp, Unknown
  Bacterial polypeptide expressing nucleotide sequence isolated from the Sargasso Sea
ctcattctcccaatacctgttatgtttctaggattgtttactagtgcaattcaggcattgattttcgcaactttggcggcctattacattggagaagctgttgaagaacatcattagc

SEQ ID NO: 272324 - DNA, 349 bp, Unknown
  Bacterial polypeptide expressing nucleotide sequence isolated from the Sargasso Sea
aatggatatccgtgcagcagaaatatcaacaatattaaaagatcaaattgaaaattttgacgcagacgctgaagttacagaagttggtaaggtcttatcagtaggagatggaattgcacgtgtttacgggcttgatcaaatacaagcgggtgaaatggtagagtttcctggtggtattgctggtatggctttgaacttagaaagagataatgtcggtgtagttatatttggtagcgataagacaataaaagaaggtgacgtcgttaaaagaacaggttctatcgttgacgttccaataggtaaaggtctattaggaagggttgttgatgcacttggtaaccctatagat

SEQ ID NO: 272325 - DNA, 133 bp, Unknown
  Bacterial polypeptide expressing nucleotide sequence isolated from the Sargasso Sea
aatgccaagtttagacgatctaaaaaaaagaattaaaagtgtaaaatctacccaaaagattactaaagcaatgaaaatggtggctgctgctaaattgaaaaaggcacaagaaaaagctgaaaaaggtcgtcct

SEQ ID NO: 272326 - DNA, 772 bp, Unknown
  Bacterial polypeptide expressing nucleotide sequence isolated from the Sargasso Sea
tatgaatcgattaccttttacagctcaaaaccctttagagcagtttgaattaacacctctattggatatttacagttcttctgtagatttatcatttacaaactcatcacttattactttaatggctattactttctttgtattattagcacgtttagtgttttatacaggaaatggaacagtaattcctaaccgttggcaatcagtactagaatctatgtatgaattagtagcaggattactaaacgataacgtaggtacacgtggtcaaggttatttcccatttattttcacattatttgcattccttttaatggtgaatttaattggaatggttccttatagttatacaattacaagtcaattaattgttactttattattctctggaatggtttatattggggtaactattattatggtacgtactcacggattccatacattatcagtattcttaccaggaggagctccttttgctctttatcctcttctaattcctattgaaattatttcaaatgtaatgcgtgttgttagtttagcggttcgattattcgctaacatgatggcaggacacattttattaaaagttttattaggatttgcatggactatgatgatggctcaaggaattatgtttatcttgcatatgattcctatgggagtagtgtttgcattactatttttagagacaggtgttgctgtaattcaagcttatgtttttgttacttttacatgtatctatctaaatgaagctattaatcttcactaa

SEQ ID NO: 272327 - DNA, 237 bp, Unknown
  Bacterial polypeptide expressing nucleotide sequence isolated from the Sargasso Sea
tatgagcaaaaaaggaaaaataacgcaaattattggtgcagttgtcgatgtaaactttgatggtgatttacctgaaatttatactgcgcttgaggttaataattcaggaaacaaattaatactagaagttgcccaacacctaggggaaaatgatgtaagaacaattgcgatggatgctacagaaggattaaagagaggagatgaggtaactaatactggatctccaataagtgtacc

SEQ ID NO: 272328 - DNA, 332 bp, Unknown
  Bacterial polypeptide expressing nucleotide sequence isolated from the Sargasso Sea
atgtataactcaaattccacaggagcagcaaattatccctttaaaaacaattgatgaagaaacaaatccatctgatgataattatgaatttgagccagaagaggatgaaatattaagtaatttattgcctaaaaatatttcaactcagatttttaaagcgatgttagagaattcagctagcgaacaaggttcgaggatgagtgcaatggacaatgcaaccagaaacgcaggtgaaatggttgacaaacttactattgagtataatagaagtcgtcaggcagcaattactaaagaattaatagaaataatttcaggagcagaaagtttataat

SEQ ID NO: 272329 - DNA, 220 bp, Unknown
  Bacterial polypeptide expressing nucleotide sequence isolated from the Sargasso Sea
atggctaataatttaactgggaaaatatcacaagttttaggagcagttgttgatatagagtttgaaagtgaacttcctgcaattatgaatgctcttgaagttgataataatggaacgcgattagttttagaggttgcgcaacacctaggcgaaaatgctgttcgtacaattgcaatggatactactgatggattagttagaggtcaaactgcaacggata

SEQ ID NO: 272330 - DNA, 448 bp, Unknown
  Bacterial polypeptide expressing nucleotide sequence isolated from the Sargasso Sea
atgcctagtttagatgatttaaaaaaaaggattgtaagtgttaaatcaacgcaaaaaattactaaagctatgaaaatggtagctgctgctaagcttaaaaaggcacaagatagcgcagaaagaagtaggccctacagtgaaaaaatgcaaaatataattttgaatttaacaaaatctataagtgaccctgaaaatgcaccaaaacttctagttggtactggaaacgataagacttatctgtgtgttgtcatgacagcagacaaaggattgtgtggtggatttaattcaaatatttgtaaattggcaaaaaatttttttgaaaaaattataaaagaaggaaaaaatctaaaaataatcgtagttggttcaaaaggtttagatcaattaaaaagaaattacggaaaatatattattaaaaaaatgagttttaaagataaaaaaaaactca

SEQ ID NO: 272331 - DNA, 334 bp, Unknown
  Bacterial polypeptide expressing nucleotide sequence isolated from the Sargasso Sea
gcttttgcacagtttggttctgatttggatgcatcaacacaaaagcttcttaatagaggctctaaactaactgaacttttaaaacaaaatcaatattctccaatgacagttgcagagcaagtaatatcagtttttgcaggtgttaatggttatctagatgatgttgaattagatcaaattaaaatttttgaaaccgaaataatcgataaaataaaatctagtaaagcagatttaataaaatcaatacaaatttcagggaaaatagatgaggatattgaacaatctttaaaaaaaattatagaggaatataaaaaaactaagaaaaatgcctagt

SEQ ID NO: 272332 - DNA, 160 bp, Unknown
  Bacterial polypeptide expressing nucleotide sequence isolated from the Sargasso Sea
atgccaagtttagatgatctaaaaaaaaggattaaaagtgttaaatcaacgcaaaaaattactaaagctatgaaaatggtggcagctgcaaaattaagaaaagctcaggagagcgctgaaaaaggacgaccttatagtcagaaaatgcaaaatataatat

SEQ ID NO: 272333 - DNA, 811 bp, Unknown
  Bacterial polypeptide expressing nucleotide sequence isolated from the Sargasso Sea
aatgccaagtttagacgatctaaaaaaacgaattggtagcgttaagtctactcaaaaaataactaaagccatgaaaatggttgcggctgcaaaacttcggcgtgcccaagagtctgctgagtcaagtcgtccttattctgagaccatggaagatcttatatcatctatatcatctgggtactctccaacttcaagtgagagaaatttattaaccggagataataaagattcaattcatatgctgatcctcttcacatccgagagaggactgtgtggtggatttaattcaattgtgactaaatcacttcgagataaaatagcaagtcttgaggaatcaggtaaacaagtaaaaattatttgtgtcggaaaaaagggttatgacattattaaaagacagcatgaagataaaattgtcgaagttgttgatatgaggtctgtaaagtctgcttcctatcaggatgcaaaaaatatagctgacaaaataataaaaatgtattttgacgaagaatttgataaatgttctatcttttataataagtttaaatcagtaatatcacaaattccaacagaacagcagattgttcctattgatatgcctgagaatgagccggatacaacaaagaatgacaatactttttttgaatttgagcctagtgagagtgaaatactcgatgaactacttcccctgaactttacaatacaaatattcaaagctttacttgaaagcgcggccagcgaacaaggcgctagaatgagcgctatggataatgcatcaagaaatgcatctgatatgattgataatttaacacta

SEQ ID NO: 272334 - DNA, 569 bp, Unknown
  Bacterial polypeptide expressing nucleotide sequence isolated from the Sargasso Sea
agaaaaagaaggaaagcaagttgatttaattactatcggaaaaaaaagtagggatttttttaatcgcttaatgaaaagtaagatactcgaaagcttcgttgacttaggggctacgggggccggatatagcacagctttagaaatttcgaataaaatacaaaatttattttttgataacaagtttgatatttgtgttttagtatataataaatttgtctcagccataaatcaggaagtaagtcgacatcaattaattcctttagatattaattcaaaagatgaaaaaaaggatgatggctcaaacaatgatacttcaatatatacttatgaaccagatgaaacatctattttgcaagatttattgccaaagaatgtttctattcagatttttaaagtattattagaaagtaatgctggtgaacaaggggcacgaatggcagcaatggataacgctacaagaaatgcaggagaaatgatagatgctttaactttaaaatataataggactagacaggcatttattacaaaagaattaattgaaattatttcaggagctgaagcagtttaaa

SEQ ID NO: 272335 - DNA, 856 bp, Unknown
  Bacterial polypeptide expressing nucleotide sequence isolated from the Sargasso Sea
ataaagtccgtcaagaacacctcgcagatcaccaaggcgatggagaaggtggcgcaggccaagatgccaagggcgcaacaagccgctctcgccgggcgttcgtatgcggacctgatgaaccgcgtgctggccgaggtggtgacccatgccggcgactttgatcatccgttcatggaaagccgcggcggcgacaagcgggccttgatcctcgtgaccacggacaaaggcctgtgcggtgcgctgaacactaacctgctgcgcaaggtgtccgatgaatttgtcacggacaacacgcgcgtgctttcggccggccgcaagggcgcgcagcacgccacgcgcgcgggctgggatttagccgcggaattttcctatggcgatccgccaaccatcggcgaagcgcgcgcgctggccaagatggcggtggagctgtttgaagacggtgaggtggatcacgtggacatcgcgttcaccaacttcatcaacaccatcacgcaaaagcccgaggtgcaaacgctgctgcccatcaccgagatcaagggcgtgagcgcgggcgtggaaggggaggaaacctccaccgacctgcccggcggcaccactgaattcctatttgagccgtcggcggaaggcgtgctgggagagttgctgccgcattatctgaattttcaggtgcaccaaattctgctggagaaccgtgccagtgaacacagcgcccggatggtcgccatgaagaacgccacggacaacgccaacgagctgatcaaggacctgacgctggaatacaacaagctgcgccaggcggcgatcaccaacgagttgctggagatcaccaccgctcagatggccttgggcaattaag

SEQ ID NO: 272336 - DNA, 708 bp, Unknown
  Bacterial polypeptide expressing nucleotide sequence isolated from the Sargasso Sea
tatgcaccagttcaatgtttaccgaattggtccagaaataaaattaggtgaagtagatatttctttcactaatgcaagtttatttatggttattagttcaatagctatattagtcatatttaatcttggatcaaaaaaaaattctttaattccagataaaattcaattgcttgctgaattgagttattcatttatttctaaaatgattagtgatacggcaggatcaaaagcaaaaccttacttttcatttatattttcattatttatgtttgttcttttttgcaatatgtttggaatgataccttattcttttacagtaacaagtcacataatagtaacctttgtattagcttcttttatttttttaggagttactattataggttttgtcaaacatggtcttggatatttaaaactttttgttcccagtggtgttccaatagttttgttacctttgatcgtggttattgaaataatctcttatttaagtaggccaattagcttatctgttcgtttgtttgctaatatgatggctggccacactatgatgaaagtattcggaggctttgtggtaagcctaggaataattggcggatggcttccgctaagtttttcagttgcattaacaggtttggagatactagttgcttttcttcaagcttatgtttttgcaatactaacatgcatatatttaaatgatgcattaaa

SEQ ID NO: 272337 - DNA, 192 bp, Unknown
  Bacterial polypeptide expressing nucleotide sequence isolated from the Sargasso Sea
tatggcaagtctagacgaccttaaaaaaagaatagctagtgtaaaatctacgcaaaaaattacaaaagctatgaaaatggtagcagcagcaaaacttagaagagctcaagaaagtgctgaaaaaagaagaccatactctgaaaaaatgaacaatgtgattttaaatttgtctagtggaatttcagataaaga

SEQ ID NO: 272338 - DNA, 217 bp, Unknown
  Bacterial polypeptide expressing nucleotide sequence isolated from the Sargasso Sea
gacctatcttttgactagatatgttgaatctttagtttaccaaggggtcgtagagaacattgcctgcgaacaagcggcgaggatggtcgcgatgaaatctgcttcggataatgcagggaaattaatagatgaattacagttggtttataacaaggcgcgtcaagcggctattacgcaggagctatcggaaattgtgggcggcgcagcagcggtgtaa

SEQ ID NO: 272339 - DNA, 460 bp, Unknown
  Bacterial polypeptide expressing nucleotide sequence isolated from the Sargasso Sea
aaatttagctttaaagatagaaaacaaatttcatttgacgacgccaaaataataggtgacgaaattataaatttatttaacaataatgaatttgatagatgtattttattttataataattttaaaaatgtaattactcaaattcctcaagctcaacaaattattcctgcagaaaataactcaaatttgaatgaagaaaataaccaattttacgaatttgaaccagaagaggatgaaattttagaagatttattgcctaaaaatatatcaacacaaatttttaaggcttttctagaaaatgctgctagtgagcaaggatctagaatgactgcaatggataatgcaacaagaaatgcaggagatttagttgacaaacttacaattaattacaatagaagcagacaagcttcaattacaaaagaacttatagaaataatatctggagcagaaagtttataat

SEQ ID NO: 272340 - DNA, 684 bp, Unknown
  Bacterial polypeptide expressing nucleotide sequence isolated from the Sargasso Sea
gcggtggttacaatacaaatataataaagaaggtagaaataagatacgcagaattagtcaaacaagggtatcagccaaatttaattttggtagggaagaaagctattggatattttcaaaatagaaaggatagatatgtaattaaaagtactttcaaagaactagaacaggtccctacagtcaaggactctgaaggagttacaaatgagattttggctgaatttctttcagaaaattctgatagggtggaaattatttacacgaaattcatcactctagttagttgcgcccctgttgttcaaacactattgccacttgaccctcaaggaattgctgaggaaaacgatgaaatttttaggttgactacaaaagatagtaagttacttgttgaaaaatcaaatattgaaaaaagtgattcagagaagttaccatcagatatcgtttttgaacaaagtcctgatcaactattagattcgttattaccattatatttacagaatcaggttctaagagctcttcaagagtcggcagcttcagaactggcttgcaggatgactgctatgaataatgctagtgataatgctaaagaattagcaagtactttgaatctaacctataacaaagccagacaagcagctattactcaagaaatattagaagttgttggaggttcagcagtttagt

SEQ ID NO: 272341 - DNA, 484 bp, Unknown
  Bacterial polypeptide expressing nucleotide sequence isolated from the Sargasso Sea
ttacttctcatttattttttcattgtttatgtttgtgcttttttgcaacatgtttggcatgatcccatactcgttcacagttacaagtcacattatagtaacttttgtactagctgcatttatatttattggagttacgattattggtttcattaaacatggagttggttatctaaaactttttgttccaagcggagttccgatcgttttgttgccactaatagtggttattgaaataatttcatatttaagcagaccaattagtttgtcagttagattatttgcaaatatgatggcgggacacacaatgatgaaagtattcggaggctttgtgataagcctaggaatagtaggtggatggcttccacttagtttttcagttgcattaacaggtttagagatactggttgcctttctccaagcttatgtttttgcaatattaacgtgcatctatttaaatgatgcattaaatttacaccattaa

SEQ ID NO: 272342 - DNA, 250 bp, Unknown
  Bacterial polypeptide expressing nucleotide sequence isolated from the Sargasso Sea
gatatagtctttgaacaaagtcctgatcaattattagattcattattacctttatatttacagaatcaggtactcagagctttacaagagtcggcagcttcagaactagcatgcaggatgactgctatgaataatgcgagtgataatgctaaagaattggcaagtagtttgaatctaacctataacaaagccagacaagctgctattactcaagaaatattagaagttgtaggaggttctgcagtttagc

SEQ ID NO: 272343 - DNA, 145 bp, Unknown
  Bacterial polypeptide expressing nucleotide sequence isolated from the Sargasso Sea
ggtgcaagaatggctgccatggataatgcgacgcgtaacgctggtgagatgattgatagtttaacattaaaatataacagaacgcgtcaagcgtttataactaaagaattaattgaaattatttctggagctgaatcaatataaa

SEQ ID NO: 272344 - DNA, 184 bp, Unknown
  Bacterial polypeptide expressing nucleotide sequence isolated from the Sargasso Sea
aatgcccagtttagatgatttaaaaaaaagaattaaaagtgtcaaatctacacaaaaaattacaaaagctatgaaaatggtagctgctgcgaaattaaggaaagctcaagaaagtgcagaaaaagggagaccttacagccaaaaaatgcaaaatataatttttaaatctcacaaaatctattaa

SEQ ID NO: 272345 - DNA, 235 bp, Unknown
  Bacterial polypeptide expressing nucleotide sequence isolated from the Sargasso Sea
tatggcaagtttagacgacctaaaaaaaagaatagctagtgtaaaatctacacagaaaattactaaggctatgaaaatggttgcagcagctaaattaagaagagctcaagaaagcgccgagaagggaaggccgtattctgaaaaaatgaataatgttattttaaatttatcaaatggtatatctgataaagaaaatgcaccaaagttattgtcaggtactggtcaggaaaaaact

SEQ ID NO: 272346 - DNA, 274 bp, Unknown
  Bacterial polypeptide expressing nucleotide sequence isolated from the Sargasso Sea
atgccaagtcttgacgatctaaaaaaacgtattggaagtgtaaagtctacacagaaaattacaaaagcaatgaaaatggttgcggcagctaagttgagaagagcccaagaatctgctgagtcaagtaggccttattcagacactatgaatgaagttataggatcaatttcaaataaagttgtatcgacatcttcagaaagaaatttattaactggtactggcgacgaccaagttcagcttcttatattattcacttctgaaagaggtctttgtg

SEQ ID NO: 272347 - DNA, 221 bp, Unknown
  Bacterial polypeptide expressing nucleotide sequence isolated from the Sargasso Sea
tatggcgggcggaaaggaagtaagaacaaagattgcaagtgtaaaaaatacacaaaagatcacaaaagctatggaaatggtagcagctagtaaaatgcgtaaagcccaagatcgcatgcttgccgctcgtccttattcagaaaagattcgtaatgtgatatcacaccttgctcatgcgaatccagagtataagcatccttatcttgtaacacgcgaagagg

SEQ ID NO: 272348 - DNA, 400 bp, Unknown
  Bacterial polypeptide expressing nucleotide sequence isolated from the Sargasso Sea
atgagtaatggagttgtgacacaaatcatcggggcggttatagatgtcgaatttgatagagagaacataccaagcgtgtatgaagctctcaacattgtcggtcttgaaactgtgcttgaggttcagcaacaactaggcgatggaattgtaagaactatcgctatgggttcaacagaaggactaaaaaggggtttagaagttgttagaactaatgcacctatttctgttccggttgggcaagaaactcttggaagaattatggatgttttgggcaatccgattgatgaaaaaggcgatatcggtgagaaggaaagacaaccaattcataaaagcccaccaagctacactgatcaagcaggatcaaacgaattactggaaacaggtatcaaagtaattgacc

SEQ ID NO: 272349 - DNA, 334 bp, Unknown
  Bacterial polypeptide expressing nucleotide sequence isolated from the Sargasso Sea
aatgtgattacccaaatacctcaagaacaacaaataattcctttaaaatcaactgagtcagaaggttctacttcagaagataattacgaatttgaaccagaggaagatgaaatattgagtaatttattgccaaaaaatatttcgacacaaatttttaaagcgatgttagagaattcagctagtgaacaaggttcaagaatgagcgcaatggataatgcaactagaaatgctggtgaaatggttgaaaaacttactattcagtataatagaagtcgacaagcagcaattactaaagaattaattgaaattatatcaggagcggaaagtttataat

SEQ ID NO: 272350 - DNA, 384 bp, Unknown
  Bacterial polypeptide expressing nucleotide sequence isolated from the Sargasso Sea
ataaaaatgagtttgataagtgcatcttattttataataatttcaaaaatgtaattactcaaattcctcaagcccaacaaattattcctgctgaaaataagagtgcagacttaaagaaaaatgatactttgtcatatgaatttgagcccgatgaagatgaaattttagaggatttgcttccaaaaaatatatcgacgcaggtttttaaagcctttttagaaaatgctgctagtgagcaaggatcaagaatgactgcaatggataatgccacaagaaatgctggagatttagttgacaagcttacaataaactataatcgaagcagacaagcttcaattacaaaagaattaatagaaataatatcaggagctgaaagtttataag

SEQ ID NO: 272351 - DNA, 244 bp, Unknown
  Bacterial polypeptide expressing nucleotide sequence isolated from the Sargasso Sea
aatgccaagtttagatgatcttagaaaaagaataacaagtgtaaaatctactcaaaaaattaccaaggctatgaaaatggttgcggcagctaaattaagaaaggcccaagaaaatgctgagaagggaagaccatactcagaaaaaatgaataaaattatcttaaatttatcaaaaagtataaataataatgaaaatgctccaaaaattattagttggaaatggaaacagccaatatacatttat

SEQ ID NO: 272352 - DNA, 543 bp, Unknown
  Bacterial polypeptide expressing nucleotide sequence isolated from the Sargasso Sea
tatgccttctttaaaagaccttaaaaatagaattggttcagtcaagtctacacaaaaaattacatcagcaatgaagatggttgccgctgctaagttgcgtaaagctcaagagcaagcattggcctcaagaccttacacatctcttatagacagtgttgtatctaaaatttctcataaagcaattggaagctctatagatctattaagtggtaaagaagaaatcaaaactcatttattggttgttttttctgcagatagaggattatgcggtggctttaatggatcaattacaagaacagttaggtctgaaattaataaactaaaagacgatggtataaatgttaaattacttatggtaggaaaaaaatccgctgatgcactcaatagagaatttggtgacttgtttgttgaaaaaatagatggaaattcagcaaaaccaaattacacagatgctgaagttttagcaaaaaaaataatcgatttatttaaaaacaatgaatttggtacatgcagagtaatttttaataaatttgtttctgcaat

SEQ ID NO: 272353 - DNA, 196 bp, Unknown
  Bacterial polypeptide expressing nucleotide sequence isolated from the Sargasso Sea
atggcaagtttagacgacttaaaaaaaagaatagctagtgtaaagtctacacagaaaattactaaagctatgaaaatggttgcagcagctaagttaagaagagcccaagaaagcgctgaaaagggaagaccctattctgaaaaaatgaataatgttattttaaatttatcaaagggtatatctgataaagaaaatg

SEQ ID NO: 272354 - DNA, 672 bp, Unknown
  Bacterial polypeptide expressing nucleotide sequence isolated from the Sargasso Sea
tatggcagcaaatccaatgtaccaatttaatgtttatagaattggtccagaaattaaaataggggaaatagatttatcctttactaatgctagtttatttatggtcataagctcattagcaatattaataatttttaatttaggcgctcaaaagaaaaatataattcctgataaaatacaattgctctcagaacttagttatacatttgtgtccaagatgataagtgatacagctggttcgaaagcaaaaccatatttttcatttatattttcactttttatgtttgttcttttttgtaacatgttcggtatgatcccctactcttttacagtaacaagccacataattgtaacatttgttttagcggcatttattttcatgggagtgacaattattggatttattaaacatggatttggctatttaaaactttttgtacccagcggagtgcctgctgtcttgttaccactaatagtagttatagaaattatttcttatttaagtaggcccatcagtttatctgtaagattgtttgcaaatatgatggcgggacatacaatgatgaaagtattcggaggctttgtagtaagtcttggaattgtcggtggatggcttccactgagtttttcagttgcattaacaggtttggagatattagttgcttttcttca

SEQ ID NO: 272355 - DNA, 539 bp, Unknown
  Bacterial polypeptide expressing nucleotide sequence isolated from the Sargasso Sea
aaaaattcttaagattatgacagtagggtccaaaggttatgatcagctaaaaagaacttataaagataatataattgaaaaaatttccttcaaagattctaaatacgctaattattttgatgctgaaaaagtaggaaataaaattataaataaatttgaaaaaaaagaatttgatgtatgtacgattttttataacaaatttaaaaatgttattactcaaataccccaggaacaacaaataattcctttaaaaacttctgataatgagggaagctcatcagaaaataattatgagtttgaacctgaggaagatgaaattttaagcaatttattacctaaaaatatatctactcaaatttttagagcaatgttagaaaattcagctagcgaacaaggttcaaggatgagtgcaatggacaatgcaaccagaaacgcaggtgaaatggttgataagcttactattcaatataatagaagccgtcaagcagcaattacaaaagaattaatcgaaattatatcaggagcagaaagtttataat

SEQ ID NO: 272356 - DNA, 262 bp, Unknown
  Bacterial polypeptide expressing nucleotide sequence isolated from the Sargasso Sea
tatggcaagtttagacgacctaaaaaaaagaatagctagtgtaaagtctacacaaaaaattactaaagctatgaaaatggttgcagcagctaaattaagaagagctcaagaaagcgctgagaagggaagaccttattctgaaaaaatgaataatgttattttaaatttatcaaatggtatatctgataaagaaaatgcaccaaagttattgtcagggactggtcaggaaaaaactcacctttgtgtggtgatgacttctgat

SEQ ID NO: 272357 - DNA, 271 bp, Unknown
  Bacterial polypeptide expressing nucleotide sequence isolated from the Sargasso Sea
atgcccagcttagatgatttaaaaaaaagaatttcaagcgttaaatcaactcaaaaaattaccaaagctatgaaaatggtagcatccgcaaagcttagaaaagcacaagaaaatgctgaaaaaggcaggcctttttctgaaaaaatgaataacataattcttaatttaagtagttcaataactgataaagataatgcttctaagttcttgataggcactggcaaagatgacgtacatttgtgtgtagtaattacagctgatagagggcttg

SEQ ID NO: 272358 - DNA, 403 bp, Unknown
  Bacterial polypeptide expressing nucleotide sequence isolated from the Sargasso Sea
ttcgaattatgtaattaatgaattccacaattcagaatttgatactgtgaaagtatattttaataaatttcagagcataatatcccaaattcctactgctcaagggttaattccggcatctgttgataataaggaaaatgagtcttttgtctcttttgagtatgagccagatgaagatgcaatcctatctgaacttttacctaaggctattacgacccgcatatatacggcacttctagaaaacgcagcatctgagcagggtgctcgcatgtccgcaatggacaatgctaccagaaatgcgggtgaaatgattgataagcttacgattcagtttaatagatctcgccaagctgcaattactaatgaactaatcgagataatttcgggtgctgaagcactttaa

SEQ ID NO: 272359 - DNA, 437 bp, Unknown
  Bacterial polypeptide expressing nucleotide sequence isolated from the Sargasso Sea
tatggaaataaaaactgatcaaataacagcgttgctgaaagagcaattagaaaaatatgacaattctgttgacgtctctgaggtgggtgaaataatagaggttggtgatggggtcgctagagcatcaggtcttgaaaatgttatgagttctgagcttgttgaattacccaatgatgtatttggaatggctttaaatcttgaagaggataatgttggtcttgtgttattcggtgaaactaggcttgtcaaagaaggagacattgctaaaagaactgggcgcgttgttgaggtgcctgtagggaaggaaatgcttggtagagttgtgaatccattgggtcagccattagatggtaaaggtccaattaacagctcaagtacccttcctattgaaagaaaagcgttaggtgtaatggctcgtagtccagtaaatgaacctc

SEQ ID NO: 272360 - DNA, 607 bp, Unknown
  Bacterial polypeptide expressing nucleotide sequence isolated from the Sargasso Sea
tggtagttttaattcaagtatctgtaagagtgcaccaaacttttttaaaaagattttaagtgagaataaagatcttaagataattacaataggttcaaaaggttatgatcagcttaaaagagagtatggcaaatttattattcaaaaaataagttataaagacaaaaaaaatatatcattcaaggaagctgatgaagtaagtaaaattataatagatttatttaatgataataaatttgataaatgtcatattttttttaataattttaaaaacgtaattactcaagtcccacaaaatttgcaaattattccaactcatcagatctcaaataaagaagagaataaagatagcgatccttatgaatttgagcctgaagaaaaggatatattagaggatttgttacctaaaaatattgcgacccaagtttatacagcttttctagaaaacgcagcgagtgaacaagggtctagaatgacagctatggataatgctacaagaaacgcaggggatttagtcgataaactaacaattaattataacagaagtagacaagctgcaattacaaaagaattaattgaaattatttctggagcagaaagtttataa

SEQ ID NO: 272361 - DNA, 181 bp, Unknown
  Bacterial polypeptide expressing nucleotide sequence isolated from the Sargasso Sea
gatgaataaagaaggaattataactcagcttattggtgcagtagtcgatgtaaaatttgagggagatttaccagagatctataccgcgttggaagttaataatggttcaaataaacttatcttagaggttgcacaacacttaggtgaaagcagtgtaaggactattgcaatggatgcaact

SEQ ID NO: 272362 - DNA, 565 bp, Unknown
  Bacterial polypeptide expressing nucleotide sequence isolated from the Sargasso Sea
tattttaataaaattttaaaagattctaaaaatttaaaaattataacagtcggtacgaagggccttgatcaactcaagagagattacgggaaatatattattaaaaaaataaattttaaagaaaagaaaaagctatctttcaaagatgcagaattgattggaaatgaaatagtaaaactattcaaaaataatgaatttgataaatgcgtaattttttttaacaagtttaaaaatgttatgactcagataccacaaaaacaacaagtgattcctgctaaaaaagatgaaaaatcaaaatcagaagaacatttttcatatgaatttgaaccagaagaggatgagattttggaagaccttcttccaagaaatatttctactcaaatatataaaggtttcttagaaaattctgcaagtgagcaaggatcaagaatgactgcgatggataacgcaacaagaaacgctggagacctggtagaaaaattaacaattaattacaatagaagcagacaagctgcaattacaaaagaactaatcgaaataatatcaggagcagaaagtttataga

SEQ ID NO: 272363 - DNA, 406 bp, Unknown
  Bacterial polypeptide expressing nucleotide sequence isolated from the Sargasso Sea
catggcaatttcacttaaggttttagctccaaatcaaaatgtttatcaaggggaggctgatgaagttattcttcctagtacaactggtcaaattggtgtacttcctggtcatatatctttggtaactgcaattgatattggcgtcttaagactaagagttaattctcaatggaaatctatagccttaatgggtggttttgctgagattgaatcagatgaagttatagttttggtcaatagcgccgaaattggttcggaaattaatatacaaaacgctgaagatgccctcaaagtagcaaaatcagcaattagcaaatttcccgaaaatgagaaaagtcccgataaaataaaggctcttaatgaaatatcaaaagctgaggcaagaattcaagcatcaaaaaactaa

SEQ ID NO: 272364 - DNA, 457 bp, Unknown
  Bacterial polypeptide expressing nucleotide sequence isolated from the Sargasso Sea
atatcttttaaggactctaaaaatgtaaattattttgatgcagataaagttggcaaaatagttattgaaaaatttgaaaaaaaagaatttgatgtatgtgcaattttttataaccaatttaagaatgtaattactcaaataccacaagaacaacaaattattcctttaaaaacatctgaaaaggaggaaaattcatcagaagataattatgaatttgaacctgaagaagatgagatattgagcaacttgttaccaaaaaatatttcaactcagatttttaaagcgatgttagagaattcagctagcgagcaaggttcaagaatgagtgcaatggacaatgcaaccagaaacgcaggtgaaatggttgacaaacttactattgagtataatagaagtcgtcaggcagcaattactaaagagttaatagaaataatttcaggagcagaaagtttataat

SEQ ID NO: 272365 - DNA, 376 bp, Unknown
  Bacterial polypeptide expressing nucleotide sequence isolated from the Sargasso Sea
tatgagaaaaggacaaataacacagatcattggggcggtagtagacgtaaaatttgacggagaactaccagaaattttaactgcactagagtgcaataatggtggaaatagactagttctagaagttgctcaacatttgggggaatccagtgtgagaacaattgcaatggatgcaacagagggccttaaaagaggagacgaggtaacagatacagctgctccaattaaagttccagtaggaccagaaactcttggaagaattataaatgtaataggtgagcctattgatgaaagaggagaagttaaaagttcagataattggcctattcatagagctgcgccagaatttaatgatcaatcgacagaaactgaaata

SEQ ID NO: 272366 - DNA, 483 bp, Unknown
  Bacterial polypeptide expressing nucleotide sequence isolated from the Sargasso Sea
gtataaaagacaatattatcgataaaatatcatttaaaaactcaaaaaatgcaaattattttgatgctgacaaagttggtaaaataattatagaaagattcgaaaaaaaagaatttgatgtgtgtactatattttataatcagtttaaaaatgtaatcactcaaatacctcaagaacaacagataatacctttaaaatctgaagagaatgcagaaaaagaccttgttgataattatgagtttgaaccagaggaggatgaaatattgagcaatctcctcccaaaaaatatctcaacacagatttttaaggcgatgctagaaaattcagctagtgagcaagggtcacgtatgagcgccatggataatgcaacaagaaatgcaggtgagatggtagacaagcttactattgagtataacagaagccgacaggcagcaattactaaagagttaattgaaattatatcaggagcagaaagtttataat

SEQ ID NO: 272367 - DNA, 357 bp, Unknown
  Bacterial polypeptide expressing nucleotide sequence isolated from the Sargasso Sea
tatgtctataaatccctcagaagtaacaaagctgttaaaagatcaaattaaaaattttggtgaaaaggccgaagtttctgagataggaaaagttttatcagttggtgacggaatagctcgtgtgtatggtttagacaatgtacaagcgggagaaatggttgaatttgaagacggctcaaaaggcatggctttaaacttagaaaatgataacgttggcgtggtaatttttggtgacgatagaaaaattaaagaaggtgatacaataaaaagaactaatgcaatcgtagatgttccagtaggtaaagaacttttgggaagagttgttgatggtttaggaaatcctatagatggaaaagg

SEQ ID NO: 272368 - DNA, 508 bp, Unknown
  Bacterial polypeptide expressing nucleotide sequence isolated from the Sargasso Sea
aggtcatgatcaaattaaaacagaatacagtaagtatataattgataaaaaaagctttaaagataaaaaacaaatttcatttaaagaagctaatgaaattggaacaaaggtaatcgaattatatgaacaagaacaatttgataaatgttttattttttataataattttaaaaatgtaattacgcaaattcctcaagcagaacaaattataccaacttttataaaaaaagatgaaaaaactaaagatcatatattttcttacgattttgaaccagatgaggatgaaatattagatgatttgcttccaaaaaatgtatcggtccaaatttttaaagcctttttagaaaatgctgcaagtgaacaaggatctaggatgactgccatggacaatgctactagaaacgcgggagacttggtagataagcttacaataaattacaatagaagtagacaggcgtctataacaaaagaattaattgaaattatttcaggagcagaaagtttataa

SEQ ID NO: 272369 - DNA, 156 bp, Unknown
  Bacterial polypeptide expressing nucleotide sequence isolated from the Sargasso Sea
aatgaataaagaaggtgtgataacacaattaataggagccgtagtggacgttaaatttaaagatgaattaccagaaatttatacggctcttgaaactaataatggtggaaataaattaatactggaagtagcccagcatttgggtgaaaatagtgt

SEQ ID NO: 272370 - DNA, 602 bp, Unknown
  Bacterial polypeptide expressing nucleotide sequence isolated from the Sargasso Sea
catgggagctgtatccccacctggcggtgatatctctgagcctgtcagccaaggtactcttagaatcgtgaaggtgttctggggtctagatgcaggtcttgctcgaaagcgtcacttccctgcaattaactggctcaattcctattcactctatcctcaaagcctgaatcaatggttccgcgataacatcgctagcgacttccctgaagtcaggactgagataagtgctctactgaaggttgaagcggagcttcaagaaatcgtccaacttgtcggttctgacgcactaccaatcgatcagcaattgacactcgaggttgctcgtatgattcgtgagtatttcctacagcagaatgggttcgacccagttgacgcttacagtggtgtcgaacagcaatacgcgatggctaaggccatccttactttccaaaatgaagcaaagaaggcaatggctgccggtgcccgccttcaagacgttgttaacgtcccctctcgaactgaacttatgcgggctcgcttcgcagaaggttatctagagaatattggaggccttgtcgaagacatggtcggggaaatcactggcacggtggaggccaactgaa

SEQ ID NO: 272371 - DNA, 830 bp, Unknown
  Bacterial polypeptide expressing nucleotide sequence isolated from the Sargasso Sea
tatggcaagtttagacgacctaaaaaaaagaatagctattgtaaaatctacacagaaaattactaaggctatgaaaatggttgcagcagctaagttaagaagagctcaagaaagtgctgagaagggaaggccttattctgaaaaaatgaataatgttattttaaatttatcaaatggtatatccgataaagaaaatgccccaaaattattatcaggtactggtcaggaaaaaacccatctttgtgtagtgatgacttctgatagaggtttatgtggtggatttaattctaatattattaaaaagactaaaagttattttgcaaaaattttagatgaaggtaaagaacttaaaattattacagtaggctcaaagggaaatgatcaattaaaaagagtttatggtgataaaataattgaaaatatttctttcaaagagtcaaaaaatgcaaattatttcgatgctgataaagttggaaaaatggtaattgaaaaattcgaagcaggtgaatttgatgtttgtacaattttttataaccaatttaaaaatgtaattactcaaattcctcaagcacagcaaattatccctttaaataatgagggagaagaaagtagctcagaagaaagttacgaatttgaaccagatgaagatgaaattttaagtaatttattgccaaagaatatttctacgcaaatatttaaagcaatgttagagaattcagctagcgagcaagggtctagaatgagtgcaatggataatgcaacccgaaacgcaggtgaaatggttgacaaacttactatcgaatataatagaagtcgtcaggcagcaatta

SEQ ID NO: 272372 - DNA, 247 bp, Unknown
  Bacterial polypeptide expressing nucleotide sequence isolated from the Sargasso Sea
tgagtttgaacctgaagaggatgaaattttgaccaatttattaccaaaaaatatatctactcaaatttttaaagcaatgttagaaaattcagctagcgaacaaggttcaagaatgagcgcaatggataatgcaactagaaatgcgggtgaaatggttgacaagcttactattcagtataatagaagtcgtcaagcagcaattactaaagaattaatagaaattatatcaggagcagaaagtttataa

SEQ ID NO: 272373 - DNA, 477 bp, Unknown
  Bacterial polypeptide expressing nucleotide sequence isolated from the Sargasso Sea
aatatgttattaaaaaatttagttttaaaaacaagaaacaaataacatttaatgaagctgaaataatcggaaaggaaatcataaatttatttatacaaaatcaatttgataaatgtattttattctataataattttaaaaatgtaatcactcagatcccgcaagctcaacaaattattccagcagaaaatagttcatctaaagataaagaggaaaacctaacctcgtatgaatttgaacccgaagaagatgagattttagaggatttaatacctaagaatatatctactcaagtttttaaagcttttttagaaaatgctgcaagcgaacaaggatcaagaatgactgcaatggataatgctacaagaaatgcaggagaattagttgataaactaacaattaactataacagaagtagacaggcttcaattacaaaagaattaatagaaattatatcaggagcggaaagcttataac

SEQ ID NO: 272374 - DNA, 742 bp, Unknown
  Bacterial polypeptide expressing nucleotide sequence isolated from the Sargasso Sea
tgcaggccatatgctaagatgattaagaatgtagttggccacttggctaatgcacatcctgagtataagcacccttttttggttcaaagagattctgtcaaaagagttggtcttattatcataagtaccgatcgaggtttatgcggaggtttaaatacaaatttattcaagcaggctttaaaaaaaattaatgaatggaaaaagaactctattgaagttgatgtttgtgcaattggctcaaaagcagaaaggttttttaaaagattagatgtaaatttagttgctcaagtttctcaccttggagatagtccagaaataaacgatgtaattggctctataaaaattatgttagacaattatattgagggtaatattgatgaattgcatttagcagaaaataaatttattaacacaatgtcgcaagagccaggggtgacgcatcttattccaactgagcctagccaggaagatgaacgttctcatcactgggattatatttatgagccggattcaaaaagcgtcattgataatttgttggttagatatgttgagtcattagtttacagagggatagttgagaatgtcgcatgtgaaatgtcagcaagaatggtagcaatgaagagcgcatcagacaatgcaagtaatctaattgatgaattacaattaatttataacaaagctagacaagcatctataacgcaggaactttcagaaatcgtagctggagcagctgcagtttagt

SEQ ID NO: 272375 - DNA, 168 bp, Unknown
  Bacterial polypeptide expressing nucleotide sequence isolated from the Sargasso Sea
aatgagcacaggaaaaatagtacaggtgattggggcggtagtagacgtagaatttgcaaaagattctataccgcaagtttatgacgcactcaaagttgatgaagcaggtttaacactagaagttcaacaacagctgggcgatggaattgtaagaactatagcgatggg

SEQ ID NO: 272376 - DNA, 208 bp, Unknown
  Bacterial polypeptide expressing nucleotide sequence isolated from the Sargasso Sea
actgcctcaaaatatatctacacaaatttttaaagcgatgttagagaattcagctagcgaacagggttcaagaatgagtgcaatggataatgcaactaggaatgcaggcgaaatggttgacaagcttactattcagtataatagaagccgtcaagctgcgattactaaagaattaattgaaattatatcgggagcagaaagtttataa

SEQ ID NO: 272377 - DNA, 301 bp, Unknown
  Bacterial polypeptide expressing nucleotide sequence isolated from the Sargasso Sea
aatggaaataaaagcagctgaaatatcatcagtaataaaagatcagattgccaattttgaaactaaagcggatgtagctgaagtgggaacagtactaagtgtaggagatggtatcgcgcgtgtatatggtcttgatcaagtacaagctggcgagatggtagaatttccaggtggaattaaaggtatggcccttaaccttgaaatggataatgttggtgtttcaatctttggcgatgatacaggtattaaagaaggtgatacagtaaaacgtacaggagaaattgttgatgttccagttgga

SEQ ID NO: 272378 - DNA, 231 bp, Unknown
  Bacterial polypeptide expressing nucleotide sequence isolated from the Sargasso Sea
tatggcaagtttagacgatctaaaaaaaagaatagcaagtgtaaagtctacacaaaaaattactaaagctatgaaaatggttgcagcagctaaattaagaagagctcaagaaagtgctgagaagggaaggccttattctgaaaaaatgaataatgttattttgaatttatcaaatggtatatctgataaagaaaatgcaccaaagttattgtcaggtactggtcaggaaaa

SEQ ID NO: 272379 - DNA, 159 bp, Unknown
  Bacterial polypeptide expressing nucleotide sequence isolated from the Sargasso Sea
caccaggtaagttggtagacttagactcaactataaaaggttttgatgcaatttgtaaaggtgagtatgatcatttacctgaagctgcattttatatggttggtggtatagaagaagttgtagaaaaggcagaaaagatgtctaaagacaataaatagc

SEQ ID NO: 272380 - DNA, 307 bp, Unknown
  Bacterial polypeptide expressing nucleotide sequence isolated from the Sargasso Sea
tatggtagcacaaggaaaaattgtatggattagtggaccggcagtaaaagctgacggtatggctgatgcaaagatgtatgaaactgtatcagttggagatgcaaaactaatcggtgaggtaattcgtcttaccggagatgtagcattcattcaagtttacgaatcaacaagtggtctaaaaccaggtgaacctgtagttggtacaggaaacccactcagcgttttactaggacctggaattatcggtcaaatttatgacggaattcaaagacctctaaaggatttagctgataaatctggctctttc

SEQ ID NO: 272381 - DNA, 154 bp, Unknown
  Bacterial polypeptide expressing nucleotide sequence isolated from the Sargasso Sea
tatgccaagtttagatgatttaaaaaaaaggatatcgagtgtaaaatctacacaaaaaataactaaagcgatgaaaatggttgctgccgcaaaattaagaagagctcaagaaaatgctgaaaaaggaagaccatactctgagaaaaatgaataa

SEQ ID NO: 272382 - DNA, 134 bp, Unknown
  Bacterial polypeptide expressing nucleotide sequence isolated from the Sargasso Sea
agtctttttagttccgctaattctcccaatacctgttatgttcctaggattgtttactagtgcaattcaggcattgattttcgcgactttggcggcctattacattggagaagctgttgaagaacatcattagc

SEQ ID NO: 272383 - DNA, 701 bp, Unknown
  Bacterial polypeptide expressing nucleotide sequence isolated from the Sargasso Sea
aatggctggaatgaaggaaattcgcggcaagatcaagagcgtgcaaaacacgcgcaagatcacgaaagcgatggagatggtggccgcatcgaagatgcgccgcgctcaggagcgcatgcgcgctgctcgcccgtatgccgacaaggtccgcgatatcgctgcgcacatgagccgtgcgaacccggagtatcgtcacccgttcatggtgtcgaacgaaggtgcgaaaacggccggcatcatcctcgtcacgaccgataaagggttgtgcggcgggatgaacaccaacgtgctgcgtgcgtcgctgcagaagttcaaggaactggaaggccagggcaagacgatcgaagcaactgcgatcggcaccaagggtctgggcttcctgaatcgtctgcgcgcgaaggtggtgtcgaatgtcgtgcatctgggcgacacgccgcacctggaaaagctgatcggcgcggtgaaggtgcagctcgacctgtactcggaaggcaaggtttcggcggtgtacctcgcgtacacgcgcttcgtcaatacgatgaagcaggagccggtgatcgagcaactgctgccgctgtcggcagagcagttcgagcgcaaggaagaggacggcacgacgccgagcacgcagtgggactacatctacgagccggatgcacaggcagtgtggacgaactgctggtgcgttatgtcgaagcgct

SEQ ID NO: 272384 - DNA, 1261 bp, Unknown
  Bacterial polypeptide expressing nucleotide sequence isolated from the Sargasso Sea
actgggaagggtaactagagtggtcggcatgactattgaagcttcgggtatttcagctgagataggcgcacagtgtgaaattgaaattgaaggcaaacatcgatcaattgatgcagaggtgatcgggtttgatggtcagaagattgtattgatgcctgttcattttctcgatggtattaaagcagggtgcttagttaggctgatgcattctgagtcttcttgcgatgttggtgaagctttgttaggccgggtcgtgaatggtttaggagaaccgatcgatgggaaaggcgatgtaaattatgaatcggagatgcctttagatagtcatgcagtgaatcccatggccagaggggctatcacggaggttttagacactggcgttaagtccatcaatggctgcctaacttttggaaagggtcaacgtgtcggcctaatagcaggctccggcgttggtaaaagtgtattaatggctatgctcacgcggaacacagaggctgatgttgttgtcattgggttaattggagagagaggaagagaggttcaggaatttgttaaaacgactctcggagaggaaggattaaaaaaagcggtagtagtagcagcaccggttgatctctcacctgtaatgcgaatcaaggcagcaaagttgacgcattcagtcgctgaatatttctctagcaagggtaaaaatgtgctgcttttgttcgatagtctgacgcgcgtggctcatgcccagcgagagattggtttagcgattggcgagcccccaaccacgaagggatatacaccatcagtatttagtctacttccaaaacttatcgagcgggctggtgtgggtccgggtggtgtgggatcgatttcagctttttatacggtactagcggaaggcgatgatagaaccgatccgatagtagatttatcgagagcaacacttgacgggcagattatgttatcaagaacgttggcagatgcggcacattaccctgcgatagaccttgaaggctcaatctcccgagtagcttcttccatcattgcagctgatcattttaatgctgctcagaagttgaggaagtattggtcactgtatgtccaaaaacaagatttgattcaggtcggcgcatatacgcctaacacagatccggagttagatgaagctatcaggctcaagcccatgatcgatgagttcctccgccaagacagttctgaggaaattggtatggaaaaagcgatcgaaagtttacaaaaggttgttgcgtcatga

SEQ ID NO: 272385 - DNA, 448 bp, Unknown
  Bacterial polypeptide expressing nucleotide sequence isolated from the Sargasso Sea
atgagcaatggaatagttacacaaatcattggggcagtaatcgatgtcgaattcgacaaagataatattccaaaagtatatgaggctctaatggttgatgagagcggtacaacgcttgaagttcagcaacaactaggcgatggagtggttagaacaattgcaatgggagcaacagagggtttaaaaagaggtttaacagcatcaagaacaaatgcagctatatctgttccagttgggccagagactttagggagaatcgtagatgttcttgggaatccaattgatgaaaaggggccaattggagaaaaacaaaaaatgccaattcatagaaagccacctagttatactgaccagtctgtatctaacgaagttcttgaaacaggcattaaagttatagatttaatgtgtccttttgcaaagggcggaaaaattgactatttggtggcgc

SEQ ID NO: 272386 - DNA, 712 bp, Unknown
  Bacterial polypeptide expressing nucleotide sequence isolated from the Sargasso Sea
gttcaatgtttataggattggacctgaaattaaattaggtgaggtagatatatctttcaccaacgccagtttatttatggtaattagttctttagctattttattaatttttaatcttggcacaaaaaaaaattcattaattccaaacaaaattcaattactcgcggagctaagttacacatttatatcgaaaatgattaatgatacagctggctctaaagccaaaccttattttgcttttattttttcattatttatgttcgttttattttgcaatatgtttggaatgattccttattcattcactgttacaagtcatattattgtaacatttgttttagcagcatttatttttattggtgtaacaattattggttttataaaacacggtttcgggtacttaaaattatttgtgcctagtggtgttccagtagttctattgccattaattgtagtaatcgaaattatttcttatttaagccggccaattagtctttctgttcgtttatttgctaatatgatggctggacatactatgatgaaagttttcggaggctttgttataagcctcggaataattggtggatggcttccactaagtttttcagttgcactaacaggtctagaaatcttagttgcttttcttcaggcttatgtttttgcaattttaacctgcatctatttaaatgatgcattaaatttacaccattaa

SEQ ID NO: 272387 - DNA, 409 bp, Unknown
  Bacterial polypeptide expressing nucleotide sequence isolated from the Sargasso Sea
atgacagtacatttggacgtagtaagcgcggaaaaagcgattttctctggacgcgttgaatcgattcaggtgacaggtagcgaaggtgaattgggtattaacccaggtcacgcgccacttatctctgctattaaacctggtatggtgcgtttggttaaacagcacggtgaagaagaagttatttatgttgcaggtggtgtactagaagtacagcctaacaacattaccgtactggctgataccgcggttcgagctgaagatcttgacgagcaggcagcacaagaagccaaacgacgtgcagaagagcacatcgccaacccaggcgctgactttaactacgcagaagcagctcacgagcttgctgaagcaattgctcaacttcgccttattcagaagttacgcaagtaaa

SEQ ID NO: 272388 - DNA, 736 bp, Unknown
  Bacterial polypeptide expressing nucleotide sequence isolated from the Sargasso Sea
aatggcagctaatccaatgtaccaattcaatgtttacagaattggtccagaaataaaaattggagaaatagatatctcttttacgaatgccagtttatttatggtaataagctctatagcaattatgatagtttttaatctaggatcaagaaaaaattccttaataccgaataaacttcaattaatatctgagctaagctattcatttgtctcaaaaatgataagcgatactgcgggatcaaaagctaagccttacttttctttcatattttccttatttatgtttgttcttttctgtaatatgtttggaatgatcccatattcatttactgttaccagccatataatagtaacttttgttttagcagcttttatatttataggcgttactgtaataggttttataaaacatggatttggatatctaaaactatttgtaccaagtggagttccaatggttctattaccattgattgtggttattgaaattatttcttatttgagtagaccaataagtctttctgtaagattatttgctaatatgatggccggacatacaatgatgaaagtattcggtggctttgttgtaagcctaggaataataggtggatggcttccacttagcttttcagttgcattaacaggattggagatactggttgcttttcttcaggcctatgtttttgcaattttaacatgcatctatttaaatgatgcattaaatttacaccattaa

SEQ ID NO: 272389 - DNA, 400 bp, Unknown
  Bacterial polypeptide expressing nucleotide sequence isolated from the Sargasso Sea
ccaaaccaagattatgaaaaaacttagtggtggggttagaaccgcgctcgcgcaatacagagagcttgctgctttctctcaatttgcatcagatctagacgatgccacaaaagctcagttagctagaggtattagaatcacagagctcataaaacaaaaacaatattcaccgatgagcgtggctcaacaatcacttagcatttttgctgctgacagaggttatatggatgatgttgaggttgaaaaaataggcagttttgaaaaggcattgcatggctacttcacatctgaaaaggctgaccttgaaaaaagtattaatgaaacaggtgactggaatgatgatattgaaaaacaattcaccgaggttgttgaacagtttaaaaaaactcaaacattttaa

SEQ ID NO: 272390 - DNA, 375 bp, Unknown
  Bacterial polypeptide expressing nucleotide sequence isolated from the Sargasso Sea
gcattgacgcgctgtacctcgccagcaacgaatttgttaacacgatgactcaggcgccccaggtagagcagctattgcccctgaaggcagaggaaaacgaaatgctgtctcaccattgggattatgtgtatgagcccgatgcgagagagctgttagatgccttgatggtgcgttatatcgagtcgcaggtgtatcaggcagtggtcgagaatggcgcctgtgagcaggcggcgcgtatgatcgcgatgaaaaacgccacggacaacgcgggcgagctgatcgaagaacttcagcttgtctacaacaaagcccgccaggctgcgattacgcaggagctggcagagattgtggggggtgccgcagccatcggttgat

SEQ ID NO: 272391 - DNA, 886 bp, Unknown
  Bacterial polypeptide expressing nucleotide sequence isolated from the Sargasso Sea
atggcggcaaacggcgacagtcagaccgtatcggaatacatcgttcaccacctgaccaacttgacctatggcaagttgcccggcggttacgagcgatacgacggcagggtcgtggcagagggcggccagtggaccatggcccatcgcgctgatgaaatcaccgccatgggcttcaacgccatccatgtggactccatgatctggtcggtgggcttgggcctcctgttctgttggctctttcgccgtgtcgcggttcgcgccacctccggcgtgccctcaggtctcgtgaattttgtggaaatggtggtcgagtttgtcgacggcaccgtgaaagacaccttccatgggcgcaacccgctgatcgccccactggcgctcaccatcttcgtgtgggtattcctgatgaacctgatggacttgatccccgtggatctgatccctcactcgttaatgttggcgggtgttgagtaccaaaaaattgttccctcaacagaccccaacatcaccatgggcatggccattggcgtatttgtgctgatgctgttttattcgatcaaggtgaaaggcttcggtttcgtgaaagaactcacgctgaacccgtttaaccacccgttatttatccccgtgaacctgtttatggaagtcgtcggcctcttggccaagcccttttctctcgggcttcgtttgttcggcaacatgtatgcgggcgagatgatctttattctgattgcggcgctgttcagcgttgggcttttctggctgctgccggctgcgctgctgcaaatcggctgggcgattttccatattctggttatcacgctacaggcctttatttttatggttctcaccatcgtgtacctcagcatggcgcatgaggaccattgat

SEQ ID NO: 272392 - DNA, 718 bp, Unknown
  Bacterial polypeptide expressing nucleotide sequence isolated from the Sargasso Sea
atgtaccaattcaacgtttaccgaattggtccagaaattaaaataaataacatagatatttcgttcacaaacgcgagtttgtttatggtcataagttcactagcaatattaattatttttaatttaggcacgaagagatctatcataccaaataaaattcaattacttgcggaactcagttactcttttatttcaaaaatgataagtgatacagctggatcgaaagctaagccttacttttctttcatattttctttattcatgtttgttttattttgtaacatgtttgggatgataccatactcttttactgtcactagccacatcattgtaacttttgtattagcagcatttatatttataggagtaacaataattggatttattaaacatggacttggatacttaaaactttttgtgccaagtggagttccaatggttttattgccattaatagttgttatagaaataatttcatacttaagtagaccaattagtttatcagttagattgtttgcaaatatgatggcaggccatacgatgatgaaagtttttggaggtttcgtagttagcttaggaattgttgggggctggctaccactaggtttttcagttgcattaacaggtttggagatattagttgcttttcttcaagcatatgtatttgcaattttaacatgtatctatttgaatgatgcattaaatttacaccattaat

SEQ ID NO: 272393 - DNA, 637 bp, Unknown
  Bacterial polypeptide expressing nucleotide sequence isolated from the Sargasso Sea
atggtcataagttctattgctatattggtggtatttaatcttggttcaaaaaaaaatactttaataccaaataaaatacagttgttagcagaattaagttattcatttatagcaaaaatgataagtgatactgcaggctctaaagctaaaccttacttttcatttatattttcactgtttatgtttgtattattttgcaacatgtttggtatgattccatattcctttacagttactagccatataattgtaacctttgtgctggcagcattcatatttattggtgtcaccattattggttttataaaacacggattaggttatctaaaattatttgttcctagcggtgtaccaatggtattattacctttaattgttgtgattgaaataatatcatacctaagtagaccagtaagtttatctgtaagattatttgcaaatatgatggcaggccatacaatgatgaaggtatttggagggtttgtggtaagtctaggaattattggtggatggcttccactaagtttttcagttgctttgacaggtttggaaatactagttgcttttcttcaagcttatgtttttgcaattttaacatgcatttatttaaatgatgcattaaatttacaccattaaa

SEQ ID NO: 272394 - DNA, 1235 bp, Unknown
  Bacterial polypeptide expressing nucleotide sequence isolated from the Sargasso Sea
gctggacgttaagatttcgcaattctcgatgcaggtcaacgggcagcagctcgtcgaggactgcgacatcgagctcaacgtcggcaggcggtacggcttactgggcgtcaacggctgcgggaagagcaacctgctcgccgcgctcgccaaccgcgagctgcccgtcccggagcacgtggacgtctttcacctgcgcgaggaggcggagccgtcggaccgcacggcactcgacgcggttgtcgaccacatcaagctggaggtgacgcgtttgcacaaactcgaggcgtccacgctcgctgagggcggaccgggggacgagcgcctgcagccaatctacgagcggctcgaggagttggactctgccgcgttcgaggcgcgcgcggctgagctgctgcacggcttgggtttcaaaaaagacatgatgcggagagccaccaaggacatgtccggcgggtggcgcatgcgcgtcgcgctcgcgcgcgcgctcttcgcagcgcccgcacttttgctgctggacgagcccacgaaccatttggatctcagcgcgtgcgtgtggctggagcaccacctcgcaaagtacgacaagtgtctcctggtgatttctcattcacaggatttcctcaatggggtgtgcacacacatcatccgcctcacgaaccgcaagctcaagtattacacgggtgactacgacacctaccagaagacattggaggctgaaaacgtcatacagcagaagaagcacgacaaggagcaggcggatatcaagcaccttcgcgagtttatcgcatcctgcggaacatacgccaacatgatgaagcaggccaactccaagcagaagatcctcgacaagatggaagccgccgggctcacgccgtcgcccaaggcggagaagacgttcgagctggcgttccaagagtgtcgcaagctcccgccgccggtgctccccttcaaggaggtgtcgttttcctaccccggagccgacgtcagcggtgggcacctgctgagtcggctggagtttggtgtcgattgcgactcccgcatcgcgctcgtgggacccaacggcgcgggaaaatcgactctgctcaagctcatgaccggcgacctgattccaaggtccggcagcgtgagccggcaccggaacctgtccatcggacggtaccaccagcacagcgtggacgtcctcgacccggcgtcgcatcccgtcgaatttttccttcaaaagtacgatcacatga

SEQ ID NO: 272395 - DNA, 1327 bp, Unknown
  Bacterial polypeptide expressing nucleotide sequence isolated from the Sargasso Sea
aatgaatagatttataaataatacaattcaaaaagtttcattagttaatggcgagagaaagaaaatcttttctggcaaggtgagtagatacgatggaaacaccattgaatgtagtggatttccagcaacaattggaacactttgcaaagttataactgatgacggaaatcctgcaattgctgaaattattggattttcaaatggcaataacttggcctcaatgcaccagccaaattcaagagttttagtcggctcagaagttgttgcgtttgatgatgggcattccatacctgtaggcccaggaatgcttggaagagttgtggatgctttaggtcagccactagatggaaatatgattcatggagtaaatgaaagttggccattagctggagaaagtatcaacccactcaatagattaccagtgaacagtccactagacgttggagtaagaattataaattcattacttacagtcggcaaaggtcaaagacttggcattattgcaggttctggtgtcggaaaatcagtattattaggtatgattacaaggtttaccacagctgatatagttgtggttggtttaattggagaaagaggtagagaagtaggcaattttgttacttcaaacctaaatgaagatacaaaaaaaagaactgtaatggttgtagagcctgcagataaatctcctttattaagaattagggctgcaaatagagctacagcaattgcagaatactttagagacaaaggaaaagatgttctacttattatggattcactaacacgtgtagctcacgctagaagagaaattggacttgctcttggagagcaaccaacttcaaaaggatacccaccttcagtaatatctttaataccatcattaattgagagaacaggatcaggggaagccgggaaaggaaccataacatctttttacacaattctagcagatggcgacgatcaaaatgatcctgttgttgatacagcgagagctattttggacggccacataatgctttcaagagatcaagcacagctaggaatttatcctgcagttgacgtttcatcttcaattagtagagttatgaatgaaattgttgatgaaaatcatattggagcaagcattaaattcagagagttagttacaacttattctgaaaacaaagacttgttaatgatgggaggttacaaccaaggccaggatcccatattagatcaagcaattgcagcatggcctaaaattacagaatttatcaaacaaaaagaaaataaaaaggaagattttaattcttcatcgtcacagttaatacaaatgtttggcggttaa

SEQ ID NO: 272396 - DNA, 874 bp, Unknown
  Bacterial polypeptide expressing nucleotide sequence isolated from the Sargasso Sea
attggcaggcgataaagaaatattaaataagatcagaagcgtaaaaaatatgcaaaagatcacaagtgctatggagatggtagccgccagtaaaataaaaaaagcacaagatcaaatgaatgcctcagtgccctatgctgagagaataagaagagtcattagccatctcggtgcagctaaccctgactataagcacccatttttgaatgagagagaaataaatcgtgtcggaatcatcgttatcgcaacagatagaggtttgtgtggcggactgaacgtgaatttattcaaaaaggtaatttcagaaattgcgacatatcaaaaggagaagatcgacgttgatctggtattggttggagcaaaagcagtgcagttttttaaacgcctcggaggcaatgttctggcaacagctactcatcttggtgatcagccgaaggtcaatgatttgattggcgcaattaaaattatgctggactcatacaacgatgaaaaaatagataaattacttattgcacacaacgaatttgttagcaccatgagccaaaaacccgtaataaaaacacttctgccggtgggcaaattagatgatgatagcgattcattgcagtcccattgggattatatttatgaaccagacgcaattgatcttctcgatggtgttttaatgagatacattgagtctcaagtatacagaggcgccactgaaaattttgcatgtgaaatggccgcaaaaatggttgcgatgaagtccgcaacagacaatgctggcgatataattgataaattacaacttgtatataacaaagcaagacaagcatcaattacccaagagatttcagaaattgtgggcggagctgctgctgtttcagaataa

SEQ ID NO: 272397 - DNA, 721 bp, Unknown
  Bacterial polypeptide expressing nucleotide sequence isolated from the Sargasso Sea
atgcaccagttcaatgtttacagaattggaccagaaataaaaattggccaagtagatatttcttttacgaatgcaagtctatttatgataataagtgtaattagtatcataataatatttaatctaggatcaaaaaaaaaatctataatacctaataaaatacagctattagctgaattgagttattcatttgtttcaaaaatgattaacgatacagctggttctaaagcaaaaccttatttctcgttcatattttcattatttatgtttgtgctattttgcaatatgtttggaatgattccttactcgtttactgttactagtcatattattgttacatttgtgcttgcatcgtttatttttataggtgttactgtgattggttttttaaagcacggacttggttatctcaaattatttgtacctagtggagtgcctattatattattacctttgatagtaattattgaaataatttcatatttaagtagacctattagtctttctgtaagattatttgccaacatgatggcaggtcatacaatgatgaaggtttttggaggctttgtgattagccttggtattgtaggtggatggcttccactaagtttttctgttgctcttacgggtcttgagatattagttgcttttctacaggcttatgtatttgcaattttaacatgcatttatttaaatgatgcattaaatttacaccattaaa

SEQ ID NO: 272398 - DNA, 433 bp, Unknown
  Bacterial polypeptide expressing nucleotide sequence isolated from the Sargasso Sea
aatggaaataaatccttcagaagttacaaagatattaaaagaacaaatcaaaaattttggagataaagctgaggttactgaagttggtcaagttttatcagttggagacggtatcgctagaatttatggtcttgataatgttgaagctggagagatggttgaattttctgatggctctaaaggtatggccttaaacttagagagcgaaaacgttggtgttgtaatttttggtgatgacagaaatattaaagagggtgatgttgtaaaaagaactggaaatattgttgatactccagttggaaaagaattactaggtagagtagtagatggtttgggaaatccaattgatggcaaaggtgcattagataaaagtgtacaaaagagcagagtagaggttaaagcccctggaattattcctagacaatccgttaat

SEQ ID NO: 272399 - DNA, 436 bp, Unknown
  Bacterial polypeptide expressing nucleotide sequence isolated from the Sargasso Sea
atggaaataaatccttcagaagtaacacaaatattaaaagagcaaattaaaaagtttggagataaagctgaggttacagaggttggtcaagttttatcagtaggtgatggtatagcaagaatatatggattagataatgttcaagctggagaaatggtagaattttctgacggctcgaaaggaatggcattaaacctagagagtgaaaatgtaggtgtagtaatttttggtgatgatagagcagtaaaagaaggtgatactgtaaaaagaactggtgcaattgttgatacaccagttggtaaagaattgcttggtagagtagttgatggtttaggaaacccaattgatggaaaaggtgcgttagataaaagtttaaaaagaagtagggttgaggttaaagctccaggcataattcctcgtaaatctgtaagtgaac

SEQ ID NO: 272400 - DNA, 286 bp, Unknown
  Bacterial polypeptide expressing nucleotide sequence isolated from the Sargasso Sea
atgtcaattaatccatcagaagttacaaaactattaaaagatcaaattaaaaattttggtgaaaaagctgaagtttcagaaataggaaaagttttatcagttggagacggaatagcccgagtttatggcctagataatgttcaggcgggggagatggttgagttcgaagatggatctaaaggaatggctctaaatttggaaagtgataacgtaggagtggttatctttggtgatgatagaaaaattaaagagggtgatactgttaaaagaacaaatgcgattgtag

SEQ ID NO: 272401 - DNA, 877 bp, Unknown
  Bacterial polypeptide expressing nucleotide sequence isolated from the Sargasso Sea
atggcgagtttaaaagaagttaaaagcagaatactgtctgttaattctacacagcagataactaaagctatgaaaatggttgcagctgctaagttaagacgcgcccaagacagagtgattcaattaagaccttattcagataaactacaaactatattaaacaacttaagttccagttctggaagtaattcaaagttattagaagaaagaaaaataaataaagttttattaattgtagttggttcagataaaggtctatgtggaagctttaatagttctgtaattaaatatactaatcagttaattgaaagtaattataaaaaacattatgaaaataaaaagttaacaattttgcctattggtaaaaaaatgtttgatcattacaaaaaaagaaattttctaattttagataacttttggtcaatattaaaaaaatctagttatgatgatgttgccggtatttcaaattttttaatgaatgaatttattttagaaaattatgataaaatagatattattttcaatgaatttaaaaatgttgctgttcaaaacaccatgacttcaacctttttgccagttaatgaagaaaatgatgatgaagataaaaatgatactaattatatatttgaacctaaccaaaaagatattttaaataagttaattcctaaagctctaacagcgaatttgtttaaaacaatacttgagtctaatgcttctgagcaaggagctagaatgacagcaatgagtcaagctaccgataatgcaacagaattattaaaggaactaaaattatcatacaatagatctcgtcaagctgctattaccaaagaaattttagaaattgtaggtggagcagaggctttaaatgctaattaat

SEQ ID NO: 272402 - DNA, 205 bp, Unknown
  Bacterial polypeptide expressing nucleotide sequence isolated from the Sargasso Sea
gaaaatagaaagattcttgtctcagcctttctttgttgcggaagtatttactaatgctccaggaaaatacgtgccacttagtgaaacaattcgaggatttaaaggaattgttaatggagactatgacgagatacctgaacaggctttttacatgaccggtaatattgatgaggttgttgaaaaagctaaaactgaggctgcttaa

SEQ ID NO: 272403 - DNA, 151 bp, Unknown
  Bacterial polypeptide expressing nucleotide sequence isolated from the Sargasso Sea
acaggttctccaggtaaatacgtttcacttgaagacagcatcaagggtttcaatggaatcctaaatggagactatgatgacctccctgaacaagcattctatatggtgggaacaatagaagaagctgtcgagaaagcaaaaacaatgtaat

SEQ ID NO: 272404 - DNA, 313 bp, Unknown
  Bacterial polypeptide expressing nucleotide sequence isolated from the Sargasso Sea
atggaaattaaagctgcagaaatatcgtctgtaattaaagaccaaatagctaattttgaaactaaagcggatgttgctgaggttggaacagtattaagtgttggagatggaattgcacgtgtgtatggtcttgatcaagtacaagctggagagatggtagaattcccaggcggcattaaaggtatggccctcaaccttgaaatggataacgttggtgtttcaatcttcggtgatgatactggaattaaagaaggtgacacagttaaacgtacaggagaaattgttgacgttcctgttggaaaaaattgttagg

SEQ ID NO: 272405 - DNA, 704 bp, Unknown
  Bacterial polypeptide expressing nucleotide sequence isolated from the Sargasso Sea
taatgctcccgagttaatgattggtaacggtaaatcagatacctatcttttggttgttgcaacagctgatcggggtctatgcggtgcatttaattcaaacattgtcaaactggccacacaagaaatcaatgaattaattaaacaaggtaaacaagtcaaaataatatgcataggcaagaagggctatgatctcataagaagaagccatgaagagaaaataattgattttattagtttaaaagaagtaaaaagtattgcatatagcgatgctgagggaataggaaataacatagttacgagatttgaagagggtgaatttgatatatgcaaactgtatttctcaagtttcaagtcagttatttcacagattccacatgctcaacagctaattccgttacccattgacaatgaaatagatagtgatgattcagatactaactccaacttggccatatatgattacgagccagaagaaagtgatgtgatggaagatctattgcctttgaatttgaatattcaagtttttcaggggctcttagaaaatgcagcaagtgagcaaggttctcggatgtctgccatggataatgcgacaagaaatgcaggagagatgatcaataaattgaccttgcaatacaatagaacaagacaagcaataataacaaaagaattaatagaaataatatcaggtgcggaagcactgtaaa

SEQ ID NO: 272406 - DNA, 388 bp, Unknown
  Bacterial polypeptide expressing nucleotide sequence isolated from the Sargasso Sea
atgaagaagctaagtggaggagtgagaactgctttagcacagtacagagagctcgcttccttttctcaatttgcttccgatttagatgatgcaacaaaagcccagctcgcgagcggacaaaggatcactgaattattaaaacagaaacaatatgcaccaatgagtgttgcacaacaatctataagcctatttgctgccgatagaggttttatggatgatgtagaaattgaaaaaattggttcctttgagtcagcactacatgcttatttgacagctgaatatgcagacttagaaaagagcatcaacgaaacaggtgactggaatgatgaagttgaaaaacaattcactgaaattttagaatcgttcaaaaaaacacaaacttattaaa

SEQ ID NO: 272407 - DNA, 1813 bp, Unknown
  Bacterial polypeptide expressing nucleotide sequence isolated from the Sargasso Sea
atgataagaaaaatattaatacccataataataatttttattacattgtttagtatttatgtattaaaacttattttctttaagcctttttcctttaatcattttttagcaagacaatttatagttaataccttagatagccctgaatccctaacatatatagggctattcgaaaaatatggatacagatcttataatggtaaattatcagattattctttagaaaaagatataaaagatttaaaaaaacttaagaaagaatacaaaatacttaattcttatcaagatgaagatctttcttttgatgaattaacaagtaaaaaaattgctcaatttcaaatgaaaaatgaaattgaacaaagaactaaatatccctatcacacttatccactaaaccaaatgtttggtttacatacgcaacttttggaatttatgactgatattcatccaattaaagatgagaaagatgctgaatattatttatcaagacttgaaaagattccagaggtatttagtcaaattcttgaaaaaatggagaaaagaaaagaattaaaaatctatcctccaatctttatggtagaaagagtaataggccaaattgaaaatattattgatattcctattaaagaaaatccacttataacagtttatgaagaaaaactaacttcagctggtatcaatcctaaaacgattaaactttcaaaagaaaaggcggaaaaaattattactgaaaaagttcttcctagttatcaacttttattgatgcatctccatgaaatcagaccaaaagcaaatatcaatcatggagtatggagcttacctgatggagaaaattattattcattaagacttagaataatgacaacttctaactattctgctgatgaaatacataatattggcttaagtgaagttgaaagaataacgaatgaaattatcgatattttggaaacagaaggatatgaaaatattgataatgttggacaagttttaatcgaattaaacgaaagtgagagattcttgttcgaagacaaccaaagctctagaaaggagattattgatatatataataatattgttgatgaatcctatgaattaatgcctcaatattttcgtaaactcccaaaatcaaaagtcatagttaagcctgttccagcatattcagaaaagagtgcagcaggaggatattatcgagggccttcactagacggaaaaaggccaggtattttttatgcaaatttatacgatattaaagctacccctaaatttggaatgaaaacattagcttttcatgaagcgattccaggacaccattttcaaatagctcttaatctagagaacactgatctaggaatctttagaaaatatgctgtaaactctacagcctatactgaggggtgggctttgtatgctgaacagttggctgttgaaataggtttatcagaagatccttatgataaaatagggttccttcaatctgatttattcagggctgtcaggttagtagttgatacaggtattcatcataaaagatggtctcgtgaaaaagctatagattatatgtataaaaaaacaggtaaagctatgagttcagttgttgctgaaatcgagagatatatcgcttggccaggtcaagcttgtagctataaaattggtatgctcaaaattcttgaattaagacaaaatgcaaaagaaaccttgggctcccaatttgatatcagggatttccatgatttcattcttgagaatggagaagtgcctctaactgtcttagagaacaattataaaaaatggataaagaataaaagttaag

SEQ ID NO: 272408 - DNA, 121 bp, Unknown
  Bacterial polypeptide expressing nucleotide sequence isolated from the Sargasso Sea
atggcaagtttagacgatttaaaaaaaagaatatctagcgttaaatctactcagaagattacgaaggcaatgaaaatggttgcagcatcaaagttaagaagatctcaagaaaatgcagaga

SEQ ID NO: 272409 - DNA, 477 bp, Unknown
  Bacterial polypeptide expressing nucleotide sequence isolated from the Sargasso Sea
aatggaaataaatccgtcagaagtaacaaagatattaaaagaacaaataaataaattcggagataaagctgagatttcagaagttggtcaagttctttcagttggagatggtattgctagaatttatggtttggacaatgttcaagctggagagatggtggaattttcagatggttctaaaggcatggctttaaatttagagagtgacaatgttggagtagtaatttttggagatgataaagctgttaaagaaggagatacagtaaaaagaacaggtgcaattgtggatacccctgttggtaaagagttattaggtagagtagttgatggattaggaaatcctattgatggaaaaggagcattagataaaagtattaaaagaagcagagttgaggtcaaagcaccaggaattattccccgtaaatcagtaagtgaaccaatgcagactgggttgaaatctattgatagtttagttcc

SEQ ID NO: 272410 - DNA, 234 bp, Unknown
  Bacterial polypeptide expressing nucleotide sequence isolated from the Sargasso Sea
aatgcctagccttgatgatttaagaaagagaatttctagtgttaaatctacccaaaaaattacaaaagctatgaaaatggtagcggctgcgaaactacgtaaagctcaggaaatggcagaaaaaggtaggccttatagcgaaaaaatggatacaattatccagaatttaagcaaagctattaatgacgattctaacgctccaaaactgttagtaggaagtggcgaagacaaaaa

SEQ ID NO: 272411 - DNA, 428 bp, Unknown
  Bacterial polypeptide expressing nucleotide sequence isolated from the Sargasso Sea
aaatatttctaataagcttcaagaattatactttgagagtaaatttgataaatgcatattagtttttaataaatttaaatcagctatttctcaagaagtaacacaacaacaattaataccattagacgtttcaaattctgaaaaggaagaagaaaaagaaaattcttcaaatgcaatttatgattatgagcctgatgaagaaacaattttaaaggatttacttccaaaaaatgtttctattcaaatattcaaagtacttttggaaagtgatgcaggggagcagggagcaagaatggctgcaatggacaacgcaacccgaaacgcaggtgaaatgatagatagtttaacgttaaagtataatagaacgcgacaagcgttcattacaaaagaattaatagagattatttctggagctgaatcaatataaa

SEQ ID NO: 272412 - DNA, 220 bp, Unknown
  Bacterial polypeptide expressing nucleotide sequence isolated from the Sargasso Sea
tttgaaagatttacttcctaaaaatgtttctattcagatttttaaagtcttactggagagtgatgcaggagaacatggagcaagaatggctgcaatggataatgcaacacgtaatgccggtgagatgattgatagtttaacattaaaatataacagaacgcgacaagcgtttataactaaagaattaattgaaattatttctggagctgaatcagtttaa

SEQ ID NO: 272413 - DNA, 499 bp, Unknown
  Bacterial polypeptide expressing nucleotide sequence isolated from the Sargasso Sea
atggctttgctgccctttccactcccgttcgctgaactggaagtgggccaccacctgtattggcagatcggcgatctgtacctgcatggccaggtgttcctgagctcctggatcctgatcggcatcttgctggttcttgttctggctggcacccgcaacatgcagcgcgaccccctgggtctgcagaacctgctggagttcctctggaacttcattcgcgacatcgctcgcgacaacatcggcgagaagtactaccgcgactggctgccgttcatcggcactctgttcctgttcatcttcgtgagcaactggggtggcgcgctgatcccctggaagatcatcgaacttcccgagggtgagctcggcgctcccacagcagatatcaacaccacggtggccatggctctgctggtgtccctggcgtatttctatgccggtctgagccgcaagggtctgcgcttcttcgagctgtacgtggagccgaccccgatcatgctcc

SEQ ID NO: 272414 - DNA, 254 bp, Unknown
  Bacterial polypeptide expressing nucleotide sequence isolated from the Sargasso Sea
tatggcaagtttagatgatttaaagaaaagaatatctagcgttaaatccactcaaaaaattacaaaagcgatgaagatggttgcagctgcaaaattaagaagagcgcaagaaagcgctgagaaaggtagaccgtactcagataagatgaataatattattattaatttatctaaaagtatgtcggataaggaaaattctcctaaattacttgtgggttcaggagatgaaaaaattcatttatgtgttgtaatga

SEQ ID NO: 272415 - DNA, 319 bp, Unknown
  Bacterial polypeptide expressing nucleotide sequence isolated from the Sargasso Sea
aatggacatacaaccatcagaaatatcaaaaatactcaaagaagaaattaaaaattttggatctgactctgaaattacagaagttggtcaagttctttcaattggagatggtatcgcaagaatttatggacttgataatgttcaggccggtgaaatggtaatgttcgatgatggtacaagaggaatggcccttaacctggaggatgataatgtaggtgttgtgctatttggaagtgacgcaaatattaaagaaggtgatacagttaaaaggacaaattctattgttgatgttccagtaggtaaagagctgctggggaga

SEQ ID NO: 272416 - DNA, 257 bp, Unknown
  Bacterial polypeptide expressing nucleotide sequence isolated from the Sargasso Sea
ggatagttatgaatttgaaccagatgaagatgaaattttaaacaatttattgccaaaaaatatttcaacacaaatatttaaagcaatgttagaaaattcagctagcgaacagggctctagaatgagtgcaatggataacgcaacccgaaacgcaggtgaaatggttgacaaacttactattgagtataatagaagtcgtcaagcagcaattactaaagaactaatagaaatcatatcaggagcagaaagtttataat

SEQ ID NO: 272417 - DNA, 286 bp, Unknown
  Bacterial polypeptide expressing nucleotide sequence isolated from the Sargasso Sea
tatgagcaaagggataattacacaagttattggagcggtagtagatgttaaatttgacggcgaactgccagaaattttaacagcattagaatgtaaaaacggtgataacagactagttttagaggtagcacaacacttaggtgaaactactgttagaacaattgctatggatgctaccgaaggattaaaaagaggtgatgaggttattaactccaatgctcctattcaagttccagttggacctgaaacacttggaagaattataaatgtaattggagaacaatag

SEQ ID NO: 272418 - DNA, 238 bp, Unknown
  Bacterial polypeptide expressing nucleotide sequence isolated from the Sargasso Sea
accagatgaagatgagattttgagtaatttattgccaaaaaatatttcaacacaaatattaaaagcaatgttagagaattcagctagcgaacaaggatcaaggatgagtgcaatggacaatgcaacccggaacgcaggtgaaatggttgacaaacttactatccagtataatagaagtcgtcaggcagcaattacaaaagaattaatagaaatcatatcaggagcagaaagtttataa

SEQ ID NO: 272419 - DNA, 961 bp, Unknown
  Bacterial polypeptide expressing nucleotide sequence isolated from the Sargasso Sea
atgactaccaaaaatgaagattttataattgaagctgacaatctgacccattattatgggccccaaccagccatagaaaatgttgacttcaaggtcaaacgcggtgaaattttaggcttcctaggacccaatggagctggaaagaccaccaccatgagaatcctcactggatatatgcctcccactcgtggcaatgtagaaattgatggaatggacatagtaaaagattcgctagaatgccggaaaaaaataggatatctacctgaaactgtacctcttcacacagatatgactgtcaaaaactacctcacattcatgggttcactaagagggatgtcgcgacgaagtattaatgaccaaattaacaatgtaattgaaatatgtagattgcaggactattacaaaaccatagtcggcaaactttcaaaaggatatagacaaagagtcgggatagcccaagcgatacttcatgaaccagagatattagtcatggatgaacccacgatcggaattgatccgatccaggtagttgaaaccagaaggcttattcaagatatcggaaaacagcaaacagtagtcctcagtagtcatatcctgcctgaagtaagtatggtttgtggcagagtgttgatcattaaccaaggacaaattgtcgcagaggatactcctgacaacttagcaactagactacaggcaacccaacagatcctagttgaaatttctacgaccagtaagaaaatacagccaatactcgaaaatatagaaggtgtcacggatgtaaggcgacgccgtaacacagacaacataacttttgaaataacagtagccgatggatacgacgttcgagacgaaatatcaaaaatcattatagaaaatgactgtagtttgttaagcatgcagttaaattctatgagcctcgaacagatattcctcaaacttactaccacagagggagcgtaga

SEQ ID NO: 272420 - DNA, 258 bp, Unknown
  Bacterial polypeptide expressing nucleotide sequence isolated from the Sargasso Sea
atgaaaattatgaatttgagcctgatgaagatgagatattaggaaatttattgccaaaaaatatttcaactcagatttttaaagcgatgttagaaaattcagctagcgaacaaggttcaagaatgagtgcaatggataacgcaaccagaaacgcaggtgaaatggttgacaagcttactattcaatataatagaagccgtcaggcagcaattacaaaagaactaatagaaattatatcaggagcagaaagtttataat

SEQ ID NO: 272421 - DNA, 274 bp, Unknown
  Bacterial polypeptide expressing nucleotide sequence isolated from the Sargasso Sea
aaaagaaaatataacacaagtaattggtgcagtcgttgatgtaaaatttgatggagaactgccagaaatattaacagccttagagtgtgataatggaggtaatagattagttttagaagttgcgcagcaccttggagagtcaagtgttagaaccattgctatggatagtacagagggactaaaaaggggtgatgaagtaaaagatactaggtgctccaattcaagttccagtaggtccagaaacattaggacgaattgtaaacgttataggtga

SEQ ID NO: 272422 - DNA, 424 bp, Unknown
  Bacterial polypeptide expressing nucleotide sequence isolated from the Sargasso Sea
atgaacatccaagcatcagaaatatcagctattttaaaagaacaaattaaaaaatttggaaaagaatccgaagttgcagaagtcggcaccgtgttatcagtaggtgatggtatagcaagagtttttggacttgataatgtacaagctggtgaaatggttgaatttcctaatggaataaggggaatggccttaaacttagaaattgataatgttggtatcgttatttttggatctgacagagacatcaaagaaggggatcaagtcaaaagaacaaaatctattgtagatgtgccagtaggtgatgaacttttgggaagagttgttgatggtttgggtaatccacttgatggaaaaggtcccattaaaacaaaaaagaggtctgtagctgatgtaaaagcacctggaataattccaagaaaatcag

SEQ ID NO: 272423 - DNA, 550 bp, Unknown
  Bacterial polypeptide expressing nucleotide sequence isolated from the Sargasso Sea
tctgatgaagaaaaaaccctaaaaattataacagttggatcaaaaggatacgatcaacttaaaagattatacaaagatcaaattatagaaaaaatttcattcaaagattcaaaaaatataaattactttgatgctgagaaagtcggtaagattataattaaaaagtttgagaataaagaatttgatatatgtactatattttataacaaatttaaaaacgtaattactcaaatacctcaagaacaacaaattatccctttaaaatcatctggcgaagaaggtaattcatcaaaagataattatgagtttgaacctgaggaagatgaaattttaagtaatttactgccaaaaaatatatcaacacagatttttaaggcgatgttagagaattcagctagcgaacaaggttcgagaatgagtgctatggataatgcaactagaaacgcaggtgatatggttgataaactgactattgaatataatagaagtcgtcaagcagcaataactaaagaactaatagaaataatatcaggagcagaaagtttataat

SEQ ID NO: 272424 - DNA, 481 bp, Unknown
  Bacterial polypeptide expressing nucleotide sequence isolated from the Sargasso Sea
tgggaaatatattattaaaaaaataaatttaaaggataaaaaaaaattaacatttttagatgcagaggaaattggaaaacaaatcgttgagttatttaaaaataaagaatttgataaatgctttatattttataataaatttaaaaatgttatttcacaaattccacaacaacaacaagtaatacctgccaagatagaggaaaaagataaaaaacaggaagaaatgtcttcatatgaatttgaacctgaagaggatgaaattttagacgatctactaccaaaaaatatatctacacaaatatttaaggcctttttggaaaattcagcgagtgaacaaggttcaagaatgactgcaatggataatgcgacaagaaatgctggagatttagtagataagttgacaattaactacaatagaagcagacaagcttctatcacaaaagaattaattgaaataatatctggagctgaaagtttataa

SEQ ID NO: 272425 - DNA, 172 bp, Unknown
  Bacterial polypeptide expressing nucleotide sequence isolated from the Sargasso Sea
tatgttagaaaattcagcaagtgaacaagggtcaaggatgacagcaatggataatgcgacaagaaacgctggagatttagttgataaactcactattcagtataatagaagtcgtcaagctgctattacaaaggagttaattgaaataatatcaggagctgaaagtttataa

SEQ ID NO: 272426 - DNA, 289 bp, Unknown
  Bacterial polypeptide expressing nucleotide sequence isolated from the Sargasso Sea
tatgagcaaaggaataatcacacaagttattggagcggtagtagacgtaaaatttgaaggagaattaccggaaattttaacagcattagaatgtaaaaatggtgacaatagattggttttagaggttgctcagcacttaggagaaactactgtaagaactattgcaatggatgctactgaaggattaaaaagaggagatgaagttataaatacgaatgctcctatccaggtacctgttggaccagaaacactagatagaattattaatgtaattggtgagcccaattga

SEQ ID NO: 272427 - DNA, 136 bp, Unknown
  Bacterial polypeptide expressing nucleotide sequence isolated from the Sargasso Sea
aatgagcgctatggacaatgcaactagaaacgcaggtgaaatggttgataagcttactattgaatataatagaagtcgtcaagcagcaattactaaagaactaattgaaattatatcaggagcagaaagtttataa

SEQ ID NO: 272428 - DNA, 265 bp, Unknown
  Bacterial polypeptide expressing nucleotide sequence isolated from the Sargasso Sea
atgagaaaaggacaaataacacagattattggggcggtagtagacgtaaaatttgacggagaactaccagaaattttaactgcactagagtgcgataacggtggaaatagattagttttagaagttgcacaacacttaggggagtcaagtgttaggacaattgcaatggatgcaacagaaggtcttaaaagaggggacgaggtaacagacacagctgctccaattaaagtcccagtaggtccagagactcttggaagaatataaa

SEQ ID NO: 272429 - DNA, 290 bp, Unknown
  Bacterial polypeptide expressing nucleotide sequence isolated from the Sargasso Sea
tatggcattaaaaggtaaaatatcgcaagtaatgggtgcagttgtcgatgttgtcttcgaccaaggagatttaccagacatttataatgctttgtccgtagatagaggcgaagaagggaagttagtactagaagttgcacagcatttaggagattcttctgtccgtactgtggcaatggactctacagatggattgatcagaggtacagaggtcatcgacagtggttcaccaatttcagtgccagtaggtccagatacattaggaagattatttgatgttttgggtaata

SEQ ID NO: 272430 - DNA, 267 bp, Unknown
  Bacterial polypeptide expressing nucleotide sequence isolated from the Sargasso Sea
aatgccaagtttagatgatttaagaaaaagaatttccagcgtaaaatccactcaaaaaataaccaaagcaatgaaaatggtggcagcagctaaacttcgtaaagcacaagaaatggctgaaaaaggcagaccttatagtgacaaaatggatgtgatcattcagaatctgagtaaagcaataaatgatccatctaatgcaccaaggcttttagttggaacaggagaggataaaacacatctttgtgttgttatgacagctgaccgagg

SEQ ID NO: 272431 - DNA, 550 bp, Unknown
  Bacterial polypeptide expressing nucleotide sequence isolated from the Sargasso Sea
ttgaaagagaacaaaacgttaaaaattataactgttggatcaaaaggttatgaccaattaaagagacaatacatggaaaatataattgaaaaaatttcatttaaagagtctaaaaatgtaaattattttgatgctgataaagtaggaaaaattattattgatagatttgaaaaaaaagaatttgatgtttgcacaatattttataatcaatttaaaaatgttattacgcaaataccacaagaacaacaggttataccattaaaatcaaaggaagaaaaagaaactgatttaaataattcttatgaatttgagccagatgaagatgaaattctaagtaatttgttacctaaaaatatttctacacaaatttttaaagcaatgttagaaaattcagcaagtgaacaaggatcaagaatgagtgctatggacaacgcaacacgtaatgcaggggaaatggttgacaaacttacgattcaatataacagaagtcgtcaagcggccattacaaaagaattaattgaaataatatcaggagcagaaagtttataat

SEQ ID NO: 272432 - DNA, 172 bp, Unknown
  Bacterial polypeptide expressing nucleotide sequence isolated from the Sargasso Sea
gatgttagaaaattcagctagcgaacaaggttcaagaatgagtgcaatggataacgcgactaggaatgcaggtgaaatggttgacaaacttactattcaatataatagaagtcgtcaagcagcaataaccaaagaattaattgaaattatatcaggagcagaaagtttataa

SEQ ID NO: 272433 - DNA, 280 bp, Unknown
  Bacterial polypeptide expressing nucleotide sequence isolated from the Sargasso Sea
atgagttctggaaagatagttcaaattattggtgctgtattggatgttgaatttccaagcgaatcaataccaaatgtttacgacgcattgattgttgagggtgaaggcataaacaccactctcgaagtacagcaacaattgggtgatggtgttgttagaacgatcgccttgggttcaactgatggattgcaacgcgggctatctgtaagaaatacaggagaagcgatttcaattccagtaggaactaaaactttaggacgtattatgaatgtgttgggtg

SEQ ID NO: 272434 - DNA, 362 bp, Unknown
  Bacterial polypeptide expressing nucleotide sequence isolated from the Sargasso Sea
aatggcaatttctctcaaagttttagctcctaataaaaatgtttatcaaggcgaagctgaagaagtaattcttcctagtactacaggtcaacttggtgtacttccaggacatatttctttggttaccgctatagatattggcgttttaaggctaagaatgaattctcaatggaaatcaatagctttaatggggggcttcgctgaaattgaatcagatgaagtaatagttttagtaaacaatgcagaaattggatctgaaattaatgttgaaaatgctgaacaagatcttaaagaagcaaaattagcagttagtaaattctctgaaaatgaaaaaagtccagacaaaataaaagcccttaatg

SEQ ID NO: 272435 - DNA, 764 bp, Unknown
  Bacterial polypeptide expressing nucleotide sequence isolated from the Sargasso Sea
ctatgccgaacgtatggaacgcatgctgggttcgcttgccggatcgatggcatccgccgaaggcgcatcgaagcttctggccggtaccggcaaacaggatgtccatctgatcgtgatgatgacgtccgaccgcggtctttgcggcgcgttcaattcatcgattgtgcgcgacacccgcaggatggtcgaggaacttcaggcgggcggcaaggaagttaaaattctctgtgtcggccgcaagggctgggcacaggttcgccgtgaatacgcgccgctgatcgtcgctctgatcgaaggcatcggccggccacatttgagttttgacgatgcccaaggaatatcgaaccgcattctcgagatgttcgaggccggtgagttcgatgtctgcacgctcgtctataaccgtttcaaatcggtgatttcacagatcgtgacacggcagcaggttatcccgtttgccgtggacgtgccggcggaaggcgaagaggaagaaaccggcggtgccgcggtcgtatacgattacgagccggacgaaaccgaaattctggaagtgctgctgccccgcaatatgagcgtgcaggtcttccgctcgcttcttgaaaacaacgccagcgaacacggtgcccggatgagcgcgatggataatgcgacgcgcaatgccggcgaaatgatcgattcgctgacactgaattacaaccggacgcgtcaggcgttcattacgaaagaacttatcgaaatcatctccggcgccgaggccgtttagg

SEQ ID NO: 272436 - DNA, 513 bp, Unknown
  Bacterial polypeptide expressing nucleotide sequence isolated from the Sargasso Sea
gaacaaaaggttatgatcaattaaaacgtgtttatggtgataatattatagagagaatttctttcaaggagtcaaaaaatgtaagttattttgatgcagataaagtaggcaagacagtaatcgaaaaatttgaaaataaagaatttgatgtgtgcgtaattttttacaaccaatttaaaaatgtaataactcaaattccgcaggagcaacaaattattcctttaaaaacaatgaatgaagaaacaaattcgtcagatgataattatgaatttgagccagaagaggatgaaatattaagtaatttattgcctaaaaatatttcaactcagatttttaaagcgatgttagagaattcagctagcgaacaaggttcgaggatgagtgcaatggataacgcaaccagaaacgcaggtgaaatggttgacaaacttactattgagtacaatagaagtcgtcaggcagcaattactaaagagttaatagaaataatttcaggagcagaaagtttataat

SEQ ID NO: 272437 - DNA, 172 bp, Unknown
  Bacterial polypeptide expressing nucleotide sequence isolated from the Sargasso Sea
aatgttagaaaattcagctagcgagcaaggttcaagaatgagtgcaatggacaatgctaccagaaacgcaggtgaaatggttgataagcttactattcagtataatagaagccgtcaagcagcaattactaaagaactaattgaaatcatatcaggagcagaaagtttataa

SEQ ID NO: 272438 - DNA, 340 bp, Unknown
  Bacterial polypeptide expressing nucleotide sequence isolated from the Sargasso Sea
atgagtctttcagcaatggaattatcaaatttacttgagcaacgcatttcaaaccattattcagatttaaatattgacgaaattggaagggttctttcagttggagatggaattgcgcgtgtttatggattaaataaaattcaatctggagaaatggttgaatttgacagtggaattaaaggaatggcgcttaatctagaaaacgacaatgtaggaattgtttgtttcggaagtgacacaaatattcgtgaaggtgacatcgtaaaaagaactggatctattgtagatgtcccagttggaaaaggtatgcttggacgtgtagttgatgggttaggaaacc

SEQ ID NO: 272439 - DNA, 274 bp, Unknown
  Bacterial polypeptide expressing nucleotide sequence isolated from the Sargasso Sea
gatattatagctattcttggaatggatgaattatctgataatgataagcttactgttgcaagagctaggaagatccaaaagttcatgtctcaaccgttttttgttgctgaacaatttactggtacaccaggaagatatgtgagcctagaggatacagtatctgggtttgatgccatcctaaaaggcgaggtcgatgagttgccagaaaatgcatttgcttatgtaggtacaatagacgaagcaattgaaaagcataaaaagtcagccgcctaat

SEQ ID NO: 272440 - DNA, 292 bp, Unknown
  Bacterial polypeptide expressing nucleotide sequence isolated from the Sargasso Sea
atggaaataaaagctgcagaaatatcatcagtaataaaagatcaaatatcaaattttgaaactaaagctgatgttgctgaagtaggaactgttttaagtgtaggagatggtatagctcgtgtttatggattagatcaagttcaagcaggtgaaatggtagagtttcctggcggcattaaagggatggctcttaatcttgaaatggataacgtaggtgtaagtatatttggcgatgatactggaataaaagaaggtgacacagtaaagcgtacaggagaaattgttgatgtgc

SEQ ID NO: 272441 - DNA, 862 bp, Unknown
  Bacterial polypeptide expressing nucleotide sequence isolated from the Sargasso Sea
atgtctggattaaaagagataagaaatagaattagctctgtatcttcaacgatgcagattaccaatgctatgaaaatggtttctgcagctaaattgaagaaggctcaagactcaatttctgctactcttccatattctaataagctctccgagcttataaaaaatatttctgcctctacagactccgatgatactaatccactatttgagaaaagagagtcaaagaatgttctaatcattgccataacatccaataaaggtttgtgtggaggatttaattctaatattataaaagaagttaataatattaatacaacaagtgcatctaaaagagtcgatttattaactattggaaaaaaaggcgatgacattctttcaaagaagtttgaggttataagttcacataatgatgtttatgataattttaattataataaaatcaaggaaattgctgaaacggtaatgcagaaattttctgataaggaatatgatgaagttacacttgtttacaatcattttaaaaatgcagcaactcaaatagtaactaaagaacagtatcttccaattgaagagagtgctgatgaaaataattctgtatcgggagattatatatttgaaccaaataggcctaaaatcttaaatgaattaattcccaaatcgttatctatccagcttttcaaggcaatctcagattctattgcaggagagcatggagcaagaatgactgcgatgcacaaagctactgataatgcatctgagttaagagatcagcttaagctaacttataataaagcaaggcagacagcaattacaaatgaaatcctcgaaattgtaggaggtgcagaagcgctaaactcttaag

SEQ ID NO: 272442 - DNA, 862 bp, Unknown
  Bacterial polypeptide expressing nucleotide sequence isolated from the Sargasso Sea
tatgtcaggattaaaagagataaggaatagaattagctcagtttcttcaactatgcagattaccaatgccatgaagatggtttcggctgcaaagttgaagaaagctcaagattctattactgccacacttccttattcaaataaactttcagaattggtcaagaacatttcagcctctatcgattcagttgattctaacccattatttgttgcaagagaggtaaaaaaaccacttataatagttatcacatctaataaaggtctttgtggtggatttaattctaatataataaaggaagtacataatattagcactgaatacggaagtaacaggcctgatcttttgactataggcaagaaaggtgatgatatacttaaaaagaaatttaatgtgatcagctctcataatgatttgtttgatgagttttcttatttaaaagtaaaatcaatagctagtaaaattatggagctttataccgacgaaaaatatgatgaggtgatactagtgtataatcattttaaaaatgcagctactcagattattactaaagagcagtttttaccaatttctgaaaataatgatgataatgtatcaacttcaggagattatatttttgaaccaaatagggaaaagattctagaggaattgattccaaagaccttatccattcaattattcaagtctatatctgattctattgctggtgaacatggagcaagaatgacagctatgcataaagcaactgataatgcttcagagcttagagaccaattgaaactcacatataataaggccagacaaactgcaataaccaatgaaatattagaaattgttggaggtgctgaggctttaaactcttga

SEQ ID NO: 272443 - DNA, 193 bp, Unknown
  Bacterial polypeptide expressing nucleotide sequence isolated from the Sargasso Sea
ttcaactcaaatttttaaatcgatgttagagaattcagctagcgagcaaggttcaagaatgagtgcaatggacaatgcaaccagaaacgcaggtgaaatggttgacaaacttactattgagtataatagaagtcgtcaggcagcaattactaaagagttaatagaaataatttcaggagcagaaagtttataa

SEQ ID NO: 272444 - DNA, 1888 bp, Unknown
  Bacterial polypeptide expressing nucleotide sequence isolated from the Sargasso Sea
aatgattcgtcttgaaaaattatccaaatctttccctgatggagatctgtttaataatgtaaatgtatctatcaaaccggggatgcgtatcggccttattgggccgaatggatccggaaaaactacattgctccgtataatattggggaaagaatcgccggattctggaaatgtacacgttgataaatccaccacaatcggatatcttgcacaggatattgtggccggtactggccgatccatattagaagaagtgttggtttcttatccggaagtccgtgagttggaaggaaagatgcttgctttatccgaagctatttccaaagaccataacaatatggatttggtgtataaattgggcgatgcacagcatcggtttgaagctttgggtggttggaatcttgaagataaggcaaaaaagattttaagtggacttgggtttgccgatgaaaaatttactgaacctatggatgtttttagtggtggttggcgaatgcgcgtagctttggcatctattctcttacagcaaccggatattctttttcttgatgagcctacaaaccatttagatttggaagcaaccatctggttggaatcttttttagcaaattggaaaggcgggatggttatgattagccatgaccggacatttttagatcgatccataaataatatccttgaaattgatcttaaaaaaattacgctgtaccatggcaactatacaaaatatactgaagaaaaagcattacgtattgaacagcataggaatgcctttcggaatcagcaaaaacaaattaaagatacggaacggtttatagaacggtttcgatcaaaaaataccaaagcaacccaagttcaaagtcgggtaaaaatgctggataaaatggaaaagattgaagcacccacaaaacaaaaccattccatgaatttgagattgccccagccgagccgatcgttgttgaatgtggcatcttgcaggaatgtgactaagcactatggcgatattgaagtttttaacaatttagatatggtggtagaacgagggcaaaaaattggactagttggccataatggtgccggtaaatcgactttattgaaaatactggcaggtgtggaatctgtaacatccggcgctgtccgaataggctccagcatggttagtgcttactatgcccagcatcaattggaaatattaaatcccaatgaaacagtttttgaatcaatccaaaaagtaagccaagggtggagtgaaacggaaatgagaacttacctaggtagtttcatgttttccggagatgagatagaaaaatatgtaaaagtgctttctggtggtgaaaaagcacgagtggccttggcaagaatgttggttcagccatttcatttactcttgttagatgagcctacaaaccatttggatatgatgactcgaaatgttgtagaacgtgcgttagtccaattctccggctccattgtttgtatttcacatgatcgtcactttttaaataatgtaaccaatcttacttgcgaagttgggaatggtggcatccgattatttgaagggaattacgaatattacaagtggaaaaaacaagatgaaaaacaaagtaaatctgaaagatcaaaagttaaggttgaaccaaaagaaaaatccgattataaagaacggaaaaagattaggaatcgtttaaattggattgaaaaacgatttacaactattgataaggagattaaaatagaacgagcattaactaaaaaccctgatcatgttgatgattatgaaatgcttgaacgaacactaaaaaaaattaatatattagaacaagaatatttggatttgatggaagagcaggagcttctccattctaatcatttgcttacttcgttataa

SEQ ID NO: 272445 - DNA, 427 bp, Unknown
  Bacterial polypeptide expressing nucleotide sequence isolated from the Sargasso Sea
aattattttgatgcagataaagtaggaaaaattattattgaaaaatttgaagcaggtgaatttgatgtttgtacaattttttacaataaatttaaaaatgtaattacacaaatcccacaggctcaacaaataattcctttaaatgatgagggaagtgaaaatagttcagatgaaagttacgaatttgaaccagatgaagatgaaattttgagcaatttgttgccaaaaaatatttcaacacaaatatttaaggcaatgttagagaattcagctagcgaacaaggatccagaatgagtgcaatggataatgcaacccgaaacgcaggtgaaatggttgacaaacttactatcgaatataatagaagtcgtcaggcagcaattactaaagaactaatagaaatcatatcaggagcagaaagtttataat

SEQ ID NO: 272446 - DNA, 283 bp, Unknown
  Bacterial polypeptide expressing nucleotide sequence isolated from the Sargasso Sea
atgaaggagaagaaaactagttcagaagaaagttacgaatttgaaccagatgaagatgaaattttaagtaatttattgccaaagaatatttctacgcaaatatttaaggcaatgttagagaattcagctagcgaacaagggtctagaatgagtgcaatggacaatgcaacccgaaacgcaggtgaaatggttgacaaacttactatcgaatataatagaagtcgtcaggcagcaattacaaaagaactaatagaaatcatatcaggagcagaaagtttataat

SEQ ID NO: 272447 - DNA, 742 bp, Unknown
  Bacterial polypeptide expressing nucleotide sequence isolated from the Sargasso Sea
acttggtgatattttaaaaaatctttcagcctctttttctggccaagataatgctccagaactcttagccggtaatggaaatgataacagccatcttcttgttatagctacttctgaaagaggtttgtgcggaggttttaatacatctattgtgaaattggcaaaagatcatatttctaaattaaaatctgagggcaaagaagttaagttaattatcattggaaaaaaaggtaaggaattacttcaaagagattatggagaggatataattgagatatatgatttttctgaagttaaagatataggctttgcagaagctgaaaaagtatcagaaaatattctttcattatttgaagacaataagtttgatgtatgcagtttatattttgctagatttgagtcagttttaagccaagtacctatttgccagaaattaataccttttgatatcgactcagaggctcaagaagataatgatgttgaaaatatttgctatgaatatgaacccgatgaggaagacatacttagagaacttcttcctaagaatttatcagtacagattttaagagctttactagaaaatgttgctagtgaatttggagcaaggcttactgctatggataatgcaacgagaaatgcttcagaaatgattgatgatcttacgatcacatataataggtcgcgtcaggcgtctattacatcagaattaattgaaattatttcaggtgctgaggcgctataa

SEQ ID NO: 272448 - DNA, 763 bp, Unknown
  Bacterial polypeptide expressing nucleotide sequence isolated from the Sargasso Sea
tatggtagcacaaggaaaaattgtatggattagtggacccgcagtaaaggctgacggtatggctgatgcaaaaatgtatgaaaccgtatcagtcggagatgcaaaattaatcggtgaggtaattcgtcttactggtgacgtagcattcattcaagtttacgaatcaacaagtggtctaaaaccaggtgaaccagtaattggtaccggtaacccacttagtgttttattgggtccaggaattattggtcaaatttatgatggaattcaaagacctctaaaggatttggcagcaaaatcaggttcattcattggaagaggtatcacaaccactcctgttgatatggaaaagcaataccatttctcaccatctgtagcagttggtgatgaagtagaggctggaaacatcattggaactgttccagaaacatcattaattgaacataaaattctagttccaccagatcacaaaggtggtaaaatcacaaacattgtttcagaaggtgattatgcattagaaactgaaattgcaactgttgaaaaagatggtcaatcattcccattgaaaatgtatcacaaatggcctgtcagacaaccaagaccatatctcaaaagatatgatccaacagttccgttacttacaggtcaaagagttatcgacacattcttcccattagcaaaaggtggtactggttcaattccaggcgcatttggtacaggtaaaactgtaacattacatcaaattgcaaaatgggctgactctcaa

SEQ ID NO: 272449 - DNA, 550 bp, Unknown
  Bacterial polypeptide expressing nucleotide sequence isolated from the Sargasso Sea
atggcaaatctcaaagagatccgcgaccggattaaatcggtcaagaacaccagaaaaatcaccgaggccatgcgccttgttgctgcagccaaagtgcgtcgtgcacaggagcaggtgttgcgcagtcgtcccttcgcggatcgattggcgcgcgtgctggagaatctccagtcccgcatgcagatggaagatgctgcagctcctctgatggagcaacggccagtgcagagcgtcaccttggtggcctgcaccggtgatcgaggcctctgtggtggatacaactccaacatcatcagacgcactgagcaacgctttgctgagctcaaaggcaaaggctttgatgtgaaaatggtgctgatcggccgaaaggctggcagttacttctccaaccgcaattatccgattcaagccacgtttgctggcttggagcaggtaccgacggctgatgaagccaataccatcgccaccgaccttctggctgaattcattgcccagagtagtgatcgtgtagaaattattttcaccaagttcatcaatttggtgagttgta

SEQ ID NO: 272450 - DNA, 251 bp, Unknown
  Bacterial polypeptide expressing nucleotide sequence isolated from the Sargasso Sea
ttatgaatttgaacctgatgaagatgaaattttaagcaatttattgccaaaaaatatttcaacacaaatatttaaagcaatgttagagaattcagctagcgaacaggggtctagaatgagcgcaatggacaacgcaacccgtaacgcaggtgaaatggttgacaaacttactattgagtataatagaagtcgtcaggcagcaattactaaagaactaatagaaatcatatcaggagcagaaagtttataat

SEQ ID NO: 272451 - DNA, 262 bp, Unknown
  Bacterial polypeptide expressing nucleotide sequence isolated from the Sargasso Sea
tatggctagtctagacgatttaaaaaaaagaattaccagcgtaaaatcaacacaaaaaattactaaagcaatgaaaatggttgcggcagctaaactaaaaagagctcaagaaagtgcggaaaaaggaagaccatattctcaaaaaatgaacaatgtgatactaaatttatctaatggaatatctgacaaagagaatgccccaaagttattatctggcacaggaaaagataaaattcatttatgtattattatgacatcatga

SEQ ID NO: 272452 - DNA, 216 bp, Unknown
  Bacterial polypeptide expressing nucleotide sequence isolated from the Sargasso Sea
tatggctaataatttaactggaaaaatatcacaagttcttggagctgttgtagatgtagagttcgatggtgaacttcctgcaattatgaatgctctagaagttgataacaacggaacaagattaatgctagaggttgctcagcacttaggtgaaaatgctgttcgtacaattgcaatggatacaactgatggattagtaagaggtcaaacagcgac

SEQ ID NO: 272453 - DNA, 169 bp, Unknown
  Bacterial polypeptide expressing nucleotide sequence isolated from the Sargasso Sea
atggcaagtttagacgatttaaaaaaaagaataacgagcgtaaaatcaactcaaaaaattaccaaagctatgaaaatggttgctgctgctaaacttagaagagcccaagaaagtgctgaaagaggaagaccttactctcaaaaaatgaataatattatcctaaaccttt

SEQ ID NO: 272454 - DNA, 164 bp, Unknown
  Bacterial polypeptide expressing nucleotide sequence isolated from the Sargasso Sea
gaattcagctagcgagcaagggtctagaatgagtgcaatggataatgcaacccgaaacgcaggtgaaatggttgacaaacttactattgaatataatagaagtcgtcaggcagcaattacaaaagaactaatagaaatcatatcaggagcagaaagtttataat

SEQ ID NO: 272455 - DNA, 276 bp, Unknown
  Bacterial polypeptide expressing nucleotide sequence isolated from the Sargasso Sea
tatgaaaattcgagcagaagaaatcagtaacatcatccagcagcaaatcgaaaatttcgagaagcagaccaccaaaaccgaagtaggaacggtcttggaagtcggtgatggaatcgcacgagtctatggacttgacaatattgttgccggtgaacttgtggaatttcccaataaccttcaaggcatggccctcaatctggaagaggataatgtcggtgtcgtgctttttggtgatgaccgaaacatcaaggaaggagacgaagcccgaagaaccga

SEQ ID NO: 272456 - DNA, 385 bp, Unknown
  Bacterial polypeptide expressing nucleotide sequence isolated from the Sargasso Sea
gcggtttgagaatgatgaactggatcaggtgtttcttgcatacaatcattttgtaagcgttatttcgcaggttccgatgattgaacaacttctaccgattaagcccatagatgctgaatcagtggatgagcgtgaagtattgtttgaaccatcgccggaagagatactgcagaccctgctgaagaaatatgttcaaaaccaggtttacgtttcctggctggacacaattgcaggagagcatgcggcccgcatgacttccatggacgcagccacaaaaaatgcaggagaaattattgaaaagctccagctgcactataacaggaccaggcaggctgctatcacaggcgaactgattgaaatcataagcggcgcagaaagtttataa

SEQ ID NO: 272457 - DNA, 277 bp, Unknown
  Bacterial polypeptide expressing nucleotide sequence isolated from the Sargasso Sea
atgagcaaaggaataatcacacaagttattggagcggtagtagacgtgaaatttgatggtgaactaccagaaattttaacagcattggaatgtaaaaatggtgataacagactagttttagaggtagcacaacacttaggtgaaaccactgttagaacaattgctatggatgctactgaaggactaaaaagaggtgatgaagttattaatacaaatgctcctattcaagttccagttggacctgaaacacttggaagaattataaatgtaattggcg

SEQ ID NO: 272458 - DNA, 394 bp, Unknown
  Bacterial polypeptide expressing nucleotide sequence isolated from the Sargasso Sea
aaaatcatcaaaaagctgggtggcggtatccgtttagccttagctcagtactctgaactggcggcattcgctcagttcgcttctgacctggatgacacgactcgtgcgcagttagaccacggccagaaagttactgaactgatgaaacagttacaatacgcgccaatgggcgtggctgacatgggtgtgtctattttcgctatcgaaaaaggctacatgaaagacatcgaagttgccaaaatccttgattttgaagctgctttaattgcttacatgcactcagagcacgcagcgtttatggctgatctgaacaaaaccggtaactacaacgaccaaatcgaagcgactttaaaaggcgctattgagaagttcaaagcaactcagacttggtaaa

SEQ ID NO: 272459 - DNA, 338 bp, Unknown
  Bacterial polypeptide expressing nucleotide sequence isolated from the Sargasso Sea
aatgacagtacaactggatgtggtaagcgccgaagagcggattttttctggtctggtggaatccattcaggtaacaggtagtgaaggtgaattaggtattttacctggtcacattccgcttcttactggaatcaagcctggtatggttcgtatcgtcaaacagtttggcgaagagcatctgatttatgtcgctggtggtgtgctggaagtgcagccgcacagcgtcacagtgcttgccgatgtcgcggtacgagctgaagatctggacgagcaagctgctttagctgctcagaaacgtgcagaagaagcgatgcaacatgcaggcgctgacttcaact

SEQ ID NO: 272460 - DNA, 262 bp, Unknown
  Bacterial polypeptide expressing nucleotide sequence isolated from the Sargasso Sea
aatggcgagtttagacgatttaaaaaaaagaatatctagcgttaagtctacacaaaaaattacaaaggctatgaaaatggtcgctgcagcaaagctaagaagagctcaagaaagtgcagaaagaggaagaccttattctgaaaaaatgaataatataattctcaatctttctagtggcctctctgataaagaaaatgcgccaaaattactaactggcactggagaagataagttcacttatgtgtggtatgacagcagatag

SEQ ID NO: 272461 - DNA, 274 bp, Unknown
  Bacterial polypeptide expressing nucleotide sequence isolated from the Sargasso Sea
tatggctaataatttaactggaaaaatatcacaagttcttggagctgttgtggatgtagagttcgatggtgaacttcctgcaattatgaatgctctagaagttgataataacggaacaagattaatgctagaggttgctcagcacttaggtgaaaatgctgttcgtacaattgcaatggatacaactgacggattagtaagaggtcaaacggcgacggatacaggttcccccatttctatgcctgtaggtcctgaaacacttggtcgtattatg

SEQ ID NO: 272462 - DNA, 739 bp, Unknown
  Bacterial polypeptide expressing nucleotide sequence isolated from the Sargasso Sea
aatagtaagcaattaattgaattaagaagaaacaaaatgggtatggtttttcaaagttttgctcttttgcctcacaaaacagttttagaaaatattgcatttcctttaataataaaaggcatcacaactgataatagtattacaaaagcaatggaaatggttgagcttgttggtctaaaaggcagggaaaattattttccaagagaattatcaggtggccaacaacaaagagttggtatagctagatctcttgcagttgagccagatatttggtttttagacgagcctttttcagctcttgatcctttgattagaaaggaaatgcaagatgaatttttaagacttcaagattcacttcataaaacaataatgtttgtaactcatgattttgatgaagcacttagacttgctgatagaatagcaataatgaaagatggaattattgaacaattagatactccagataatattgttttaaatccagcaactgaatatgtaaaaaagtttaccgaagatgtgcctagagaaaaagtattaaaaattgagtcaataatggataaatatgatggctctgttgatgaaaagaaaactatttcaaaagatgtaataattgaaacagttgctgagtctattttaaaaagcaaagagaatttaattgttatagatgaaaaaaataataacaaaccagttggaatattaaaccctggaaaagtaattaaagttttatttggtaaataaa

SEQ ID NO: 272463 - DNA, 257 bp, Unknown
  Bacterial polypeptide expressing nucleotide sequence isolated from the Sargasso Sea
tatgaaaaaaggaaaaattacacaagttattggagcagtagtagatgttaaatttgatggagatttacccgagattttgactgcattagagtgcaataattctggcaatagacttgtcttagaagtggcacagcatttaggagagtctagtgtgagaacaatagctatggatgctactgaaggattaaaaagaggagatgaagttatagatacaggttctccaataaaagttccagtagggcccgaaacactaggaa

SEQ ID NO: 272464 - DNA, 232 bp, Unknown
  Bacterial polypeptide expressing nucleotide sequence isolated from the Sargasso Sea
atggcaagtttagatgatctaaaaaagagaatttcgagtgttaaatcaacacagaaaataacaaaagctatgaaaatggtagcagctgcaaaactaagaagagcgcaagaaagtgctgaaaaaggaagaccttattcagataaaatgaataatattattttaaacttatcaggtggaatatcagatattgaaaatgctccaaaatttactttctggaacaggagaggataaa

SEQ ID NO: 272465 - DNA, 406 bp, Unknown
  Bacterial polypeptide expressing nucleotide sequence isolated from the Sargasso Sea
aatggcaatttctctaaaagttttagctcctaataaaaatgtttatcaaggcgaagctgaagaagtaatccttcctagtactacaggtcaaattggtgtactaccaggacatatctctttagttactgccatagatattggtgttttaaggctaagaatgaattcccagtggaaatcaatagcccttatgggaggcttcgctgaaattgaatcagatgaagttatagttctagtaaataatgctgaaattggttctgaaattaatgttcaaaatgctgaacaagatcttaaagaagcaaaattagcaattagcaaattttctgaaaatgaaaaaaatccagagaaaattaaagccttgaaagaaatttcaaaggctgaggctaggattcaagctgcaaagaactaa

SEQ ID NO: 272466 - DNA, 226 bp, Unknown
  Bacterial polypeptide expressing nucleotide sequence isolated from the Sargasso Sea
aatgccaagtttagacgatctcagaaaaagaattacgagtgttaaatcaactcagaaaataacaaaagctatgaaaatggtggctgcagctaagttgagaaaagctcaagagaatgctgaaaaaggcagaccttattctgaaaaaatgaataatgtaattttaaatctttcaaaaagtataacagataaagaaaatgctcccaaagttactggttgggacaggtga

SEQ ID NO: 272467 - DNA, 1534 bp, Unknown
  Bacterial polypeptide expressing nucleotide sequence isolated from the Sargasso Sea
gctgccgttcagcctcgcgttcgccggtgtttccggcatcgtcatcggctaccccactttgcgtctgcgcagcgactacctggcgatcgtcacgcttgggttcggcgagatcacgcgcatcgttgccaccaatctgcggattacgggcggcccgaacggtatctacggtatcgatagtcccagcctgttcggctacgaaatcagctcgccccgcgcggtgtacgaactaggcattgcgttcttcctgatcgtgctggtgttcgcgatccggctcggtcagtcacggctcggccgcgcctggaccagcatccgcgaggacgaagctgcggccgaagccgtgggcgtaccgacgctgcgagtcaaactgcttgcttacgtgatgggcgcgttgatcggcggttttggtggcagcctgtttgctgcgcgcttcgggacaatcgacccgaccggcttcacctatctgcagtccgtcacgatcctcatcattgtggtgctgggcggccgaggcagtattcctggcgtgatactcggcgccatcattgttgccgggctgcccgaggtactgcgtttcctcaacctgtggcgcattttcggcttcgcgatcgggctggtgattctgatgctgctccggccgcaaggcctgtggccggcgccgctacgccgcgtggcgccgccacgtgaaggtgacggcgtagcgaagcccgcgcaccgggagatcgtcgccgatgacatcctgctcgatgtgcgcgacatgcagcgccgttttggcggggtgcgggcggtcggcggcgtcagcttcacggtgcgcggcggcgagattctcagcctgatcggcccgaacggcgccggcaagaccacggtgttcaattgcctcaccggcgtgacccgtctgagcggcggccaggttctctggcgcggcgcctcgctggctggcggagcaccgcatcgcatcgttcatcgcggcatggcgcgcactttccagggcatccgtttgttcgccaatatgactgcgttcgaaaacgtgctgatcggcatggaccatcggcttcacacctcgctgatcgccgaattgcttgcgctcccctccgctcgctccgaagcggccgatcacgcggcagagggcctcggctggctcagcttcgtcggcctcagtgcccgggcaggcgaacgcgcggccgatctgccttatggcgaccaacgccggctggagatcgctcgtgcgctcgccagcaacccgtatctcctgctattggacgaaccggctgccgggatgaatccgaccgagaagcatgcgctgatggaattgatccggcgcatccgggatctgggcgtgacggtgttgctgatcgaacacgacatgatgctggtgatgggcgtgtcggaccggatcatcgtcatggatcatggcgtgatcatcgccgaaggttcgccaggcgagatccaggccgacccgcgtgtgatcgatgcctatctcggtacagcagaagaaacggccgacgatgccaccggggagaaatcgctgtgggactcctag

SEQ ID NO: 272468 - DNA, 247 bp, Unknown
  Bacterial polypeptide expressing nucleotide sequence isolated from the Sargasso Sea
aatgccaagtttagacgatttaaaaaaaagaatatcaagtgttaaatctactcagaagattacaaaggcaatgaaaatggttgcagcttctaaattaagaagagcacaagaaaatgctgaaaaaggaagaccttattcagaaaaaatgaacaatatcattcttaatctttcaaatagtatttcagataaagaaaattcgccaaaattactttctggttctggagaagatagagtacatttatgcatg

SEQ ID NO: 272469 - DNA, 208 bp, Unknown
  Bacterial polypeptide expressing nucleotide sequence isolated from the Sargasso Sea
attgcctaaaaatatttcaacacaaatatttaaagctatgttagagaattcagctagcgaacagggtgcaagaatgagtgcaatggataatgcaactagaaacgcaggtgaaatggttgataaacttactattgagtataatagaagtcgtcaggcagcaattactaaagaactaatagaaattatatcaggagcagaaagtttataa

SEQ ID NO: 272470 - DNA, 286 bp, Unknown
  Bacterial polypeptide expressing nucleotide sequence isolated from the Sargasso Sea
tatgagaaaaggaaaaattacacaggttattggagcagtagtagatgttaaatttgatggagagttgccagagattttaactgcattggaatgtaataatgctggcaacaggcttgtattagaagttgcgcagcatttaggagaatcaagcgtacgaactatagctatggatgcaactgaaggattaaaaagaggagatgaagttacagatactggttctccaatcaaagtcccagtaggtccagaaacattaggaagaattgttaatgttataggtgaacctatt

SEQ ID NO: 272471 - DNA, 272 bp, Unknown
  Bacterial polypeptide expressing nucleotide sequence isolated from the Sargasso Sea
aatggcaatttctctaaaagttttagctcctaataaaaatgtttatcaaggcgaagctgaagaagtaatccttcctagtacaactggtcaaattggtatacttccaggacatatctctttagttacagctatagatattggcgttttaaggctaagaatgaattctcagtggaagtcaatagctctaatgggaggcttcgctgagatcgaatcagatgaagtcatagttttagtaaataatgctgaaatcggttctgagattaatgttcaaa

SEQ ID NO: 272472 - DNA, 484 bp, Unknown
  Bacterial polypeptide expressing nucleotide sequence isolated from the Sargasso Sea
atggaaattaatccttcagaagtaacaaagattttaaaagaacaaataaaaaaattcggagataaagctgaagtaactgaagtaggtcaagttttatcagttggtgatggtatcgcaagaatttatggattagacaacgtccaagcgggtgaaatggttgagtttgcagatggatctaaaggtatggcacttaacctagaaagcgataatgtaggtgttgtaatatttggagacgataaagctgttaaagagggagacactgttaaaagaactggagcaattgtcgatactccagttggaaaagaacttttgggaagagttgttgacggattaggaaatccaattgatggcaaaggcaatttaaacaaaactgtaaaacgaagtagggttgaagtaaaagctccaggtataattccaagaaagtcagtaagtgaaccaatgcaatcaggtttaaaatctgtagacagtttagtccaatcggaga

SEQ ID NO: 272473 - DNA, 412 bp, Unknown
  Bacterial polypeptide expressing nucleotide sequence isolated from the Sargasso Sea
gatgcgattagacatagttactgctgagaaactagtctactcagacgaagttagcagcgtggtggtaccaggcgcggaaggccagcttggtattctacccaatcatgctcctttgcttacatcgctgaaacctggagaattgaaggttttaaaggaaggagaggagactaatatagctgtgtcgggcgggttccttgaggtcttaaaaaacgttgtgacaattttggctgatacggcagagcgtgcagaggatattgatgttgagagagctgaagcagcattgaagcgtgcacaagagaaagttaattcatccgagtctgacctagaccttgaaagagcaatacgagcattgaaaagatctcaggcacgtgtgttcgtgtcaaagcgaaagcggtcttctaaagtaaattaa

SEQ ID NO: 272474 - DNA, 247 bp, Unknown
  Bacterial polypeptide expressing nucleotide sequence isolated from the Sargasso Sea
atgagaaaaggaaaaattacacaaattattggagcggtagttgatgttaaatttgatggagaactacctgagattttaactgcactagagtgtaaaaatggtgataacagacttgttttagaagttgcgcagcatcttggagaaacaagcgtgagaaccatcgcaatggatgcaacagaagggttaaaaagaggagacgaggtaacagatactgggggctcctataaaggtaccagttggtcctgaa

SEQ ID NO: 272475 - DNA, 124 bp, Unknown
  Bacterial polypeptide expressing nucleotide sequence isolated from the Sargasso Sea
gataatgcgacacgaaatgcaggagaaatggttgataaacttactatacaatataatagaagtagacaagcagccattacaaaggaattaatagaaataatatcaggagcggagagtttatagt

SEQ ID NO: 272476 - DNA, 112 bp, Unknown
  Bacterial polypeptide expressing nucleotide sequence isolated from the Sargasso Sea
agaaacgcaggtgaaatggttgacaagcttactattcagtataatagaagtcgtcaggcggctattactaaagaattaattgaaattatatcaggagcagaaagtttataat

SEQ ID NO: 272477 - DNA, 1087 bp, Unknown
  Bacterial polypeptide expressing nucleotide sequence isolated from the Sargasso Sea
atgattagtgatactaatatacataagcaagtcataaattcaattacctttccaattataataattgatgagcataagcttataaacatggtgaattcagctgctgaagatttttttaaattaagctctaaagtgttgttagaaaaatcaatcgaaagcattcttcctttttcatctccaattttatctttaatagataattctcttaatacagaaacaacttttaaagaatatagagttgatctatcaactccaatttctggttcacataaagatgtagatgttgaggtaactccagtgatagggtcagacaattactaccaaattattttgatagagggctttaatgaaaaaaaattaatactccagaatgaaaatcagaaaaataaaatagcaatgtcaaatatgtctcaaattcttgcgcatgaagttaaaaatcctttggctggtattagaggagctgcacagattttagagaagaatattgaaagcaatgaaattgttatgacagatcttataataaatgaagtagatagaattaaaagactggtagataaccttcaagtttttgatgcatcaactcctattgatttaaagccaattaatattcattcaattttacgacatgttagagatgttatgattaattcaagtgaaaagaaaatcaaaataacagaagtatttgatccttcaattccagatgttattggtaatgaagaccaattgattcaagtatttattaatcttattaaaaactcaatagaggcattcagtgatgaatcagactctgataatgaaattatcttatcaactaattatgagcatggattcattattaaagaaaaattaagtgaagaaagagtaaaattaccaattaaaatttctgtgatggataatggtcctggtattccagcctcaatatcacaagaaatctttcaaccatttgtaagtactaagaaaattggccaaggcgggcttgggttatcaatagtttccaaaatagttagtgatcataatggaactattgagcttgatttaactgatcaaggaacaaaatttattattagattaatggcggagtcataat

SEQ ID NO: 272478 - DNA, 233 bp, Unknown
  Bacterial polypeptide expressing nucleotide sequence isolated from the Sargasso Sea
tatgaccactaataataaaggagcaatttcgcaagtaatcggagccgtcgttgatgtgagatttgaagaaaatctcccttctattcttacggcattggaatgtaacatcggagggaaaaaagtagtactcgaagtagctcaacacttaggtgagtcaacagtgagaacaatcgcaatggagtcaactgatggaatgaccagaggagatgaagttatagatactggaaatcaaa

SEQ ID NO: 272479 - DNA, 721 bp, Unknown
  Bacterial polypeptide expressing nucleotide sequence isolated from the Sargasso Sea
atgtaccaattcaatgtttatagaattggtccagaaataaaattaggagaggtagatatctcttttactaacgctagtttatttatggtaattagtacagttgctatcttagcaatattcaattttggttcaaaaaaaaattcattaatacctgacaagctccaactattagctgaactaagctattcatttatatccaaaatgataagtgatacggctggatcaaaagctaagccatatttttcttttatattttcactttttatgtttgttcttttttgtaacatgtttggaatgattccttactcttttacagtcactagtcatataattgttactttcgtgttagctgcatttatatttgttggtgtgactataattgggtttataaagcatggaattggatatttaaaattatttgttcccagtggcgttccattggttttattgccattgattgtagtaatagaaataatatcatatttaagcagaccaattagtctgtcagtacgtctttttgcaaatatgatggctggtcatactatgatgaaagtattcggtggctttgtagtaagcctaggaataattggtgggtggctaccactgagcttttcagttgcattaacaggtttggagatattagttgcttttcttcaagcttatgtttttgcaatattaacgtgcatctatttaaatgatgcattaaatttacaccattaaa

SEQ ID NO: 272480 - DNA, 184 bp, Unknown
  Bacterial polypeptide expressing nucleotide sequence isolated from the Sargasso Sea
atggctaataatttatctggaaaaatatcacaagttttgggagcggttgtagatgtagagtttgaaggagaacttccatcaattatgaatgctttagaagttgataataatggagttcgtcttgtacttgaagttgctcagcatttaggagaaaatgcagttagaacaatagcgatggatacaa

SEQ ID NO: 272481 - DNA, 242 bp, Unknown
  Bacterial polypeptide expressing nucleotide sequence isolated from the Sargasso Sea
aatgccaagtttagatgatttaaaaaaaagaattaaaagtgtgaaatctacacaaaaaattacaaaagcaatgaaaatggttgctgcagctaagctaagaaaagctcaagagaatgccgaaaaaggtcgtccttatagccagaagatgcaaaatataatcttgaatcttactaaatcaattaatgatccgaacaatgcaccaaaactgcttgtaggaacaggaaaagataaaacttatttat

SEQ ID NO: 272482 - DNA, 769 bp, Unknown
  Bacterial polypeptide expressing nucleotide sequence isolated from the Sargasso Sea
aatgcgccgaacacaggagactatgaaaaaagcactcccttatgcagataaaatcagaacagtgataggccatatttacaaggctaaccccgactataagcacccgtttcttgaaaagcgagaagtcaaaaccgctggctatattgtggtcagttctgacagaggcctttgcggcggattaaatgtaaatatgtttaggggccttattgcagaacttaaagagaacaaaagcaatcagattaactcaaaactttgccttgtcggcgcgaaggcggttcaattttttaggtctgtagatgttgatgttgtagcagctgcatctcatcttggtgaagagccacaagtcgaagacttggtgggctcaattaaaaccatgttagatgaatatatcgacgggaagattgacacactttttattgtgcacaacgattttgtgaacacaatgactcaaaaaccagagatcaaaacgcttcttccaattgaccccgaagacagtgagcaaatgcaagaacactgggactatatttatgagccagattcaaaagagcttttggactatatattgatgagatatatcgagtcacaagtctaccgagcggtagttgaaaacgtggcgtgtgaaatggcagctaaaatggtggctatgaaaagcgctacagacaatgcaggaaaaataatagaccagcttgagcttgactataacaaagcaagacaggcggcaatcacacaagaaatttcagaaatagttggcggcgcagctgcagtttaa

SEQ ID NO: 272483 - DNA, 193 bp, Unknown
  Bacterial polypeptide expressing nucleotide sequence isolated from the Sargasso Sea
ttcaactcaaatttataaggcttttttagaaaatgcagctagtgagcaaggctcaagaatgacagctatggataatgcaactcggaatgcaggagaactcgtcgataagctcaccattaattataatagaagtcgtcaagcttctataactaaagaattaattgaaataatttccggagcggagagtttataa

SEQ ID NO: 272484 - DNA, 613 bp, Unknown
  Bacterial polypeptide expressing nucleotide sequence isolated from the Sargasso Sea
cgggggttataattctaatattgtgcgggagactagattaagggtaagagaactaaaggactcaggaaaagtggttaaattgttgtgtattgggcgaaagggaagggaccagttaaagggtgaatttggcgaggcaatccttcatacatatgaggatgtgggccgagggggaatagagtttgccgaggcagagaatataactaatagggtgctagagttatttgatgcaggggaatttgacgtctgtatgataatctataacaagtttgtttcagccataacccaggttgttactccacaaaaaattataccagtagagatgactgatgacattccagacgatggagagattagtgattttgtttatgattttgaaccatcggaagaaggaatacttgaagttttattgcctgataatttaaaagtgcaaatatttggggccatgcttgagagcagtgcatcggagcatggcgcaagaatgtctgcgatggataatgcgaccagaaatgctggggagatgattgatggtcttacccttacatttaataggaccaggcaagcaaaaattacaagtgaactaattgaaattatttcgggcgcggaagcgttataa

SEQ ID NO: 272485 - DNA, 153 bp, Unknown
  Bacterial polypeptide expressing nucleotide sequence isolated from the Sargasso Sea
aatggccagtttagacgatttaaaaaaaagaatatcaagtgttaaatctacccaaaagattactaaggcaatgaaaatggttgctgcttcgaaactaagaagagcccaaagaaatgcagaaaaggggaaaacatattcagataaaatgaataa

SEQ ID NO: 272486 - DNA, 232 bp, Unknown
  Bacterial polypeptide expressing nucleotide sequence isolated from the Sargasso Sea
tatggctaacaatttaactggaaaaatatcacaagttctcggagctgttgttgatgtagagttcgatggtgaacttcctgcaatcatgaacgctctagaagttgacaacaacggaacaagattaatgctagaggttgctcagcatttaggagaaaacgctgtccgtacaattgctatggatacaacagatggactagttagaggtcaaacagctactgatacaggtgccccc

SEQ ID NO: 272487 - DNA, 437 bp, Unknown
  Bacterial polypeptide expressing nucleotide sequence isolated from the Sargasso Sea
ttctagacaaattgctgaaataggaatttatccagccgttgaccctttagactcaacttcaagaattctggatcctagaatagttggagatgaacattatagagtagcgagagaagtgcaaaaagttctacaaacgtacaaatctttacaagacataatcgcgattttgggaatggatgagttatctgaggaagacaagttagttgttgctagagctagaaaaatacaaagatttctttctcaacctttctttgttgccgaagtatttactggttcgccagggaaacttgttgacttagagtcaacgatcaaaggcttcgatgctatttgtaaaggtgaatatgaccatttaccagaagctgcattttatatggttggtactattgaagaagctatccaaaaagctgagagtttagctaacgaagcagcagcataat

SEQ ID NO: 272488 - DNA, 830 bp, Unknown
  Bacterial polypeptide expressing nucleotide sequence isolated from the Sargasso Sea
catgagcggaaaggagtacagaacaataaccgacgtaaagggaccgcttgtgttcctaaataaaactgagccagtctcatacaatgagatagttcaactgaggcttagcgatggatcgattaagaatggacaggtgctagacacctcagatgatcaagttatagtgcaggtgtttgaaggaacggcttctgtggataggcaaacaggggttaaattccttggagacgtattcaaacttccagttagcaagggactaattgggaggatcttggatggagctggtagaccaagagacggggggccagaaattgtcgccgacgatatggctgacatcattggagcggcaatcaacccttattccagacaaagtccagaggcttttatccaaacaggaatatccgcgattgatgcgtgtacctctctagtaagaggtcagaagctaccgattttcagcgcaagtggtcttccacacaatgatatcgcactacaaattgcaagacaggccaagctcgtagatagcgatgacgacttcgttgtcgttttctgtgcaatgggaattactgcagaggaatacaacttcttcgtgcatgaccttgagaggaccggggcactggagaacgcagctctcttcgttaatctagcggacgatcctgcagtcgaaaggctcatcacaccaagactggctttgacagccgctgaatacctcgcctttgagcatgactaccatgttcttgtgatttacaccgacatgaccaactactgtgagtcacttaggcaaataggagcggctagagaggaagttccaggaagaaggggttaccccggataca

SEQ ID NO: 272489 - DNA, 613 bp, Unknown
  Bacterial polypeptide expressing nucleotide sequence isolated from the Sargasso Sea
aagagcagctaaattaagtgacgaacatggcggtggatcacttactgcactgccaattattgaaacacaaggtggagacgtatccgcgttcattccaactaatgttatttcaattacagacggacaaattttccttgaaacagaactatttaatcaaggtataagacctgcaattaatgtaggtttatcagtatctagggttggttcatcagctcaaacaaaagctatgaaaaaagtttctggttcaatgaaattagagctagcacaatacagagaaatggcagcttttgctcaatttggatctgatttagatgcatctacccagcaacttttgaatagaggctctaagttaactgaacttttaaaacaaaaacaatattcacccatgactgttgcagaacaagttatttcagtattttgtggagtaaaaggttatcttgatgatattgatttaaaagatgttgctgaatttgagggcaagattattgaaaaatgtaaatcagataagcctgaaattatcgagtcaattttaagttcaggaaaacttgaggaagataaagaaaaattacttgttgaggtaatcactcaattaaaaggaaattttaaatcttaa

SEQ ID NO: 272490 - DNA, 370 bp, Unknown
  Bacterial polypeptide expressing nucleotide sequence isolated from the Sargasso Sea
tatggcaagtttagacgacctaaaaaaaagaatagctagtgtaaagtctacacaaaaaattactaaggctatgaaaatggttgcagcagctaaattaagaagagctcaagaaagcgctgagaaaggaagaccttattctgaaaaaatgaataatattattttaaatttatcaaatggtatatctgacaaagaaaatgcaccaaagttattgtcaggtacgggtcaggaaaaaactcatctttgtgtggtgatgacttctgatagaggtttatgtggcggatttaattctaatattattaaaaaagccaaaagttattttgcaaaaattttaaatgaaggtaaagaacttaaaattattacagtaggctca

SEQ ID NO: 272491 - DNA, 817 bp, Unknown
  Bacterial polypeptide expressing nucleotide sequence isolated from the Sargasso Sea
atgagcaaaggaacaatcacacaagttataggagcagtagttgacgtaaaatttgaaggagaacttccagaaattctaacagctttagaatgtaaaaatggcgataacaggttagttctagaggttgctcagcatttaggtgaaacaacagttagaacaatcgcaatggatgcaacagaaggacttaaacgaggcgatgaagtaattaatactaattctcctatccaagtacctgttggacctgaaactcttggaagaattattaatgttattggagaaccgatcgatgaaagaggtgaagttaaaactaaagaaaattggccaattcatcgagctgcccctgaatttaatgatcagtctactgaaacagaaattcttgtcactggtattaaggtaattgatctacttgcaccttatgcaaaaggggggaaaattggattatttggtggcgctggtgtaggaaaaacagttttgattatggaattaattaataacgttgcaaaagcacatggtggattttctgtttttgcaggtgtaggagaaagaactagagaaggtaatgatctttatcatgaaatgatagagtcaggtgttatcaaacaagatggcccaggatcaaaagctgcattagtttatggacaaatgaatgagcctccaggcgcaagagcaagagttgctcttacaggattaactgtggccgaatactttagggatcaagaggggcaggatgtacttttctttgttgataatattttcagatttacccaagctggctcagaagtttctgctcttttaggaagaattccatcagcagttg

SEQ ID NO: 272492 - DNA, 907 bp, Unknown
  Bacterial polypeptide expressing nucleotide sequence isolated from the Sargasso Sea
acagcggtcgctgttgacaccataatcaaccaaaaaggcacagggataaaatgtatctacgttgcggtaggccagaaaaactcttctgttgccaatgtggttaagaagttagaggaagaaggcgcattagagcacacaatcattgtcaatgctgctgcatccgattcagctgccatgcagtatattgctccatattcaggctgtgccatgggcgagtacttccgagacaaaggcgaggacgcactaatcatttttgatgacttaaccaaacaagcctgggcatataggcaagtatcgctcctattaaaaagacctcctggaagagaggcttatcctggcgacgtattttatcttcactcaagattgcttgaaagagcagcaagggtgaatgcagagtatgtagaaaaagaaacaggcgggaaagtgaagggccaaacaggctcgttaaccgcattgccaatcattgaaacacaagcgggcgacgtttctgctttcgttccaacaaacgtgatttcaattacagacggacaaatatacctagaaagtgatttattcaatgcgggcattagaccggcgataaatgctggtttatctgtttccagggtgggtggcgcagcgcaaacaaaaatcattaaaaaactcggcggtggtgtcaggctggcattggctcaatatcgtgagcttgcagcatttgcccagttcgcatctgatcttgatgaagccacaaggaagcagttagaaagaggccagagagtaacagagctaatgaagcaaaaacaatacgctcctctgactgtagcagaaatggctgtgtccctttatgctgcgaacgagggctatcttgatgatgtcccagcagataagattgtcgatttcgagtacagcactgcatgcaaactttgttgac

SEQ ID NO: 272493 - DNA, 874 bp, Unknown
  Bacterial polypeptide expressing nucleotide sequence isolated from the Sargasso Sea
agaagttgtagcgcctggcgtaattgatcgccaatcagttgatcagcctgtacaaacagggcttaaatctatcgatgtgatggtgcctatcggcaggggccaaagggaacttattattggtgatagacagacaggaaaaacagctattgcagttgacacaattattaaccaaaaagactctgacataacttgtgtttatgtagctattggacagaagcagtccacagttgccactgtagttagacaattagaagaagcaggtgctcttgagaatacaattattgtttcagctagtgccgctgaaagcgcgtccttacaatttattgcgccttattctggttgcactatgggagaatactttagggataggggagaagatgcattaattatttatgatgatctatcaaaacacgctgtcgcatatagacagatttcactcctcttaaaaagaccccctggaagagaagcatttccaggagatattttttaccttcactcaagacttcttgaaagagcagcaagagttaatcctgactacgtagagagattgactaatgggaaggtgaaaggaaaaacaggatctttaacagccttaccaataatagaaactcaagctagtgatgtttcagccttcattccgactaatgttatttctataactgatgggcaaatattcctggaaactgacctttttaactctggaattaggccagctattaatgttggtatttcggtatcaagggttggtggagcagcacaaacaaaaataatcaaaaaattaggtgggggtgttaaattagcacttgcacaatttagagagctggaatcattttcacaatttgcttcagaccttgatgatgcaacaaaagagcaa

SEQ ID NO: 272494 - DNA, 819 bp, Unknown
  Bacterial polypeptide expressing nucleotide sequence isolated from the Sargasso Sea
gatggtagaattcccaggcggcattaaaggtatggccctcaaccttgaaatggataacgttggtgtttcaatcttcggtgatgatactggaattaaagaaggtgatacagttaaacgtacaggagaaattgttgacgttcctgttggaaaagaattgttaggacgtgttgttgatggtttaggaaatcctattgatggcaaaggtcctattcaatcttctgaaaagagaagaattgaattaaaagccccaggcattattcctcgtcaaagtgtatctgaacctatgcagacaggtattaaagcacttgatgctcttgttccagttggaagaggacaacgtgaattaatcattggtgacagacaaacaggtaaaactgctgttgctattgatacaatcttaaatcaaaaatctgtaaatcaatcagataatgaaaaagaaaagttatattgtatctatgtcgcaattggtcagaaaagatcaacagttgctcaaattgtaaaaacactagaagataacggtgcaatggaatatacaattgttgtatctgcaactgcatcagagcccgcaccgttgcaatttttatctgcttatactggctgtacaatgggtgagtattttagagataatggtatgcatgcattaattgtttatgatgatttatcaaagcaagctgttgcttacagacagatgtctctattattaagaagacctccgggacgtgaagcatatcccggagatgtattttacattcatagtcgtcttttagaaagagctgccaaaatgagtgatgaacatggtggtggaagtttgaccgccct

SEQ ID NO: 272495 - DNA, 262 bp, Unknown
  Bacterial polypeptide expressing nucleotide sequence isolated from the Sargasso Sea
catggatgaattgtccgaagaggacaagctgactgtggcacgcgcccgcaagatccagcgtttcctctctcagccattccatgttgccgaggtgttcactggttcaccgggcgtgcttgtcagccttgatgacactatcgccggtttcgccggtatcatctcaggcgagtatgaccatcttccagaagccgccttctacatggtcggcaccatcgaagaggccatcgagaagggcaagaagctgatgcaggacgccgcctga

SEQ ID NO: 272496 - DNA, 847 bp, Unknown
  Bacterial polypeptide expressing nucleotide sequence isolated from the Sargasso Sea
aggaatattaagaagagttgttgatacacttggaaatcctatagatggtaaaggccctattgaaggatatttgtttgatatgcctattgaaagaaaagctccaggtgttatatatcgtcagccagtaaacgagcctttacaaacggggataaaatcaattgatgctatgatcccaattggaagaggtcaaagagaattagttatcggtgatagacagacaggtaaaacaactgtttgtattgatacaattttaaatcaaaaagagttttatgatgcaggagagcctgttttttgtatttatgttgcgattggacaaaaagcatcaactgtagcagcaattgctaaaacattagaagacaaaggagcacttgcttatacagtaattgttgcagctaacgcatcagaccctgctccaatgcaagtttttgctccattttcaggagcttgtataggggaatattttagagatacaggaaggcctgcactaattatttacgacgacctatctaaacaggcagttgcatacagagaggtttccttacttcttagaagacctcctggaagagaagcttatcctggagacgttttttatctccactcaagattattagagaggtcagccaaagttgtgaacgatgataaggtagcaagtggaatgaatgatttaccagagtcattaaaatcaaaagtaaaaggtggaggatcattaacggcattaccaataattgaaacacaagccggagatgtatcagcttatattccaacaaatgtaatctcaattactgatggtcaaatatttttggagtgcgagacttatttaactcaggtgtggagacctgcaattaat

SEQ ID NO: 272497 - DNA, 808 bp, Unknown
  Bacterial polypeptide expressing nucleotide sequence isolated from the Sargasso Sea
ggctccctacaccggtgccaccatcgccgagtacttcatgtataagggcaaggccaccctggtgatctacgacgatctctccaagcaggctgctgcttaccgccagatgtcgctcctgctgcgtcgtccgcccggtcgtgaggcctatcccggcgacgtcttctattgccacagccgtctgctcgagcgtgcagccaagctgtctgatgccatgggcaagggttccatgaccgctctgccgatcattgagacccaggccggtgacgtgtcggcctatatccccaccaacgtgatttcgatcacggatggtcagatcttcctcagctccgacctgttcaactccggtctgcgtcctgcgatcaacgtgggtatctctgtgagccgggtgggcggtgctgcccagaccaaggccatcaagaagattgccggcaccctgaaactggagctggcccagttcgacgagctggccgccttctcccagttcgcttctgacctggacgcctccacccagcagcagctggagcgcggtaagcgtttgcgtgaactgctcaagcagccccagttcagccccctaatcctggctgagcaggtcgccatcgtttacgccggtgtgaagggcctgatcgacgatgttcccgtcgacaaggtcgtcgacttctcccgcgaactgcgtgagtacctcaagtccaacaaggctgagttcatcaccgaaatccaggagaagaaggtgatgagccctgaggctgaggcgatccttaaggacgccatcaccgaagtcgtgtccaccatggtcgcttccgcggcctga

SEQ ID NO: 272498 - DNA, 906 bp, Unknown
  Bacterial polypeptide expressing nucleotide sequence isolated from the Sargasso Sea
cggtgatctggctggtctggtgctggaagttcagcagcagctgggtggcggtactgtacgtactatcgcattaggtacaactgacggtttacgtcgcggcgcagctgtagcgaataccggtaaagcaattcaggttccggtgggtaaagccacgctgggccgtattatgaacgtattaggcgagccaatcgacgaagcgggcccaatcggtgaagaagagcgttggtcaatccaccgcgctgcgccttcatacgaagagcaagcggcgtctaacgcgctgctggaaaccggtatcaaggttatcgacctggtatgtccgttcgcgaaaggtggtaaagttggtctgttcggtggtgccggtgtaggtaaaaccgtaaacatgatggaactgatccgtaacatcgcaatcgagcacagcggttactcagtattcgccggtgtgggtgagcgtacccgtgaaggtaacgatttctaccacgaaatgaaagactctaacgtactggataaagtatcgttagtatacggtcagatgaacgagccaccaggcaaccgtttacgcgtagcgttaaccggcttaaccatggcggaaaaattccgtgatgaaggccgtgacgtactgttcttcgttgataacatctaccgttacacgctggccggtactgaagtgtctgcacttttaggccgtatgccatcagcagtaggttatcagccaacgctggcagaagagatgggtgcgctgcaagagcgtattacctctactaagactggttctatcacgtcaatccaggccgtatatgtacctgcggatgacttaactgacccgtcaccagcaaccacgttctcgcacttagatgcgaccgtagtactgagccgtaacatcgcgtctctgggtatttacccggcgat

SEQ ID NO: 272499 - DNA, 296 bp, Unknown
  Bacterial polypeptide expressing nucleotide sequence isolated from the Sargasso Sea
atctcttcaagatattatcgctattcttgggatggacgaactatctgaggaagataaattagttgtagcaagagcaagaaaaattcaaagatttttatctcaaccgttctttgttgcggaagtatttacaggttcaccaggaaaattggttgaccttgaatctacaatcaaaggatttgatgcaatctgcaaaggtgaatatgatcacttgccagaagcagctttctacatggttggtacaattgaagaagccattgaaaaggctgaaaaaatggaaaaagaagcagcagcttaat

SEQ ID NO: 272500 - DNA, 995 bp, Unknown
  Bacterial polypeptide expressing nucleotide sequence isolated from the Sargasso Sea
atggccctcaaccttgagacggataatgttggtatcgtcatattcggtgacgatagggaaatcaaagaaggcgatacagtaaaacgtacgggaagcatcgttgatgttcctgttggtaaggaactgttaggccgggttgtagatcctcttgggaatccaatagatgggaaagggccgatagaagcaaagcaaaggggtcgtgtggaggttaaagccccagggatcatgcctcgtaagggtgtacacgagccaatgcaaactggcctgaaagcgattgatagtttgatccccgtaggacgcggtcaacgtgagcttatcattggcgacaggcaaactggaaaaactgctattgcgatagatgcttttattaaccaaaaatcagttaatgatgccgctggcgacgatgactccaaaaagctgttttgcatttatgtagcagttgggcaaaagcgatctactgtagcacaaatagttaaaacgctagaagactacggagcgatggaatattcgatagtgattgcatcaactgcttcggaacctgcaccaatgcagtttctagctccctacgcgggttgcactatgggagagtatttcagagataacggcatgcatgccctcatagtttacgatgacttatcaaagcaagcagtcgcatataggcaaatgtctctgcttcttagaaggccgccaggacgggaagcatatcctggtgacgtgttctacattcactcgcgcttgttagaacgagcagctaaaatgaatgatgaaaatggcgctggctcacttactgcgttgccggtaattgaaacacaggcaggagatgtctctgcgtacattccgaccaatgttatttccataactgatgggcaaatttttcttgaaacagaacttttttaccgaggaataaggcctgcagtgaatgttgggctatcagtgagccgggttggttcagcggcgcagatcaaagctatgaaacaagttgcgggtagaatcaa

SEQ ID NO: 272501 - DNA, 322 bp, Unknown
  Bacterial polypeptide expressing nucleotide sequence isolated from the Sargasso Sea
tgtacaagctgtactgcagacttataagtctctacaagacatcattgcaattttaggtatggatgagttatctgaagaagataaattaacagtggccagagcacgtaagattcaaagatttatgtcccaaccgttctttgttgccgaagtctttacaggaactccgggaaaatatgttgaattggaggatacgatcaaaggatttgatgcgatctgtaagggtgaatatgatcatctacctgaggcagctttttatatggttggcacaatagaagaagctattcaaaaagcagaaaaaatggccgaagaagccgctgcgtaa

SEQ ID NO: 272502 - DNA, 435 bp, Unknown
  Bacterial polypeptide expressing nucleotide sequence isolated from the Sargasso Sea
tgtctgtttccagagttggttctgcagctcaaaccaaagcaatgaaaaaagttgcaggttcaataaaattggaattagcacaatatagagagatggcagcttttgctcaatttggatctgacttagatgcatcaactcaaaaattattaaacaggggttctaagcttacggagttgttaaagcaggatcagtacagcccaatgacagtagcagaacaggttgtaacagtttactgtggtgtaaaaggttatttagatactattgaaaacaatcaaatccgatcattcgaaaaaggtttattagatttaattaagaatgaaaaacctgaaatattagaatcaattcaaaataccggaaagatcgaagagaacactgaaaagcttttaacagaagttataacaaattataaaaaatctaattttgaaaaaaaataat

SEQ ID NO: 272503 - DNA, 406 bp, Unknown
  Bacterial polypeptide expressing nucleotide sequence isolated from the Sargasso Sea
atgccaagtctagatgatttaagaaaaagaatttcaagtgtaaagtccactcaaaagataacaaaggctatgaaaatggttgctgcagcaaaactccgtaaagcacaggaaatggctgaaaaaggaagaccttacagtgataaaatggacttaataatccagaatttaagtaaagctattaatgatccatctaatgcgccaaaacttttggttggtacaggagaggataaaacacatctttgtgttgttatgacagctgatagaggactttgtggtggatttaatacaaatatatgtaaattagcaaaaaaatattttgaagaagctatcaaatcctctaaaaacctgaaaataaaaaccgttggtaccaaaggccttgatcaattaaaaagagattatagccaat

SEQ ID NO: 272504 - DNA, 631 bp, Unknown
  Bacterial polypeptide expressing nucleotide sequence isolated from the Sargasso Sea
atggctaaagaaggtattattacgcaactaattggcgccgtagtagatgtgaaatttgaaggtgatcttccagaaatctacacagctcttgaagcaactaacagtggaaataaattaatcttagaggtagctcaacacctaggagaaaacaatgtaagaacaatagctatggactcaaccgaaggacttaaaagaggtgacaaagttataaatactgagtctccaatcagtgttcctgtgggaccggaaacactgggcagaataattaatgttattggacaacctatagacgaaaagggtgaagtcaaaacaagtgagaagtggccaatacatagagcctctcctaagtttactgatcaatcaactgaaactgaaatacttgttacaggaattaaagttattgaccttcttgcaccttatgcgaaaggtggaaaaattggtttatttggtggagctggggttggaaagacagtaaccataatggaacttataaataacattgctaaagctcatggaggattttctgtatttgccggagtaggtgaaagaacaagagaaggaaatgatttatatcatgagatgatagagtcaggcgttattaaaaaagatggcaaaggatccaaagccgcac

SEQ ID NO: 272505 - DNA, 605 bp, Unknown
  Bacterial polypeptide expressing nucleotide sequence isolated from the Sargasso Sea
aatgttctttaattccttgctaacaaattttgcagcattagaagttggtcaacatctttattggcaaattggaaatatcagacttcatgggcaggtatttttgacatcttggattttattaggagcgttattagtttttatttctttaggaactaaaaaaatggaaaatgatcctaaaggcctacaaaatttgcttgagtttctctgggattacataagagatcttgctagaacgcaaattggagaaaaagtttatagagattggatgccatttataggtactttatttttattcgtctttgtaagtaattggggaggagctttaattccatggagattgattaagttgccaagtggagagttgggagcacctactgcagatatcaatacaacaatagccctggcgctattggtttcactctcttatttttatgctggtttaagcaataaaggttggaggtacttcgaatattatgttcacccaactccgattatgcttccttttaaaattctagaggactttactaaacctttatcactctctttcaggttatttggaaatatcttagctgatgaacttgtagttggtgttctagtatttttag

SEQ ID NO: 272506 - DNA, 901 bp, Unknown
  Bacterial polypeptide expressing nucleotide sequence isolated from the Sargasso Sea
gcaaacatcgtggaggtcttaagagagagaggagctctagattatacagtcgtagttagtgcaggagcctctgaaccagctgctttacagtacttagcaccttataccggtgcggcaattgctgaacattttatgtaccagggtaaggcaacacttgttatttatgatgatctaactaaacaagctcaggcttatagacaaatgtctctacttttaaaaagaccaccaggaagagaggcttatccaggagatgttttctacttacacagtagattgttagaaagagcagcaaaactttctgatgctatgggagggggttctatgactgctctcccaattattgaaactcaggcaggggacgtttcggcttacatcccaactaatgttatttcaattacagatggacaaattttcttgagtgcagatttatttaactcaggattgagaccggctattaatgttggtatttctgttagccgtgttggaggagctgctcagacaaaagcaattaaaaaaattgctggaactttaaaattagaactcgcacagtttgatgaactagctgctttttcccaatttgcatctgatcttgatgaagcaactcagcaacaacttgaacgaggcaaaagacttagagagttattaaagcaacctcaattctctccactgaaccttgcagaacaagttgcagttgtttatgcaggagttaaaggcctaattgatgaggttccagttgaagatgttactaaatttgcaactgaacttagggaatacctgaagttaaataaagcagaatttatagaagagattcttaaagaaaagaaattaaatgatggattggaagcgacactaaaagaggtgataaatgaagttaaatcatcaatgcttgccacagtttaaa

SEQ ID NO: 272507 - DNA, 379 bp, Unknown
  Bacterial polypeptide expressing nucleotide sequence isolated from the Sargasso Sea
atcaagaattttagatccaagaattgttggagatgagcattatagagtagcaagagatgttcaacgaatactacaatcatataaatcactacaagatattatagctattcttggtatggatgagttatctgaagaagataaattagttgtagcaagagctagaaaaatccagagatttttatctcaaccattctttgttgcagaagtatttactggttctccaggaaaacttgttgatcttgactcaacgatcaaaggtttcgatgcaatctgtaaaggcgagtatgatcacttacctgaagctgctttttatatggttggaacaattgaagaagctatagaaaaagctaagaaaatggaacaagaagctgctgcttaa

SEQ ID NO: 272508 - DNA, 805 bp, Unknown
  Bacterial polypeptide expressing nucleotide sequence isolated from the Sargasso Sea
gcgagtacttccgagacaaggagaggacgccctaattatttttgatgacttaaccaaacaggcctgggcatacaggcaagtatcacttctattaaaaagacctcctgggagagaggcttatcctggcgacgtattttatcttcactcaagattgcttgagagagcagcaagggtcaacgcagagtatgtagaaaaagaaacaggcgggaaagtgaagggccaaacaggctcgttaaccgcattgccaatcattgaaacacaagcgggtgacgtttctgctttcgtcccaacaaatgtgatttcaattacagacggacaaatatacctagaaagtgatttattcaatgcaggcattagaccggcgataaatgctggtctatctgtttctagggtgggcggagcagcgcaaacgaaaatcattaaaaaactcggtggtggtgtcaggctggcattggcacaatatcgtgagcttgcagcatttgcccagttcgcatccgatcttgatgaagccacaaggaagcagttagaaagaggccagagagtaacagagctaatgaagcaaaaacaatatgcaccattgactgtggcagaaatggctgtatctctttatgctgcgaacgagggctatcttgatgacgtcccagcagataagattgtcgatttcgaggcagcattacacgcaaactttgttgaatcagcctctgatcttgcccaaaagatcaatgatactggtgactacaacgatgaaattgaagccgagctcaaaaagttcgttgaagattttaaagcaaccggcacctattaa

SEQ ID NO: 272509 - DNA, 928 bp, Unknown
  Bacterial polypeptide expressing nucleotide sequence isolated from the Sargasso Sea
gatgatagtggaaccactcttgaagttcagcagcagttaggcgatggtgttgttagaacaatcgcaatgggtgcaacagaaggtttaaaaagaggcttacttgcaacaagaactaatgcgcctatctcagttccagtggggccagaaacattggggagaattgttgatgtgcttggaaatcctatagatgaaaaaggaccaattggcgagaagcagaagatgcctattcatagaaagccgccaacctatacagatcaatcggtatcaaatgatattcttgaaaccggcattaaagttatcgatttaatgtgtccttttgcaaagggtggaaaaattgggttgtttggtggtgctggtgttggtaagacggttaatatgatggagcttattaataatattgcgctgcaacattcaggcttgtctgtatttgcaggtgttggcgaaagaactagagagggaaatgatttttattatgagatgcaagaatcaggagtagttaacattgataatcttggagagtctaaagttgcaatggtgtatggacagatgaatgagcccccaggaaacagacttagagttgcattaacaggattgactatggctgaaagcttcagggatgaaggaaaggatgttttattatttattgataatatttatagatatactttggcaggcgttgaggtttctgctttattgggaagaatgccatcagctgttggatatcagccaactcttgctgaagaaatgggtgccctacaagaaagaattacatccaccaagacaggatccatcacatctattcaagcagtatatgtgccagccgatgacttaactgacccatcgccagcaactacgtttgctcactttggatgcacagtggttctatcacagacaatttcagagctaggaatttatcctgctgtgtgac

SEQ ID NO: 272510 - DNA, 874 bp, Unknown
  Bacterial polypeptide expressing nucleotide sequence isolated from the Sargasso Sea
gacgcaggagccatggaatatactactatagtttcagcaacagcgtcagattccgctccattacaattcttagcaccgtatactggttgtgctatgggagagtattttagagacaatggaatgcatgcacttattatttacgatgatttgtcaaaacaagctgtagcctaccgtcaaatgtctttattacttagaagacctccaggtagagaagcttatccaggtgatgtcttttatttacacagtagacttttagaaagagcagcaaaactaagtgatgcgaacggaggtggctcattgacagcattacctgtgatagagacacaggcaggagatgtctctgcatatattcctaccaatgtaatttcaattacagacggacaaatttttttagaaacagagttatttaaccaaggtattagaccagctgttaacgttggactatctgtttcaagagtaggatcagccgcccaaactaaagcgatgaaaaaagttgcgggttcaattaaattagagttggctcaatatagggaaatggcagcatttgcccaattcggatctgatttagatgcctcaactcaaaaattattaaacagaggatcaaaattaacagaattattaaagcaaaaacaatattcaccaatgactgttgcagagcaagttctaactatatttgcaggtgttagagggtatctagacgatgtagatttgaaaaatatcgaagatttcgaaaaccaacttttggaaaagtgtaaatctgagaaacctgaaattattgaaagtatttctagtacaggcaaacttgatgaaaatattgaaaaaaaattagcaacattaataaatgaattaaaagaaaaatttaaaaatgcctagt

SEQ ID NO: 272511 - DNA, 829 bp, Unknown
  Bacterial polypeptide expressing nucleotide sequence isolated from the Sargasso Sea
aatgtcaaataaggctggtaaaatttctcaaataatgggcgcagtagttgatgtatctttcgaagataattatctccctgaaataatgaatgcactaaatgttgatagaggcgatgaagatcttttagtgcttgaagtggcgcaacatcttggtgaaggtttggttagaacaattgcaatggatacgaccgatggtctcactaggggggtagaggtgctagatactggttcaccgatatcagtcccagtaggccaagaaacattaggcagactatttgatgttttggggaacaccattgatggcaaagaaactttagaaacaaaaaaaagaaatccgatacatcgttcagctccaagacacgaagatttgactaccactacagaagttttggtcacaggcattaaggttgtggacctaatggagccttatacaaaaggtggcaagactggacttttcggaggtgctggagtaggtaaaactgttctaattcaggagctcattcgcaacattgcaacagagcatggaggttattctgtttttgctggtgttggtgagagaacacgtgaaggaaatgatttgtacaacgaaatgacagaatcaggtgtaattgataaaacaaccatggtttttggacaaatgaatgaaccaccaggagcaagattaagagttgcgcttagtggtttagcaatggcagaattttttagggatgacgaaggaagagatgttctactttttgttgataatatatttagatttactcaggcaggatctgaggtttcagcactgctcggtagaatgccgtcagctgttggttatcaaccaacttta

SEQ ID NO: 272512 - DNA, 267 bp, Unknown
  Bacterial polypeptide expressing nucleotide sequence isolated from the Sargasso Sea
taggtatggatgaattatcagaagaagataagttaactgtggcaagagcaagaaaaattcaaagatttttgtctcaacccttctttgttgcagaagtatttactggctcaccaggtaaacttgtagatttagagtctacgataaaaggttttgatgcgatatgtaaaggagaatatgaccatcttcctgaagcggcattttatatggttggaacaatagaagaggccattgaaaaagctgaaaaaatgaaaaaagatgctgcttaat

SEQ ID NO: 272513 - DNA, 1047 bp, Unknown
  Bacterial polypeptide expressing nucleotide sequence isolated from the Sargasso Sea
ttgaaaatccaattgatggaaaaggtgcgctggacaaaagtgtaaaaaaaacaagggtagaggtcaaagcccctggtattattcctagacagtcagttagtgaaccaatgcaaactggattaaaatcaattgacagtttagtgccaattggaagagggcaaagggaattaataattggagacaggcagacaggtaaaactgccgttgctgttgatgcaattataaatcagaaaaaaattaatgaatcaggtgatgagaaacaaaaattatattgtatatatgttgcagtcggtcaaaaaagatcaacagtaagacaaattcaaaaaacgttagaagaagcaggcgcaatggaatacacaactattgttgcagctacagcatcagattcagctcctttacaatttttagctccttatacaggttgtgcgatgggcgaatattttagagataatggaatgcacgctttgattatttatgatgatttatcaaaacaagctgttgcttatagacaaatgtctcttcttttaagaagacctccaggaagggaagcctacccaggagatgtattctacttacacagtagattattagaaagggcagcaaaacttagtgacgaacatggcggaggatcactaaccgcacttcctataatcgaaacacaaggaggagatgtttccgcatttatcccaacaaatgtaatttcaattacagatggtcaaatatttttagaaacagagctctttaaccaaggtatcagaccagcaattaacgtaggattatcggtatctagagttggatcttcagctcaaacaaaagctatgaaaaaagtatcaggttcaatgaagcttgagttagctcagtatagagaaatggcagcttttgctcaatttggatcagatttagatgcttcaacacaacagctccttaaccgaggttcaaagttgactgaacttttaaagcaaaaacaatattcaccaatgacagttgcagagcaagtaatatctgttttttgtggagttaaggttatttggatgatattgatttaaa

SEQ ID NO: 272514 - DNA, 496 bp, Unknown
  Bacterial polypeptide expressing nucleotide sequence isolated from the Sargasso Sea
gatggtcaaatattccttgaaacagagcttttcaatcaaggtattagacctgcaataaatgttggattatcagtttcgagagttgggtcttctgcacaaactaaagcgatgaaaaaagtctctggttcaatgaaattagaacttgcacaatatagagaaatggcagcatttgctcaatttggctcagaccttgatgcatcaacccagaaattacttaatagaggttcaaaattaacagaacttttaaaacaaaatcagtattcaccaatgactgttgcggaacaagtaatttctattttctgtggagtaaaagggcatcttgatgatgttgaacaaaaagatatctctagtttcgaaaataaaataatcgacaaatgtagaactgaaaaacctgaaattattgaggctatcactgcatctggaaaacttgatgatgagaatgagaagacacttaacgaaataattcttcaacttaaaaaagattttagctcttaaa

SEQ ID NO: 272515 - DNA, 427 bp, Unknown
  Bacterial polypeptide expressing nucleotide sequence isolated from the Sargasso Sea
atggcaagtttagatgatctaaaaaagagaatttcgagtgttaaatcaacacagaaaataacaaaagctatgaagatggtagcggctgcaaaactaagaagagcacaagaaagcgctgaaaaaggaagaccttattcagacaaaatgaataatgttattttaaatttatcaagtgcaatatctgatattgaaaatgctccaaaattattatctgggacaggagaagataaaattcacttatgtgttgttatgacatcagatagaggtctttgtggaggatttaatactaacataattaaaaaagcaaaattatattttcaaaaaatattggaagaaggaaaaatattaaaaatcattacagttggaacaaaaggttatgatcaattaaaacgtgcttatagcgaccatatcattgatagaatttcat

SEQ ID NO: 272516 - DNA, 378 bp, Unknown
  Bacterial polypeptide expressing nucleotide sequence isolated from the Sargasso Sea
tatgagaaaaggacaaattacacaaattattggagcagtagtagatgttaagtttgaaggagatctaccagaaatattaacagcactagagtgtgataatggaggtgttaggctcgttttagaggttgcacaacatttaggagagtcaagtgtaagaacaatcgctatggatgcaacagaaggattaaaaagaggagatcaagtaacagatactggagctccaattaaagttccagttggtccagaaactttaggtagaattataaatgtaattggcgaacctattgatgaaaaaggagaagtcaaaactaaagaaaactggcctatccatagatctgcacctgagtttaatgaacaatcaacagaaacagaaatttt

SEQ ID NO: 272517 - DNA, 500 bp, Unknown
  Bacterial polypeptide expressing nucleotide sequence isolated from the Sargasso Sea
aatgtcaaaaaatataggtaaagtttcaaaagtaattggagctgttgttgatgttgaattctcatcaaaagaaagtacactgcctgggatatatgactctcttgagattaaaaaagaagatggtactattctaattcttgaggttcagtctcacataggtgaaaatattgttagaacaatatcaatggattcaactgatggactaagcagaggaacagatgttgttgcaacaggtaatccaatacaaatgccaattggtaaagaagtttatggaagactttttaatgttgtaggagatccaattgatggtcttgaagtattaccaaaaataaatgatgatgggatgtctattcatagacaagcacctgattttgatcagttatctacttctactgaagttttatatacaggaatcaaagttattgatcttattgagccatatgctaaaggtggtaagattggattatttggaggagctggagtaggaaaaacagtattaa

SEQ ID NO: 272518 - DNA, 667 bp, Unknown
  Bacterial polypeptide expressing nucleotide sequence isolated from the Sargasso Sea
tcaggctctggtgaagataaagtccatttatgtattgttatgacatctgataggggattatgtggtggatttaatacaaatattattaaaaaagctaaatcatattttcaaaaaatatccaatgaaggtaaaaccttaaaaattattactgtcggatcaaaaggttatgatcaattaaaaagaatgtataaagataatataattgaaaaaatttcttttaaagaatccaaatatgctaattattttgacgccgacaaagtaggcaaaataattattgataaatttgaaaaaaaagaatttgatgtatgtacaattttttataaccaatttaaaaatgtaataactcaaataccacaagaacaacaaatcatacctttaaaagctactgagtcagcgggaaattcatctgaagataattatgagtttgaaccagaggaagatgaaattttaagcaatctattgcctaaaaatatatctactcagatttttagggcaatgttagaaaattcagccagtgaacaaggttcaagaatgagtgcaatggataatgcaactagaaacgctggtgaaatggttgacaagcttactattcagtataatagaagtcgtcaagcagcaattactaaagagttaattgaaattatatcaggagcagaaagtttataat

SEQ ID NO: 272519 - DNA, 931 bp, Unknown
  Bacterial polypeptide expressing nucleotide sequence isolated from the Sargasso Sea
agacttcttggaagggtagtggatgcacttggtaacccaattgatggaaaaggccctattaaggctaaagaaaatggtcgtgttgatattaaggcacccggtattatgcctcgtaaatcagtacatgaaccaatgcaaactggcttaaaagcaattgatgctttaattccaattggcagggggcagagggaattgatcattggagatagacaaacaggaaaaacagcaattgctttagatacaatattaaatcagaaatctgtaaacgcaactgatgatgaaagtgcaaaattatattgcgtatatgttgcaattgggcaaaaacgatcttcagtagcccagttggtaaaaatcctagaggataatggagcccttgagtattccgttgttgttgcagccactgcttccgatcccgctccattgcaatatctggcgccattttcaggttgtacaattggagagtattttagagacaatggaatgcattcactaatcgtttatgatgatttatccaagcaggcggttgcatatcgtcaaatgtcactgctattaaggagacctccaggtagggaagcttatcctggtgatgtattctatttgcattcaaggctattagagcgtgctgcaaaacttaatgaagaaaatggttcggggtcccttaccgctcttcctgtaattgagacacaagcaaacgatgtttccgcatttattcctacgaatgtcatttcaatcacagatgggcaaatattccttgaaacagatttgttctaccaaggaattcgtccagccgttaatgttgggttatctgttagtcgtgttggctcttcagcccagattaaagcaatgaagcaagtcgcaggtaaaataaaaggtgaacttgcacagtatcgtgaaatggctgcttttgcccaattcggatctgatttagatg

SEQ ID NO: 272520 - DNA, 487 bp, Unknown
  Bacterial polypeptide expressing nucleotide sequence isolated from the Sargasso Sea
aacagacccggcaccggcaacatcttttgctcatttggatgctacaacaacacttaatagatcaatcgcggaaaagggtatttacccagctgtggacccgctggactcaaatagtagaattttagacccgcgaattgttggtgaagagcattacgctgttgcaaggcaagtgcaggaaactcttcaacgctataaatcattgcaagatattattgcgattttaggaatggatgagctctctgaagatgataagcttatagttgctcgtgcaaggaaaattgagaggtttctatcacagccatttcacgtggctgaggttttcacaggaagccccggtgtttttgtatccctcgaagatacaataaaagggtttaaagaagtgtgtgatggtaagcatgatgaccttccggaagctgctttctatatgtgtggaacaattgaacaagtaattgaaaaagcgaataagttaagcactgacgcagcttaa

SEQ ID NO: 272521 - DNA, 758 bp, Unknown
  Bacterial polypeptide expressing nucleotide sequence isolated from the Sargasso Sea
taaagcaacgcttgttatttatgatgatctaacaaaacaagctcaagcttatagacaaatgtctcttcttttaaaaagaccaccaggaagagaagcttatcctggagacgtgttctacttacatagtagattactagaaagagcagcaaaactttctgatgcaatgggagggggttctatgacagctcttccaattattgaaacccaagcaggcgatgtttcagcttacattccaactaatgttatttcaattacagatggacaaatattcttgagtgcagatttatttaactcaggattaagaccagctattaatgttggtatttctgttagccgtgttggaggagctgctcagacaaaagcaattaaaaaaattgcgggtactttgaaattagaacttgcacagtttgatgaactagctgctttttctcaatttgcatctgatcttgatgaagccactcagcaacaacttgaaagaggtaaaagactaagagagttattgaagcaacctcaattctctccgctgaatcttgctgaacaagttgcagttgtttatgcaggagttaaaggtcttattgatgaagtccctgttgatgatgttactaaatttgcaactgaacttagggaatacctaaagttaaataaagccgaatttatagaagagattcttaaagaaaaaaaattaaatgatggattagaagcaacattaaaagaggtgataaacgaagttaaatcagcaatgcttgccacagtttaaa

SEQ ID NO: 272522 - DNA, 376 bp, Unknown
  Bacterial polypeptide expressing nucleotide sequence isolated from the Sargasso Sea
atgagaaaaggaaaaattacacaaattatcggagcagtagtagatgttaaatttgatggagaactaccagaaatattaacagcattagagtgtgataatagtgggaacagactagttttagaggttgcacagcatttaggagagtcaagtgtaagaacaattgctatggatgcaacagagggtttaaaaagaggagatgaagtaacagacaccggggctccaatcaaggttcctgttggcccagaaactctaggaagaattataaatgtaattggtgaacctattgatgaaaaaggtgaagttaaaactaaagaaaattggcctattcatagatcggctccagaatttagcgagcaatctactgaaacagaaattt

SEQ ID NO: 272523 - DNA, 739 bp, Unknown
  Bacterial polypeptide expressing nucleotide sequence isolated from the Sargasso Sea
atgagcaaaggaataatcacacaagttattggagcggtagtagacgtaaaatttgatggtgaactaccagaaattttaacagcattggaatgtaaaaatggtgataacagactagttttagaggtagcacaacacttaggtgaaaccactgtcagaacaattgctatggatgctactgaaggattaaaaagaggtgatgaagttattaatacaaatgctcctattcaagttccagttggacctgaaacacttggaagaattataaatgtaattggcgaaccaatagatgaaagaggtgaggttaagactaaagaaagttggccaattcatagagctgcacctgaatttaatgaccaatcaacagaaactgaaatacttgtaacaggtattaaagttattgatttgcttgcaccttatgcaaaaggtggaaagattggattatttggtggagcaggagtaggaaaaacagttttaattatggaattaattaataacgttgcaaaagctcatggtggtttttcagttttcgcaggagttggagagagaactagagaaggaaatgacctttatcatgaaatgattgaatctggagtaattaaaaaagaaggagctggttcaaaagctgctctagtttatggacagatgaatgaacctcctggagcaagagcaagagttgcacttacagggttaactgtagctgaatactttagagatcaggaaggccaggacgtacttttct

SEQ ID NO: 272524 - DNA, 760 bp, Unknown
  Bacterial polypeptide expressing nucleotide sequence isolated from the Sargasso Sea
atggctaataatttaactggaaaaatatcacaagtacttggagcagttgtagatgtagaatttgatggagaacttcctgctatcatgaacgcacttgaagtagacaacaatggtaatcgattaatgttggaagttgctcaacatttaggagaaaacgctgtccgtacaattgccatggacgtcacagatggtttgatcagaggccaaacagcaacagacacaggtgcccctatttcaatgcctgtaggcccagaaacgttaggacgtataatgaatgtagtaggagagcctgttgatgaaagaggtgaaattggcacaaaaaaaacatatcctattcatagatctgcgccagaatttgttgatcaatctactgaaacagaagttttagtcaccggtattaaggtagttgatcttttggcaccatatgcaagaggtggtaaaattggactttttggtggagcaggtgttggtaaaacagttttaattatggagctgattaataatattgcaaaagcacatggtggttattctgtttttgcaggagtaggagaaagaactcgtgaaggaaatgatctttatcatgaaatgattgagtctggtattatcgacttaaaaggaaaagattccaaggttgctttagtttatggtcaaatgaatgaacctcctggagctcgagcaagagttgccttatctggattgactcaggcagagtatttcagagatgaagaagggcaagacgttttattttttgtagataata

SEQ ID NO: 272525 - DNA, 534 bp, Unknown
  Bacterial polypeptide expressing nucleotide sequence isolated from the Sargasso Sea
aatgcctagtttagatgatttaagaaaaagaattactagtgttaaatcgacacaaaaaatcactaaagcgatgaaaatggttgctgctgctaaattacgaaaagcccaagaaaacgctgaaaaaggcagaccttattctgaaaaaatgaataatattatattaaatctttcagctggtgtcagcgatcctcagtcagcaccaaaattattagttggcacaggaaaagaggatgttcatttaagtgtcgttttaacttctgatagaggattatgtggtggatttaatagcaatataataaaaaaagcaaaaaattattttgaaaaaatacaaaaagagggaaaatctcttaaaatcataactgttggctcgaaaggatatgatcaactaaaaagacagtatggtaacagtataattgaaaatatttcatttaaagagtcaaaaaatattaattattttgatgcagcaaaggttggcaatttaataatcgaaaaatttcaaaatgaagagtttgacttttgcacaatatttttcaa

SEQ ID NO: 272526 - DNA, 418 bp, Unknown
  Bacterial polypeptide expressing nucleotide sequence isolated from the Sargasso Sea
gttggatcagccgctcaaactaaagcgatgaaaaaagttgcaggttcaattaaattagaattggctcaatatagagaaatggcagcatttgctcaatttggatctgatttagatgcctcaactcaaaaattattaaatagaggatcaaaattaacagaattattaaaacaaaaacaatattcaccaatgactgttgcagagcaagttttaactatattcgcaggtgttagaggataccttgatgatatagacttaaaaaatatcgaagattttgaaaatcaacttttggaaaaatgtaaatctgaaaaacctgagattattgaaagtatttccagctctggaaagcttgatgaagatatagaaaaaaaattagcatctctgataaatgatttaaaagaaaagtttaaaaatgcctagt

SEQ ID NO: 272527 - DNA, 844 bp, Unknown
  Bacterial polypeptide expressing nucleotide sequence isolated from the Sargasso Sea
aatgagtgatactggcgtaataaaacaaataataggtgctgttatcgacgttgagttcgataaagcccaaattccgaatatctatgatgccttggttgttagtgaaaacaatcttgttcttgaaacacaacaacaattaggtgatggggttgtcagaactgttgccatgggaaccactgaaggattaaaaagagggctagacgttgaaaacaccaaagcaccaataagcgtccctgttggcgaagcaactctaggaagaataatgaatgtattgggcgatccaattgatatgaaaggcgaagtcaagacaaaagaaagaatgcctatacacagaaagccacctgaatatgtagatttgtcagattcaaatgaaattctagaaacaggcattaaggttatcgatctagtttgtccatttgccaaaggcggaaaagttggattatttggcggtgctggcgttggaaaaacagtcaacatgatggagctgattagaaatatagcgattgagcattcaggctactcagtttttgccggcgttggagaaagaaccagagagggaaatgatttttatcatgaaatgacagattcaaatgttttagacaaagtttctcttgtttatggtcagatgaatgagcctccaggaaatagacttagagttgctttaactggcttaaccatggctgaaaaattcagagatgaaggaagagatgttctgctttttgtagacaacatctatagatatactttggctggggttgaagtgtctgcattattagggagaatgccatcagctgttggatatcagcctacgcttgcagaagaaatgggagtgcttcaagaaaga

SEQ ID NO: 272528 - DNA, 289 bp, Unknown
  Bacterial polypeptide expressing nucleotide sequence isolated from the Sargasso Sea
acaaagatataatgagctcaaagatatcattgcaattctcggaatggatgagctttctgaagaagataaagggcttgtagctagggcaagaaaggcccaaagatttttatcccagccgttctttgttgccgagatttttactggaacaccaggaaagtatgtttcgcttgaggatacgattaaagcatttaagggaattcttaatggagattatgaccatcttcctgaacaggcattttatatggttggaactattgaggaggctgtagaaaaagctaagactttataa

SEQ ID NO: 272529 - DNA, 584 bp, Unknown
  Bacterial polypeptide expressing nucleotide sequence isolated from the Sargasso Sea
aatgactacaaaaataaacccatcagaaatatcaagcatcattaagaagaagattgatgactataaaggggctgctacagaagctaatgttggtgaagtcctttctactgcagatggaattgtccaaatttatggtttagaagatgcaatgtatggggagctgttagatttcggagaaggaacatatggcctagctttaaatcttgaaacagattccgttggtgctgtagtgctaggtgactcaggacacataaaagaaggacaaaaggtaaaaaccaccggaaggatacttgaggttccagttggcgaaggtttaaaaggaagagttatagatgccttgggcagaccattagatggaaaaggcgaaattaaatcgaaacataatgctcctattgaggttgtggctccgggtgtaatcgataggcagtcagtggatcagccagtacaaacaggaataaagtcaattgatgtaatggttcctattggaagaggacaaagagaattaattatcggagacagacaaacaggaaaaacagcaattgctgtagacaccatagttcatcaaaaaaattctggcataactt

SEQ ID NO: 272530 - DNA, 804 bp, Unknown
  Bacterial polypeptide expressing nucleotide sequence isolated from the Sargasso Sea
tccgacgttgggacagttgtttccgtaacagatggtatcaccagaatacatggactaaacgacgtccagtacggagagatgatcgagtttcctggcgatacatttggcttggcccttaacttggaacaagactcagtcggagcggtggtattaggtgactacacccacgtttctgagggagcacaagtaaaaacaaccaatagaattcttgaagtgccagttggcgaaggcttgcttggcagagttgtcgactccttgggaacgccactcgatggaaaaggagctgtttcctcagaccaaacagcaccaattgaaaaagttgcaccaggcgtcatctcaagacagtcagtcgaccaaccagttcaaaccgggcttaagtcgattgatgcaatggtaccaatcggaagagggcagcgagagcttatcattggtgatagacaaacaggaaaaacagcggttgctgttgacaccataatcaaccaaaaaggcacagggataaaatgtatctacgttgcggtgggccagaaaaactcttctgttgctaatgtggttaaaaagttagaggaagaaggcgcattagagcacacaatcattgtcaatgctgcagcatccgattcagctgccatgcagtatattgctccatattcaggctgtgccatgggcgagtacttccgagacaaaggcgaggacgcactaatcatttttgatgacttaaccaaacaagcctgggcatataggcaagtatcgctcctattaaaaagacctcctggaagagaggcttatcctggcgacgtattttatctt

SEQ ID NO: 272531 - DNA, 331 bp, Unknown
  Bacterial polypeptide expressing nucleotide sequence isolated from the Sargasso Sea
atggctaacaatttaactggaaaaatatcacaagtacttggagcagttgtagatgtagaatttgatggagaacttcctgctatcatgaacgcacttgaagtagataataatggtaatcgactaatgttagaagttgctcaacatttaggagaaaatgctgtacgtacaattgccatggacgttacagatggtttggtcagaggccaaacggcaacagacacaggtgcccctatttcaatgcctgtaggcccagaaacgttaggacgtataatgaatgtagtaggagagcctgttgatgaaagaggtgaaattggaacaaaaaaaacatacc

SEQ ID NO: 272532 - DNA, 654 bp, Unknown
  Bacterial polypeptide expressing nucleotide sequence isolated from the Sargasso Sea
catctacagatacacggcttgcaggcacagaggtatcagcactacttggaaggatgccatctgcggttgggtatcaacctaacctcgcagaagagatgggcgtacttcaagaaaggatcacctctactaaaacagggtcgatcacgtcaattcaagcggtttatgtaccagcagatgatttgacagatccttcgccagccacaacatttgcccaccttgacgcaacagttgtattggcaagatcaattgcagagcttggtatttatccagcggtcgatccgctcgactcaaacagtcgtcaattggaccctggtattgtgggccaagagcactatgataccgcaaggtcagttcaacaggtcctacaacgctataaagagctgcaagacatcatagcaatcctaggcatggatgaactttctgaagaggacaagctcacagtgcaaagagcaagaaagatccaaaggttcttgtcacaaccattctttgtagcggaagtctttaccggatcaccaggccagtatgtatctcttagagattcgatcaaggcattccaaggaattgttgccggtgagtatgatgatctcccagagcaagcattctatatggttggcaccattgaagaagcagtcgaaaaagcaaaaagtatgtaac

SEQ ID NO: 272533 - DNA, 601 bp, Unknown
  Bacterial polypeptide expressing nucleotide sequence isolated from the Sargasso Sea
atggctgaaaaaggaaaaatttcgcaggtaatgggtgcggttgttgatgttgtattcgaacaaggtcatttaccggatatatataatgctctaacagtcgatagacaagatgaggctcaattagttctagaagtagcacagcatttaggtgattcagctgtgcgaacagttgcaatggattctacggatggactagtcagagggactgaagtagtggacagtggtattccaatttcagttccggttggccctgagactttaggaaggctttttgacgttttgggtaatactattgataataagggtgatgttaaaacggataaagtaaatcctattcatcgccctgctccaagacatgaagatcttgctacatctactgaaattcttgttactggaataaaagttgtggatcttatggaaccatatactaagggtggaaaaactggtttgtttggtggcgctggagttgggaaaactgttttaatccaagagttaattagaaatattgcaacagagcatggtggctattctgtttttgctggtgttggagaaagaaccagagaagggaatgacctttacaatgaaatgacagagtctggta

SEQ ID NO: 272534 - DNA, 316 bp, Unknown
  Bacterial polypeptide expressing nucleotide sequence isolated from the Sargasso Sea
aagtactacaaacttataaatctttacaggatatttattgctatattaggaatggatgaattgtccgaagaagataaactgactgttgctagagcaagaaagatacaaagattcctatcacaaccattctttgttgcagaagtatttacaggatcaccaggaaaattagttgatttagaatctacaattaaaggttttgatgcaatttgcaaaggtgaatatgatcatttgcccgaagcagccttttatatggtaggaacaattgaagaggctgttgaaaaagctgaaaaaatggcaaaagaagcagcagcataat

SEQ ID NO: 272535 - DNA, 712 bp, Unknown
  Bacterial polypeptide expressing nucleotide sequence isolated from the Sargasso Sea
atgcccagtcttgatgatctaagaaaaagaatttccagcgtaaaatctacgcaaaaaattacaaaagccatgaagatggtggccgcagcgaagcttcgtaaggcacaagaaatggctgaaaaaggaagaccttacagtgataaaatggattcaattatacaaaatttaagcaaagcaattaacgacccctcaaatgctccaagacttttggttggaaccggagaagacaaaagccatttgtgcgttgtaatgacagcagacagaggtctctgcggcggatttaatacaaatatagttaagttagcaaagaactattttaataaaattttaaaagattccaaaagcttaaaaataataacagttggcaccaaaggacttgatcaactcaaaagagattatggaaaatatattattaaaaaaataaactttaaggacaaaaaaaaactatcttttcaagacgcagaatctattggaaacgaaatagtcacattatttaaaaacaatgaatttgataaatgtgtaatcttttttaataagtttaaaaatgttatgacccaaatacctcagattcaacaagtaatacctgcaaaaaaggatgagaagttaaaagaagaagagcattcatcttatgaatttgagccagaagaggatgaaattttagaggaccttcttcccaaaaatatttccacacaaatatacaagggtttttaga

SEQ ID NO: 272536 - DNA, 334 bp, Unknown
  Bacterial polypeptide expressing nucleotide sequence isolated from the Sargasso Sea
tatgctgtggccagacgagtgcaggaaatcctccagcgttataaagaattccaagacatcattgctattctcggtctcgatgaattatcagaagaagacagagtaacagttgacagagcaagaaaagtcgaaagattcttatctcagccgatgtttgtcgccgagatctttaccggccaacccggagtcttcactggcatcgaagataccatttcctcatttgaggctctggtacaaggtgatctcgatcatgtcccagaacaagccttctatatggttggtggcgcagaagaggttgagcgaaaagcagctgaattagaggctagttcataat

SEQ ID NO: 272537 - DNA, 424 bp, Unknown
  Bacterial polypeptide expressing nucleotide sequence isolated from the Sargasso Sea
tgcagaaattggtatctatcctgcagtagacccactagactctacatctagaattttagatccaagaattgttggtgacgaacattatagagtagctagagatgttcaaagaatactgcaatcatataaatcattacaagatattattgctattcttggtatggatgagttatcagaggaagacaaattagttgttgcaagagcaagaaaaattcaaagattcttgtctcaaccattctttgtagcagaagtatttacaggttcgcctggaaaattagttgatttagattcaaccattaaaggtttcgatgctatctgcaaaggtgaatatgatcatttaccagaggcagctttttatatggttggtacaattgaagaagctattgaaaaagctaagaaaatggaacaagaagctgctgcttaa

SEQ ID NO: 272538 - DNA, 967 bp, Unknown
  Bacterial polypeptide expressing nucleotide sequence isolated from the Sargasso Sea
tcctgttggtaaagaattattgggaagagttgttgatggattaggcaacccaatagatggcaaaggtgctttagataaaggaattaaaagaagtagagttgaagtaaaagctccaggtataattccaagaaaatctgtaaatgaaccaatgcaatcaggattaaaatctgttgatagtttagtcccaattggcagaggacaaagagaactaattattggagacagacaaacagggaaaactgcagttgcaattgatactataattaatcagaaaaaaattaatgagtcgaatgatgaaaaacaaaaactgtattgtatatatgtagcaattggtcaaaaaagatctacagtaagacaaatagaaaaatcattagaagaagctggagcaatggaatatacaacaatagttgctgcaacagcttcagatgcagcgccacttcaatttttagctccctatactggatgtgctatgggagaatactttcgagataatggaatgcatgctttgattatttatgacgatctatctaagcaagcagttgcatatagacaaatgtcattattgctaagaagacctccaggaagagaagcttatcctggtgacgttttttatttacacagcagattattagaaagagcagctaaactaagtgatgagcatggaggtggttctctaacagcacttccaataattgaaacacaaggtggcgatgtttctgcttttattccaacaaatgtaatctctattactgatggacaaatatttcttgaaacaaatctatttaaccaaggaattaggcctgcgataaacgttggtctatctgtatcaagggttggttcatcagctcaaacaaaagcgatgaaaaaagtttctggctcaatgaaattagaactagctcaatatagagaaatggcagcttttgctcaatttggatcagatttagacgcttctactcaaaactgttaa

SEQ ID NO: 272539 - DNA, 853 bp, Unknown
  Bacterial polypeptide expressing nucleotide sequence isolated from the Sargasso Sea
atgagaaaaggaaaaattacacaaattattggagcggtagttgatgttaaatttgatggagaactacctgaaattttaactgcactagagtgtaaaaatggtgataacagacttgttttagaagttgcacagcatcttggagaaacaagtgtgagaaccattgcaatggatgctacagaaggattgaaaagaggagacgaggtaacagatactggggctcctataaaggtaccagttggtcctgaaaccctaggcagaatagtaaatgtaatcggagaaccgattgatgaaaaaggtgaaattaaaacaaaggaaaattggccaatacatagagcagcgcctgaatttaatgatcagtcaactgaaacagaaattttagttacagggataaaagttgttgatcttttagcaccctacgcaaaaggaggaaaaattggattgtttggtggtgcaggagtaggaaaaacagttttaattatggaattaattaacaacgttgcgaaagctcacggtggtttctcagtttttgcaggtgttggagaaagaacaagagaaggaaatgatctctatcatgaaatgattgagtctggtgtaataaagccagatggagcaggatcaaaagctgctttggtttacggtcaaatgaatgaacctcctggagctagagcaagagttgctttatcaggacttacagttgctgagtattttagagatcaagaaggtcaagatgtattatttttcgttgataatatatttagattcacacaagctggctcagaggtttcagcattattagggagaattccatctgctgtaggttaccaacccacattagctaccgacatgggtaatc

SEQ ID NO: 272540 - DNA, 889 bp, Unknown
  Bacterial polypeptide expressing nucleotide sequence isolated from the Sargasso Sea
aatgaaaaaaacattagaagaggctggagcaatggaatacacaacaatagtagctgcgacagcttctgatgcagcaccgctacagtttttggcaccttatacaggttgtgcaatgggtgaatactttcgagataatggaatgcacgcattgataatttatgatgacctttcaaagcaggcagtagcttatagacaaatgtcgcttttacttagaagacccccgggaagagaggcatatccaggcgatgtattctatttacacagcagattgttggagagagcagcaaaattaagtgacgagcatggtggtggatctttaacagctttaccaataattgaaactcaaggaggagatgtatctgcgttcataccaacaaatgtaatttcaattacagacggtcagatatttttagaaactgaattatttaatcagggcataaggccagcaattaatgttggattatcggtatctagggttggttcttcagcacaaacaaaagcaatgaaaaaagtttctggatctatgaaactagaacttgcacagtacagggaaatggcagcatttgcccaatttggatcagatttagatgcttcaacacaaaaacttttaaatagaggatcaaaactaactgaattattaaaacagaaccagtattctccaatgacagttgcagaacaagttgtatcaattttttgtggtgttaaaggacatctagataacatcgaacaaaaaaatattgcagactttgaaaaaaagattattgaaaaatgtaaatcagaaaagccagaaataatagaatcaataataagcaaagacaatattgaagaggatactgagaaatctttaattgatataattaatgaacttaaaaataacttaaaatcttag

SEQ ID NO: 272541 - DNA, 850 bp, Unknown
  Bacterial polypeptide expressing nucleotide sequence isolated from the Sargasso Sea
gttgtttttgggcgattatacccatatttctgagggcgcagaagtaaaaacaacaaacagaattctagaggttccggttggagaaggtttattgggaagagttgtagactcccttggaacaccccttgacggaaaagggtcgattgagacagggcaaacagcgccaatagaaaaagttgcaccaggcgttatctctcgacaatcagttgatcaaccagttcaaactggactgaaatcgattgacgcaatggtaccaatcggcaggggtcaacgtgagttaattattggagataggcaaacgggaaaaacagccgtagctgttgacacgataattaaccagaaaggaacgggcatcaaatgtatctatgtagcagtcggacagaaaaactcatcggttgccaatgtggttaagaagctagaagaggaaggtgcattagagcatacaatcattgttaatgctgcagcatctgattctgctgcgatgcagtatatcgcaccatattcagggtgtgcgatgggagaatatttccgtgacaaaggcgaagacgcactaattatttttgatgatttaaccaaacaagcatgggcatatcgacaggtgtcacttcttttaaagagaccacccggaagagaggcctatcccggggatgtcttttacctccactcaagactgctagagagagcagcaagagttaatgcagagtatgttgaaaaagagacgaatgggaaagtgaagggccaaacagggtctttaaccgcactgccaataatcgaaacacaagcaggcgatgtttctgcttttgtgccaacaaatgtgatttcgatcacagacggacagatatacttggaa

SEQ ID NO: 272542 - DNA, 409 bp, Unknown
  Bacterial polypeptide expressing nucleotide sequence isolated from the Sargasso Sea
attgctgagctaggaatttacccagcagttgatccccttgattcaaatagccgccaattagatccaggagttgtaggtcaagagcactacgataccgcaaggtctgttcagcaggttttacaaaggtataaggagttacaggacattatcgcaattcttggaatggacgagctttccgaagaagacaaactcactgtacaaagagcaagaaaaattcaaagattcttgtcccaaccattttttgttgcagaggtctttacaggttccccggggcagtatgtgtcactgagggattctattaaggctttccaaggaatagtggctggcgattacgatgatcttccagaacaagcgttctatatggttggaacaatcgaagaagcggttgaaaaagcaaaaagtatgtaat

SEQ ID NO: 272543 - DNA, 855 bp, Unknown
  Bacterial polypeptide expressing nucleotide sequence isolated from the Sargasso Sea
ctaaaaaaagaatagctagtgtaaagtctacacaaaaaattactaaagctatgaaaatggttgcagcagctaaattaagaagagctcaagaaagcgctgagaagggaaggccttattctgaaaaaatgaatgatgttattttgaatttatcaaatggtatatctgataaagaaaatgcaccaaagttattgtcaggtactggtcaagaaaaaactcacctttgcgtggtgatgacttctgatagaggtttatgtggtggatttaattctaatattattaaaaaagctaaaagttattttgcaaaaattttagatgaaggtaaagaacttaaaattattacagtaggctcaaagggaaatgatcaactaaaaagagtttatggtgacaaaataattgaaaatatttctttcaaagagtctaaaaatgcaaattattttgatgctgataaagttgggaaaatggtaattgaaaaattcgaagcaggtgaatttgatgtttgtacaattttttataaccaatttaaaaatgtaattactcaaattcctcaagcacagcaaattatccctttaaataatgagggagaagaaagtagctcagaagaaagttacgaatttgaaccagatgaagatgaaattttaagcaatttattgccaaagaatatttctacgcaaatatttaaagcaatgttagagaattcagctagcgagcaagggtctagaatgagtgcaatggataatgcaacccgaaacgcaggtgaaatggttgacaaacttactatcgaatataatagaagccgtcaggcagcaattacaaaagaactaatagaaatcatatcaggagcagaaagtttataat

SEQ ID NO: 272544 - DNA, 841 bp, Unknown
  Bacterial polypeptide expressing nucleotide sequence isolated from the Sargasso Sea
atggctgaaaaaggaaaaatttcgcaggtaatgggtgcggttgttgatgttgtttttgagcaaggtcatttgcctgatatttataatgccctaacagttgatcgaggtgaagaagggcaattggtccttgaagttgcacagcatttaggtgattcagctgtacgtacagttgcaatggactctacggatggacttgttaggggtattgatgtcgtagacagtggtattccaatttcagtgccagttggccctgagactctaggtagactttttgatgtattgggaaatactatcgataataaaggtgatgttaaaacagaaaaagtaaatcctatccatcgtcctgctccaaggcatgaagatctcgctacttctactgaaattctcgttactggaataaaagttgtggacctaatggagccatatactaaaggtggtaaaaccggtttatttggtggtgctggagttgggaaaactgttttgattcaagaattaattagaaatattgctacagagcatggtggttattctgtgtttgctggagttggagaaaggaccagggaggggaatgacctttacaatgaaatgactgagtcaggtgtaattgaaaaaacgactatggtatttggtcaaatgaatgaaccccctggagctagattacgtgttgcgcttagtggccttgctatggctgaatattttagagatgatgaaggaagagatgtgttgttgtttatcgataacatttttcgttttacacaagctggctctgaggtttcggcattattaggtcggatgccctctgctgttggatatcaaccaactttgagtacagaaatgggtg

SEQ ID NO: 272545 - DNA, 842 bp, Unknown
  Bacterial polypeptide expressing nucleotide sequence isolated from the Sargasso Sea
tatgtcaccaaatagtcaagatatagcgtcaataataaaacgtcaaatagaagaatttggcggagatttcagtatggtagatattggtactgttgttgaagccggagatggtgttgtaactatacacggactctcaagcgtaaaagttaatgagttgttacaattccctaatgatattattggacttgcgctaaacctagaagaagatagtgtcggagcagtaatcttgggagattatctttcaattaaagaaggagatgaggtaaggtcaactggaagaattgttgaagttccagtaggggataatttgttaggaagagttgttgatcctcttggtaggccaatggatggtaaaggtgatgtatcaacatcagaatctttacctgttgaaaaaatagctgcaggtgttgttgaaagaaaatctgttgatgagcctgttcagtttgggttgaaaattgttgatgctatggttccagtaggaagaggtcaaagagaactagttattggggacagaacaacaggtaaaacatcattatgcgtagatgctcttattaaccaaaaagactcagatattattggtatttatgtagctgtagggcaaaaagcatcaaaagtagctgcagttgttaccagattagaagagcagggagctttagataatacagttgtagtaactgctaatgcttctgattcagctgcattacagtatttagctccttatgcaggagtaactatggcagaatatttcatgtctcaaggaaaagatgtattgattgtatacgatgatttgagcaaacatgcttgggcatatagacaaatgtctctattgctaagaagacctc

SEQ ID NO: 272546 - DNA, 921 bp, Unknown
  Bacterial polypeptide expressing nucleotide sequence isolated from the Sargasso Sea
aatgaataaaaaaggaaaaataactcagattattggtgcagtcgtagacgtaaattttgaaggtgacttacctgaaatatatacagcattagaagttaacaacgcaggtaacaaactggttctagaagttgcccaacacttgggagaaaatgatgtaagaactatagcaatggatgcaacagaaggacttaaaaggggcgatgaagttgtcaataccgggtcccctattagtgtacctgtgggccctgaaactctaggaagaattataaacgttgtgggagactcgattgatgaaaaaggagaagttaaaacaaaggaaaaatggcctatacatagacccgctccaaaatttacagatcaagctacagagacagaacaattagtaacaggaattaaagtaattgatttattagctccttactcgaaaggaggaaaaattggattatttggaggcgctggagtcggtaaaacagttacaattatggaattaataaataatattgcaaaagcacacggtggcttttcagtgttcgcaggtgttggagagcgtactagagagggtaatgatctatatcacgaaatgatagagtctggagttataaaaacagatggcaaaggatcaaaagctgctctagtttatggccagatgaacgaacctcctggcgcgagagcacgagttgctttaacagggctaacagttgctgaatatttccgagataaagaaggccaagacgtattattctttgttgacaatatttttagatttacacaagcaggttccgaagtttcagccttattagggagaataccttcggcagttggataccaaccaaccttagcgactgacatgggtaatcttcaagaaagaattacttcaacagataaaggatcaataacttctgtacaagctatatacgtttc

SEQ ID NO: 272547 - DNA, 651 bp, Unknown
  Bacterial polypeptide expressing nucleotide sequence isolated from the Sargasso Sea
acaaaacccatttatgcgttgtaatgacagcggatagaggtctttgtggaggcttcaatacaaatatagtaaaaaaggcaaagaattatttcaataggattttaaaagaatctaaaaatttaaaaatcataactgtaggtacaaagggtttggaccaattaaaaagagactacggaaaatatgttattaaaaaaatcaactttaaagacaagaagaagttgtcatttgacgatgccgaagtaattggaaaagaaatagtagatttatttaaaaatgaaaaatttgataaatgtgtaattttcttcaataaatttaaaaacgttatgacacaagaaccacaaacacaacaagtaatacccgcgaagcaagataaagatgataaaaaaaatgaatattcatcatatgaatttgagcccgacgaggatgagattctagaagatttgcttccaaaaaatatatctactcaaatttataaagggtttttggaaaatgcagcaagtgaacaaggttcacgaatgacagcaatggataatgcgacaagaaatgctggagatctagtagaaaaattaactataaattataacagaagcagacaagctgctataactaaagagcttattgaaattatatcaggagcagaaagtttataaa

SEQ ID NO: 272548 - DNA, 265 bp, Unknown
  Bacterial polypeptide expressing nucleotide sequence isolated from the Sargasso Sea
aatgaacaagagtggaaaaattactcaagtgataggagcggtcgttgatgtacaattcgaaggagatttgcctgaaattttaacagcattagaagtagataatagcggaaacaaattaatattagaagttgctcaacacttaggagagaatagtgttagaaccattgcgatggatagcaccgaaggtttaaagaggggtgatgtcgttcaaaatacaggatcacctataagtgttccagttggcccagaaaccctaggaagaatt

SEQ ID NO: 272549 - DNA, 913 bp, Unknown
  Bacterial polypeptide expressing nucleotide sequence isolated from the Sargasso Sea
atggaaataaatccttcagaagttacaaaaatattaaaagaacaaattaaaaattttggtgataaagcagaagtcacagaggttggtcaagttttatcagttggagacggtattgctaggatttatggtttggataatgttcaagctggtgaaatggtagagtttgcagatggttcaaaaggtatggctctaaacttagaaagtgaaaacgttggtgtcgtaatttttggtgatgacagaaatgttaaagaaggtgatgtagtaaaaagaactggtaatattgttgatactccagttggaaaagaattattaggaagagtagttgatggtttaggaaatcctattgatggaaaaggaccattagataaaggtattaaaaaaagtagggttgaagttaaagcacctggtattattccacgacaatcagtaagtgaaccaatgcaaactggtcttaaatcaattgatagtctagttccgattggaagaggacaaagggaattaattattggtgatagacaaactggtaaaacagcagttgcagtagatgcaattattaatcaaaaaaaaatcaatgaatctggtgatgaaaaacaaaaactgtattgtatatacgttgcagttggacaaaaaagatcaacagtaagacaaattcaaaaaacattagaagaagctggagctatggagtacacaacaatcgttgctgctactgcatcggactctgctcctttacaatttttagcaccatacacaggttgtactatgggtgagtattttagagataatggaatgcatgcgttaataatttatgatgatttgtctaaacaagcagttgcttatagacaaatgtcattgctattaagaagacctccaggacgtgaggcttatcctggagatgtattttatcttctatagt

SEQ ID NO: 272550 - DNA, 362 bp, Unknown
  Bacterial polypeptide expressing nucleotide sequence isolated from the Sargasso Sea
gttgtaatttttggtgatgatagagctgtaaaagaaggtgatacagtaaaaagaacaggagcaatcgtagatactccagttggtaaagaattattaggaagagttgttgatggattaggaaatccaatagatggcaaaggtgcattagacaaaggaataaaaagaagcagagttgaagttaaagccccaggtataattccaagaaaatcagtaaatgaaccaatgcaatcaggacttaaatcagttgatagtttagttccaattggaagaggccaaagagaattaattattggtgacagacaaacaggaaaaactgcagtcgcaattgacactataattaaccaaaaaaaaataaatgaatc

SEQ ID NO: 272551 - DNA, 298 bp, Unknown
  Bacterial polypeptide expressing nucleotide sequence isolated from the Sargasso Sea
aagatcttacaaagatataatgagctcaaagatatcattgcaattctcgggatggatgagctttctgaagaagataaagggcttgtagctagggcgagaaaggctcaaagatttttatcccagccgttctttgttgctgagatttttactggaactccaggaaagtatgtttcgcttgaggacactattaaagcatttaagggaattcttaatggagattacgaccatcttcctgaacaggcattttatatggttggaactattgaagaggctgtagaaaaagctaagactttataaa

SEQ ID NO: 272552 - DNA, 803 bp, Unknown
  Bacterial polypeptide expressing nucleotide sequence isolated from the Sargasso Sea
tagggttgaagtcaaagcgcctggcataattccacgtaaatctgttagtgaaccaatgcagactggtctcaaatcaattgatagtctagttccaattggaagaggacaaagagaattaattattggtgatagacaaactggcaaaacagcagtcgctattgatgctatcattaaccaaaaaaaaattaatgagtctggggatgaaaagaaaaaattatattgtatttatgtagctgtaggccaaaagagatctacagttagacagattgaaaaaacattagaggaagctggcgctatggaatatacaacaatagtagctgcaacagcatcagatgcagcacctctgcaatttttagctccttatactggatgcactatgggtgagtattttagagataatgggatgcatgccttgattatttatgatgatttatcaaaacaagctgttgcatatagacaaatgtcacttcttttaagaagacctcctggaagagaagcttatcctggagatgtattttatttacatagtagattactagaaagagctgcaaaactaagtgatgagcatggcgggggatcactaacagctcttccaattatagaaactcaaggaggagatgtttctgcattcataccaacaaatgttatttcaattactgatggtcaaatatttcttgaaacagaactttttaaccaaggtataagacctgccataaatgttggattatctgtgtcaagagttggatcatctgctcaaactaaagcgatgaagaaagtttcaggttccatgaaattagagcttg

SEQ ID NO: 272553 - DNA, 312 bp, Unknown
  Bacterial polypeptide expressing nucleotide sequence isolated from the Sargasso Sea
tattacaaacttataagtcacttcaagatattattgctatattaggtatggatgaactttcagaagaagataaattaacagtagcaagagcaagaaaaattcaaagatttctatctcaacctttctttgttgcagaagtgtttactggatcgccaggaaaattagttgatctagaatctacaataaagggttttgatgcgatttgtaaaggagaatatgatcatttgcctgaagcagctttttatatggtaggaacaattgaggaagcagttgaaaaagcagaaaaaattgcgaaagatgctgcagcataat

SEQ ID NO: 272554 - DNA, 622 bp, Unknown
  Bacterial polypeptide expressing nucleotide sequence isolated from the Sargasso Sea
atggaaattaaagctgcagaaatatcttctgtaattaaagaccaaatagctaattttgaaactaaagcggatgttgctgaggttggaacagtactaagtgttggagacggaattgcacgtgtgtatggtcttgatcaagtacaagctggagagatggtagaattcccaggcggcattaaaggtatggccctcaaccttgaaatggataacgttggtgtttcaatcttcggtgatgatactggaattaaagaaggtgatacagttaaacgtacaggagaaattgttgacgttcctgttggaaaagaattgttaggacgtgttgttgatggtttaggaaatcctattgatggtaaaggtcctattcaatcttctgaaaaaagaagaattgaattaaaagccccaggcattattcctcgtcaaagtgtatctgaacctatgcagacaggtattaaagcacttgatgctcttgttccagttggaagaggacaacgtgaattaatcattggtgacagacaaacaggtaaaactgctgttgctattgatacaatcttaaatcaaaaatctgtaaatcaatcagataatgaaaaagaaaagttatattgtatctatgtcgcaattggtc

SEQ ID NO: 272555 - DNA, 583 bp, Unknown
  Bacterial polypeptide expressing nucleotide sequence isolated from the Sargasso Sea
atgagtgatactggcgtaataaaacaaataataggtgctgttatcgacgttgagttcgataaagcccaaatcccgaatatctatgatgccttggttgttagtgaaaacaatcttgttcttgaaacacaacaacagttaggtgatggagttgtcagaactgttgccatgggaaccactgaaggattaaaaagagggctaggcgttgaaaacaccaaagcaccaataagcgtccctgttggcgaagcaactctaggaagaataatgaatgtattgggcgatccaattgacatgaaaggcgaagtcaagacaaaagaaagaatgcctatacacagaaagccacctgaatatgtagatttgtcagattcaaatgaaattctagaaacaggcattaaagttatcgatctagtttgtccatttgccaaaggcggaaaagttggattatttggcggtgctggcgttggaaaaacagtcaacatgatggagctgattagaaatatagcgattgagcattcaggctactcagtttttgccggcgttggagaaagaaccagagagggaaatgacttttatcatgaaatgacag

SEQ ID NO: 272556 - DNA, 424 bp, Unknown
  Bacterial polypeptide expressing nucleotide sequence isolated from the Sargasso Sea
catggatataaatccttctgaaataacaaaaattttaaaagaacagataaaaaatctgggagataagactcaggtttctgaaattggaaaagtactctccgtaggtgatggtatcgctagagtatatggtcttgataatgtacaggctggagaaatggtggaatttgcagatggctcaaaaggaatggctttaaatttagaaagtgacaatgttggaattgttatttttggagacgataaagcaatcaaagaaggtgacaccgtcaaaagaacaggagcaattgttgatgttccagttggaaaagaattgcttggaagagtagttgatgcgttaggaaatccaattgatggaaaagaagctttaaaaaaaggagtcacaagaaaaagagttgaggtaaaagctccaggaataatccaagaaaat

SEQ ID NO: 272557 - DNA, 862 bp, Unknown
  Bacterial polypeptide expressing nucleotide sequence isolated from the Sargasso Sea
catggccagcggtaaagaaataaaaggtaagattgggagtatcaaaaatactcagaagattaccagtgcgatggaaatggttgctgcgtctaaaatgaaaaaggcgcaggaacgcatggcttctggccgtccatatgcacaaaatatgcttaaagtgattggtcacattgcaaacggtaaccttgaatatcgccatccttatttggaagagcgtgaagtcaagcgcgtcggttacattgtgatttccactgaccgaggcttatgtggtggcttgaacaccaatgaatttaagctcgtcacccaagacgtcaaaaaatggcgggaacagggtgtagaagtggatttcgctgcattaggttctaaagcgtgcagtttcttcaaccgttttggtggcaagttgcttgctgctgaatctggtttaggtgacaagccgtctgtgagcgatgtagtgggtgttgtacgcgttatgcttaaagcgtacgacgaaggacaaattgaccgagtattcttggtattcaatgacttcgttaacaccatgacacagaaacctgtgatcaatcagttattgcctttgccaaagtcagaagacgaagaatatcaacatcgttgggactacatctacgagccagatccaaaagaaattttggaagcactaatggttcgttacattgagtctcaggtgtatcagggtgttgtagaaaacgcggcgtcagagcaagctgcgcgaatggttgccatgaaggcagcaaccgacaacgccggtaaccttattgatgagttacaactggtatataacaaagcgcgtcaggctgcaatcacacaagaaatcagtgagattgttagcggtgccgcagcggtgtag

SEQ ID NO: 272558 - DNA, 556 bp, Unknown
  Bacterial polypeptide expressing nucleotide sequence isolated from the Sargasso Sea
aaggattaccacaactaataaaggatctattacatcagtacaggcaatttatgttcctgctgatgacttgactgatccagcgccagcaacatcttttgctcacttagatgcaacaactgtgttatcaagacaaattgctgaacttggaatttatccagcggttgatcctttagattcaacttctaggattttagatccaagaattgtaggtgatgagcattatagagttgctagagaagttcaaaaaattcttcaaacatataaatctttgcaagatatcattgcaattttgggtatggatgaattatccgaagaagataaactaatcgttgcaagagcaagaaaaattcaaagattcttatctcaaccattttttgtagctgaagtttttacaggttcctctggaaaattagttgatttagaatctacaattaaaggatttgatgctatttgtaagggtgagtatgatcatttaccagaagcagccttctatatggtcggtacaattgaagaggcagtagaaaaagcagagaaaatggcaaaagatgtcgcttaa

SEQ ID NO: 272559 - DNA, 1099 bp, Unknown
  Bacterial polypeptide expressing nucleotide sequence isolated from the Sargasso Sea
gtggttgatggcttaggaaacccaattgacggcaaaggccaaattaaagtcaaaaatagaaaacgtgttgaagttaaggcacctggtataattccaagacagtcagttaacgaaccaatgcaaacaggtttaaaatctatagactcacttattccaataggaaggggtcaacgtgaattaattattggtgatagacagacaggaaagactgcagtggcaattgatacaatcatcaaccaaaaaaaaattaatgagtcttctgatgaaaagaaaaaattatattgtgtatacgttgcaattggacaaaaacgttctactgttgcacaaataacaaagactttagaagaagcaggtgctttaaaatatactacaatagttgcagcaactgcgtctgactcagcacctttacaatttttagcgccttacacaggatgtactattggagaatattttagggataatggtatgcatgctttaattgtatacgatgatttatcaaaacaagctgttgcttatagacaaatgtcattactgctaaggagaccacccggaagagaagcttaccctggagatgtattttatttgcacagcagattattagaaagagcagctaaattaaatgaaaagagcggcggcggttctttaacggctcttcctattattgaaacacaagctggagacgtttcagcttatattccaactaatgtcatttctataacagatggacaaatatttttagagacagaattatttaatcaaggcattcgtcctgcggtaaatgttggactatcagtatctcgagtaggctctgctgctcaaacaaaagcaatgaaaaaagtagccgggtcgattaaattagaattagcccaatatagagaaatggctgcttttgctcaatttggatctgatctagacacctcaactcaaaaattacttaatagaggcgcaaagttaactgaactattaaaacaagatcagtactcaccgatgacagtagcagaacaggtaatatcagtttttacaggagttaagggttatttagatgacgttgagcttagtaaaattaaaaagttcgaaaaagatattgtagaaaaaataa

SEQ ID NO: 272560 - DNA, 310 bp, Unknown
  Bacterial polypeptide expressing nucleotide sequence isolated from the Sargasso Sea
atcgatgcgataattaatcaaaaaaaaattaatgaatcctccgacgaaagaaaaaaattgtactgtgtttacgtcgctattggtcaaaaacgttcaacagttgctcaaattactaaaacattagaagaagcaggagcattgaaatatacaactattgtagcggcaacagcttctgactctgcgcccttacaatttttagccccttacacagggtgcactatcggagaatattttagagacaatggtatgcacgcgttaattgtttacgacgatttatctaaacaagctgttgcatataggcaaatgtctt

SEQ ID NO: 272561 - DNA, 349 bp, Unknown
  Bacterial polypeptide expressing nucleotide sequence isolated from the Sargasso Sea
atggcaagtctagatgatctcaaaaaaaggatagctagtgtaaagtctacacaaaaaatcacgaaagctatgaaaatggttgcagcagcaaaattaagaagagctcaagaaagcgctgagagagggagaccttattcagaaaaaatgaacaatattattttaaacttatctaatggtatatctgataaggaaaatgccccaaaattattatctgggacaggcgaaaataaagttcacctatgtgtagtaatgacatcagacagaggcctttgtggcggttttaattctaacataattaaaaaagcgaaaagttatttttcaaaaattttaaacgagggtaaacaattaa

SEQ ID NO: 272562 - DNA, 449 bp, Unknown
  Bacterial polypeptide expressing nucleotide sequence isolated from the Sargasso Sea
ccagcaattaacgtttgggttatcagtatctagagttggatcatcagctcaaacaaaagctatgaaaaaagtttcgggatcgatgaaactagaattagcacaatacagagaaatggcagcatttgctcaatttggatctgatttggatgcatctacacaacaacttttaaataggggctcaaaactaactgaacttctaaaacaaaaacaatactcaccattgactgttgctgaacaagtaatatcagttttctgtggtgttaaaggatatctcgatgatattgatttaaaagatgtatcagagtttgaaaacaaaattattaataaatgtaaatcagataaacctgaaataattgaagcaattcaaagcactggaaaacttgatgaagataaagaaaagctattagtagaagtaattactcagctgaaaggaacccttaaatcttaat

SEQ ID NO: 272563 - DNA, 877 bp, Unknown
  Bacterial polypeptide expressing nucleotide sequence isolated from the Sargasso Sea
tgttgtagtggctgcggcggctgacccagcaccaatgcaatatattgccccttttgcagcctgttccatgggcgagtatttcagagataggggtgaggatgctctgattatctacgatgacctttctaagcaagctgttgcatatagacagatgtctcttttgctaagaagaccgcccggaagggaggcttatcccggtgacgttttctaccttcactcaagattactagaaagagctgcaagagtgaacgaggaatatgttgagagtcacacaaatggtgaggtgaagggaaaaaccggctcactgactgcactaccaatcatcgaaactcaggctggagacgtttcggcgtttgttcctacgaacgtaatttctataaccgatggacaaattttcctcgagtcctctttatttagttcaggattaaagccagccatggatcctggtatttcagtttcaagggtaggtggtgccgctcaggttccaataattaaaaagcttggtggaggaattaaaacagcccttgctcaatatagagagttagaggcctttgcccaatttgcttcagatcttgacgaggcatccaaagagcaattagagcacggtgtaagggttacagaactgacgaaacaagatcagttctcaccaatgtctgtagctgaaatgggcctaatgctttacacggccaatgaagggtatcttaggcaggttgaggtcgaaaaaatcaaagactttgaaaagagcttgatagcctatatgaattccgagcataaagatcttatggacaaggtatctgagaccggagaatacggagatgatatccaaaacgcatttaaagaagccttagacaaattcatggaaacacaaacctggtag

SEQ ID NO: 272564 - DNA, 775 bp, Unknown
  Bacterial polypeptide expressing nucleotide sequence isolated from the Sargasso Sea
cagatgacagaacctccaggggctagattgcgtgttggtcttactggattaactttagcagaatactttcgtgatgtggaaggacaggatgtattgttctttgtggataatattttccgatttacacaagcaggttcagaggtgtctgctctattaggaaggatgccgagcgcggttggttatcagccaaacttagcttctgaaatgggtgaattgcaagaacgaattacctcgaccaagaaaggttcaattacttctgtacaagcgatttatgttcctgcagatgatttaactgatcccgcacctgcaacagcatttgctcacttggacgcgactactgttctttctcgtcaaattgcagaattaggtatttatccatctgtggatccattagattcgacaagtagaattctcgatccaagaattcttggtgaagaacattacggagttgcaagaaacgtgcagcagattcttcaaaaatataaagaacttcaagatattattgctattctcggaatggatgaattgtcagaggatgacaaactgatagtttcaagagcaaggaaaatacaacgtttcttaagtcaacctttcttcgtagcacagcagtttaccggaacgccaggagtttacgttcccttagaaaagacaattaaaggattcaaagaattagcggaaggaaatgtagatcatcttcctgagcaggctttctatatggtaggagatttagagtctgcgaaagagaaagcggaatctttaggagctaaagtataaa

SEQ ID NO: 272565 - DNA, 661 bp, Unknown
  Bacterial polypeptide expressing nucleotide sequence isolated from the Sargasso Sea
actggggcaagataaaatacatttatgtgttgtactaacttctgacaggggtctttgtggtggttttaattcaaatattattaaaaaagccaagacttattttggaaagatagtaggagaaggtaagacgctaaaaattattactgtaggatcaaaaggatatgatcaattaaaaagattatatagcgataaaattgttgaaaaaatatcttttaaagattcaaaaaatgtaaattattttgatgctgaaaaagttggaaaaataataattgaaagttttttaaaaaaagaatttgatgtatgtacgattttttataataaatttaaaaatgtaattacccaaatacctcaagaacaacaaataattcctttaaaatcatctgagtcagaagattctagttcagatgataattatgaatttgaaccggaggaagatgaaatattaagtaatttattaccgaaaaatatttcgactcaaatttttaaagcaatgttagagaattctgctagtgagcaaggctcaagaatgagcgcaatggacaatgcaactagaaatgctggtgaaatggttgaaaaacttaccattcagtataatagaagtcgacaagctgcaattactaaagaattaattgaaattatatcaggagcggaaagtttataa

SEQ ID NO: 272566 - DNA, 379 bp, Unknown
  Bacterial polypeptide expressing nucleotide sequence isolated from the Sargasso Sea
tatgaaaaaaggaaaaattacacaaattattggagctgttgtagatgtaaaatttgatggcgaattaccagaaattttaacagcattagaatgtaaaaatggtgaaaatagattagttttagaagttgctcagcatttgggagagaccagcgttagaacaattgctatggatgctacagagggattaaaaagaggagatgaggtaactgatacaggtgcacctataaaggttccagttggcccagaaacattaggaagaattgtaaatgtgattggtgaacccattgatgaaaagggtgaagttaaaacaaaagaaagttggcctatacatagagcggcaccagaatttaatgatcaatcaactgaaacggaaaatttt

SEQ ID NO: 272567 - DNA, 496 bp, Unknown
  Bacterial polypeptide expressing nucleotide sequence isolated from the Sargasso Sea
atggaaataaatccttcagaagtaacaaaaatattaaaagaacagattaaaaaaattggagataaagcagaagtttcagaggttggtcaggtactttccgttggcgatggtatagcaagaatttatggactagacaatgttcaggcaggagaaatggttgaatttgcagatggatcaaaaggcatggcacttaacctggaaagcgacaatgtaggagtagtaatttttggagatgatagatcagtcaaagaaggggatacagtaaaaagaacaggtgcaatcgtagatagtccagttggaaaagagctactaggtagagttgttgatggattaggaaatccaatagatggaaaaggtgcactagataagagtataaaaagaaatagggtagaggtaaaagcccctggaatcattccaagaaaatccgtaaacgaaccgatgcaaacaggtttaaaatctgttgatagtttagttcccataggtagaggtcaaagag

SEQ ID NO: 272568 - DNA, 566 bp, Unknown
  Bacterial polypeptide expressing nucleotide sequence isolated from the Sargasso Sea
aatggaaatcaaagcagctgaaatttcatcagttataaaagaacaaattgctaattttgaaactaaagcagacgttgctgaagtaggaacggtattaagcgtaggtgacggaattgcaagggtttatggattagatcaagttcaagctggagaaatggttgagttcccaggaggaattaagggaatggcgctcaatttagagatggataatgttggtgtatctatttttggtgatgatacaggtattaaagagggcgatactgttaaacgtactggagaaattgttgacgttccagttggtaaagagttattaggtcgagttgtagatggattaggcaatccaattgatggaaaaggtccaatacaatcttctgatagaagaagaattgaattaaaagcacctggtattattcctcgccaaagtgtatctgagccaatgcaaactggaattaaagcacttgatgctttagtaccaattggaagaggacaaagagaattaattattggtgatagacaaacaggtaaaacagctgttgctattgacactattcttaatcagaaaactg

SEQ ID NO: 272569 - DNA, 640 bp, Unknown
  Bacterial polypeptide expressing nucleotide sequence isolated from the Sargasso Sea
ttctgaagtatctgcattacttggaagaatgccttcagctgttggataccagccgactctgggaactgatgttggtgaattgcaagaaagaattacatctacattagaaggctcaataacatctatccaggctgtttacgtacctgcagacgacctaacagaccctgcaccagctacaacctttgcccatttagatgctactaccgtgctcgctagggctcttgcagctaagggaatttatccagcagttgatccattagactcaacgagcactatgctacaaccttcagtcgttggcgatgagcattataaaacagccagagctgtccaatcaactttacaaagatacaaagaacttcaagatatcatcgcaattcttggtttagatgagctttctgaagaagatagattaacagtcgacagagctagaaaaattgaaaaattcctctcacaacctttcttcgtagcagaaatatttacaggaatgtctggtaaatatgtaaaattagaagataccattgctggtttcaatatgattttgtcaggtgaattggatgatttaccagagcaggcattttacctagttggtaatattgatgaagttaaagcaaaggctgaaaaaataaaagcagaaaaataa

SEQ ID NO: 272570 - DNA, 191 bp, Unknown
  Bacterial polypeptide expressing nucleotide sequence isolated from the Sargasso Sea
tatgacaatttctctaaaagttttagctcctaataaaaatgtttatcaaggcgaagctgaagaagtaatccttcctagtactactggtcaacttggtatactaccaggacacatctctttagttactgctatagatattggcgttttaaggctaagaatgaattcccaatggaaatcaatagctctaatgg

SEQ ID NO: 272571 - DNA, 388 bp, Unknown
  Bacterial polypeptide expressing nucleotide sequence isolated from the Sargasso Sea
catgaagaagctcggcggtaacatccgtctggccctggcccagtaccgggaactggcggcgtttgcccagttcgcttctgaccttgacgaagcaacccgtaagcagctggagcatggtcagcgcgtcaccgagctgatgaagcagaaccagtacagcccgatgaccgttgcggaaatgggtaccgtactgttcgcagcgaacgaaggcttcctggacgatgtggatgtcaacaaggttgtgaagttcgaagcccaactgctggactggatgcggtccgagcagaaggaacttctggacaagatcggccctgaaggtaacttcaacgacgacatcactgccggcctcaaagctgctctggagaaattcaagaccactcagagctggtaa

SEQ ID NO: 272572 - DNA, 979 bp, Unknown
  Bacterial polypeptide expressing nucleotide sequence isolated from the Sargasso Sea
acgaaccaatgcaatcttggtttaaaagcaatagatagtttagttcctattggaaggggtcaaagggaattgattattggagacagacaaacaggtaaaactgcagttgcagttgatactattattaaccaaaaaaaaattaatgaaagcggtgatgaaaaacaaaaactttattgcatttatgttgcaataggtcaaaagcgatcaactgttagacaaatacaaaaaactttagaagaagctggagcaatggattatacaactattgttgcagctacagcgtctgatgcagcaccattacagttccttgctccttatacaggttgtgcgatgggtgaattctttagagataatggcatgcatgctctaattatttatgatgatttatccaaacaagctgtagcctataggcaaatgtcattattattaagaagacctccaggaagagaagcttatcctggtgatgttttttatttacacagcaggcttttagagagagcagcaaaactaagcaacgaacatgggggtggatcgttaactgcacttccaataattgaaacacaggctggagacgtttcagcatatatacctactaatgtaatttcaattaccgacggtcaaatttttttagaaactaatttattcaatcaaggtataagaccggcgattaatgttggactatctgtatcaagagttggatctgcagcacaaacaaaagcaatgaaaaaagtttctggttcgatgaaactagaattagctcaatatagagagatggcagcttttgcacagtttggttctgatttggatgcatcaacacagaagttactaaatagaggttccaaacttacggaattattaaagcaaaagcaatattctccaatgactgttgcagaacaagttatatctgttttttgtggtgtgagaggctatttagatgatgttgaacttaaagacattgcagatttaaaaaaaaaataat

SEQ ID NO: 272573 - DNA, 898 bp, Unknown
  Bacterial polypeptide expressing nucleotide sequence isolated from the Sargasso Sea
attggtgaaccaatcgatgaaaaaggagaggtaaaaactaaagaaaattggcctatacacagacctgcaccagaatttaatgatcaatctacagaaactgaaattttggtaactggcattaaggtagttgaccttttagctccatatgcaaaaggtggaaaaattggtttatttggtggagcgggagttggcaaaacagtacttattatggagttgattaacaatgtagcaaaagcacatggtggattttcggtttttgcaggagttggagaaagaaccagagaaggtaatgatctttatcatgaaatgatagaatcgggagttataaaaccagaagggcaaggctccaaagcagcattagtttatggacaaatgaatgaacctccaggagcaagggctagagttgcattatcaggtttaacagttgctgaatattttagagatcaagaaggtcaagatgtgctttttttcgtagataacatctttagattcacccaagctggatctgaagtatctgcgttattaggaaggattccttcggcagttggttatcaaccaactttagcaactgatatgggaaatcttcaggaaagaattacaactacgaacaaaggatctattacatcagttcaagcaatatatgtacctgctgatgatttaaccgatcctgcgccagcaacatcattttctcacttagatgcaacaaccgtattatctaggcaaatagctgaaattggaatttatccagcagtcgatccattagactcaacttcaagaattttagatccaaggattgttggtgatgaacattatagagttgcaagagaagtacaaaaaatattacaaacatataaatcgctacaagatattattgctattttaggtatggatgaattgt

SEQ ID NO: 272574 - DNA, 987 bp, Unknown
  Bacterial polypeptide expressing nucleotide sequence isolated from the Sargasso Sea
aatgggtgcggttgttgatgttgtttttgagcaaggtcatttacctgatatttataatgccctaacagttgatcgaggtgaagaagggcaattggtccttgaagttgcacagcatttaggtgattcagctgtacgtacagttgcaatggactctacggatggacttgttaggggtattgatgtagtagacagcggtattccaatttcagtgccagttggccctgagactctaggtagactttttgatgtattgggaaatactatcgataataagggtgatgttaaaacagaaaaagtaaatcctatccaccgtcctgctccaaggcatgaagatctcgctacttctactgaaattctcgttactggaataaaagttgtggacctaatggagccatatactaaaggtggtaaaaccggtttatttggtggtgctggagttgggaaaactgttttgattcaagaattaattagaaatattgctacagagcatggtggatattctgtttttgctggagttggagaaagaaccagggagggcaatgacctttataacgaaatgactgagtcaggtgtaattgaaaaaactaccatggtatttggtcaaatgaatgaaccccctggagctagattacgtgttgcgctcagtggccttgctatggctgaatattttagagatgacgaaggaagagatgtgttattgtttatagataacatttttcgttttacacaagctggctctgaggtgtcggcattattaggtcggatgccttctgctgttggatatcaaccaactttgagtacagaaatgggtgatttacaagaaagaataacatctacaaaaaatggttccattacatctgtacaagctgtttatgttcctgcggatgacttaacagatccagctccctgcactgcttttgcccatttagatgcgacgtctgttcttgaaaggaaaattgcagaattaggaatatatccggctgttga

SEQ ID NO: 272575 - DNA, 835 bp, Unknown
  Bacterial polypeptide expressing nucleotide sequence isolated from the Sargasso Sea
gatgaaagtaagaaactttattgtatatatgttgcagtaggtcaaaagagatcaactgttgcccagattgtaaaaaccttagaagatgctggagccatggaatatacaactattgtatctgccacagcatcagactccgcgccactacaatttttggctccatatactggatgcacaatgggcgaatactttagagacaatgggatgcatgctttaataatttatgacgacttgtcgaagcaagcagttgcatatagacagatgtcattattgctgagaagacctccaggaagagaagcttatccaggtgacgtattttaccttcatagtagattattagaacgagcagcaaaattaaacgatgaaagtggagggggttcattaactgccttgccgataattgaaacacaagcaggagacgtctctgcatatataccaacaaatgttatttctataacagatggtcaaatttttttaggaacagagatatttaaccaaggaattagaccagcaattaatgtaggattatcagtttctagagttggttcagctgctcaaacaaaagcaatgaaaaaagtcgctggttctataaaattagaacttgcacaatatagagagatggctgcctttgctcagttcggttctgacttagatgcttcaacacaacagttactaaacagaggttcaaaactaactgaacttctaaagcaaaaacaatactctcctatgacagtagaggaacaggtaatttcaatattctgtggtgtaaggggttttttagatgatatagaattaaaaaatatttcagagtttgaacaaaaagtaatagaaaaat

SEQ ID NO: 272576 - DNA, 692 bp, Unknown
  Bacterial polypeptide expressing nucleotide sequence isolated from the Sargasso Sea
catgacaattaatccaacagaaattagcgacatcattaaagacaagataaagaatcttgatattaaaacccagtctcataacgagggcacggttgtatctctcactgacggcatagctcgaatttatggaattacagatgctctacaaggtgaaatgttagagttcccaaataatatatatggtttagcacttaatctcgaaagagattctgtcggtgccgtaatcctgggtgattataaatctatctcagaaggagatacagtaaagtgtactggtaacatcttagaagtacctgtgggagatgagttattgggtagagtggtaaattctctcggagatccaatagataatggagggcccataaccacaaagcttaaatctcctatagaaaaaattgcacctggtgttattgagagaaaatctgtggaccaacctgttcagacaggcctgaagtccattgactcaatggtcccaattggacgtggacagcgagagctaattattggcgacagacaaactggtaaaacggctgttgcaattgatgcgatcattaaccagaaagatacaggtgtgaaatgtatttatgttgctattggccaaaaagcctcatcgatagccgctgttgttaggaaacttgaagagcatgatgctcttaaacatacgattattgttgctgcatcagcatcagatt

SEQ ID NO: 272577 - DNA, 406 bp, Unknown
  Bacterial polypeptide expressing nucleotide sequence isolated from the Sargasso Sea
atggaaattaaaactgatcaattaacacaattacttcgagagcagatagaaaagtacgatggctcggttgatatctcagaagtaggagaagtgcttgaagtaggagacggtgttgcccgtgtttcaggccttgaaaatgtaatgagctccgaacttgtcgagctaccaaatggtgtgttcggtatggcgctaaaccttgaagaagataatgttggtattgtattattcggcgaatctcgccttgtaaaggaaggtgatcttgcgaaaagaacaggcagagtagttgaggttccagttggggatgcgatgcttggaagggtagtaaatccgcttgggcagccaattgacggcaagggcccaataaacacagatcattccttacctattgagagaaaagcgttaggag

SEQ ID NO: 272578 - DNA, 999 bp, Unknown
  Bacterial polypeptide expressing nucleotide sequence isolated from the Sargasso Sea
tcaatccactgaaactgagatacttgttacaggtataaaggttatagacttattatcaccatatgcgaaaggtggaaaaataggattatttggtggagctggagtaggtaaaacagttacaattatggaattaataaataatattgctaaagcccacggtggtttttctgtttttgcgggagttggagaaagaactagggagggcaacgatctgtaccacgagatgatagagtcaggggttattaaaactgagggtaatggatcaaaagcggcactagtttatggtcaaatgaatgaaccaccaggcgctagagcaagagttgctttaacagggttaacagttgcagagtactttagagataaagaaggtcaggatgttttattcttcgtagataatatttttaggtttacacaagcaggatcagaagtgtcggcacttttaggaagaataccatcagcagttggatatcaaccaactctagctaccgatatgggaaatttacaagaaagaattacttctaccggcaaaggttcaataacttctgtgcaagctatttatgtgccagcggatgatttaacagatccagcacccgcaacatcgttttcgcatttggatgccacaaccgtgttatcaagacaaatcgctgaacttgggatttatccagctgtagatcctttagactcaacatcaagaattttagatccaagagtcgtcggagaagaacattatagagtagctagagaagttcaacgtgttcttcaggcatataaatctttacaagatattatagctattcttggaatggatgagctttccgaagaggataaattaacagttgctagagcaagaaaaattcaaagatttttgtctcaacctttttttgttgctgaagtttttactggttctccaggtaaattagtagatttagactcaacgataaaaggttttgatgcaatatgtaaaggtgaatatgaccacttacccgaagcagcttttta

SEQ ID NO: 272579 - DNA, 387 bp, Unknown
  Bacterial polypeptide expressing nucleotide sequence isolated from the Sargasso Sea
aatggtagcaactccatcaacttcttcacaaacaaaaggcgtagtacgtcaggtaattggaccagttctagatgtagaatttccagctgggaaattgcccaaaatattaaatgctttaaggattgaggctaaaaatcctgctggacaagatatagcactgactgcagaggttcaacagctccttggagaccatagagtcagagcagtggcaatgagcggcacagacggccttgtgagaggcatggaagcaatcgacacaggcgcgccaatatctgtacctgtaggagaagcaactttaggaagaatatttaatgttttaggagaaccggttgatgaacaaggtccagtaaatactaaagatacagctccaattcatagagcagctcc

SEQ ID NO: 272580 - DNA, 606 bp, Unknown
  Bacterial polypeptide expressing nucleotide sequence isolated from the Sargasso Sea
caaaattaagtgatgagcatggaggaggttctttaacagctctaccaattattgaaactcaaggtggtgatgtatctgcttatattccaaccaatgtgatttcaattacagatggacaaatatttctggaaacagaattgtttaaccaaggtattagacctgcaattaacgttggattatccgtttcaagagttggttctgctgctcaaactaaagcaatgaaaaaggtatctggttcaatgaaacttgaattagcacaatacagagaaatggcagcgtttgctcaatttggatctgatttagatgcttcaactcaacaacttttaaatagaggatctaaattaactgaacttcttaaacaaaaacagtactcaccaatgacagttgctgaacaagtaatttcagttttttgtggagtaaaaggttatttagatgacattgatttaaaagatgtttcagattttgaaaataaaataatcgaaagattcaaatctgataaaccagaaatcatgaattctattttaagttcaggaaaacttgaggaaaattctgagaaaagtctaatagagatgattactcagctaaaaaaaacttttaaatcttaat

SEQ ID NO: 272581 - DNA, 307 bp, Unknown
  Bacterial polypeptide expressing nucleotide sequence isolated from the Sargasso Sea
atggctagtttagatgatctaaaaaaaagaataaccagtgtaaaatcaacacaaaaaattaccaaagctatgaaaatggttgcagcagctaaattaaaaagagcccaggaaagtgcagagaaaggaagaccatattctgaaaaaatgaataatataatcttaaatttatctagtggtatatctgataaagaaagtgcacctaaattattatctggttcaggaaaagagaaagtgcatctttgtgttgttatgacttcagacagaggtttatgtggtggatttaatgcaaatataataaaaaaagcaa

SEQ ID NO: 272582 - DNA, 416 bp, Unknown
  Bacterial polypeptide expressing nucleotide sequence isolated from the Sargasso Sea
aaggcagatttctgagttaggaatatatccagctgttgatcctcttgattcaacaagcaggcagcttgatcctttcgtggtcggggatgatcattatgaagttgctcaaggagttcaaaagatcttacaaagatataatgagctcaaagatatcattgcaattctcgggatggatgagctttctgaagaagataaagggcttgtagctagggcgagaaaggctcaaagatttttatcccagccgttctttgttgctgagatctttactggaactccaggaaagtatgtttcgcttgaggacactattaaagcatttaagggaattcttaatggagattacgaccatcttcctgaacaggcattttatatggttggaactattgaagaggctgtagaaaaagctaagactttataaa

SEQ ID NO: 272583 - DNA, 655 bp, Unknown
  Bacterial polypeptide expressing nucleotide sequence isolated from the Sargasso Sea
cgcgacgttaaacgcgtgggctacctggtggtgtcgaccgaccgtggtctgtgcggtggctggaacattaacctgttcaaaaagctgctggcggatatgaaaacatggtccgataaaggcgttcagtgcgatatcgcaatgatcggctctaagggcgtgtctttctttaactccgttggcggtaatgtgattgctcaggtaaccggtatgggggataacccttccctgtccgaactgatcggtccggttaaagtgatgctgcaggcctacgatgaaggtcgcctggacagactgtacgttgtcagcaacaaatttattaacaccatgtctcagacgccaaccatcacccaactgctgcctctgccggcatcagatgatgatgaattgaagcgtaaatcctgggattacctgtatgagccagacccgaaagcgctgctggataccctgctgcgtcgttatgtcgagtctcaggtttatcagggcgtggtagaaaacctggccagcgagcaggccgcacgtatggtggcgatgaaagccgcgaccgacaatggcggcagcctgattaaagagctgcagttggtatacaacaaagctcgtcaggccagcattactcaggaactcaccgaaatcgtcggtggtgcatccgcggtataac

SEQ ID NO: 272584 - DNA, 286 bp, Unknown
  Bacterial polypeptide expressing nucleotide sequence isolated from the Sargasso Sea
atggctactggaaaaattgtccaggtaatcggcgccgtggttgacgtcgaattccctcaggatgccgtaccgcgcgtgtacgatgctcttgaggttatgaatggtaaagagagcctggtgctggaagttcagcagcagctcggcggcggtatcgtacgtaccatcgccatgggttcttctgacggtctgcgtcgtggtctggaagttaaagacctcgagcacccgatcgaagtcccggtaggtaaagcaacgctgggtcgtatcatgaacgttctgggtcacccga

SEQ ID NO: 272585 - DNA, 949 bp, Unknown
  Bacterial polypeptide expressing nucleotide sequence isolated from the Sargasso Sea
gtagatactcccgtaggcaaggaattattaggaagagtggttgacggtcttggaaatcctattgatggaaaaggaaacttagataaaagtgttaaaagaagtagagttgaagttaaggctccaggaattattcctcgtaaatcagtaagtgagccaatgcaaacaggacttaaatctatcgatagtctagttccaattggaagaggtcaaagagaattaattattggagatagacaaactggaaaaactgcagttgctattgatgcaattattaaccaaaaaaaaataaacgagtcaggtgatgagaagcaaaaattatattgtgtttatgttgcaattggtcagaaaagatcaactgtgagacaaattgaaaaaactttagaagaagctggggcaatggaatatacaacaatcgttgcagcaacggcatcagacgcagcccctcttcaattcttagcaccttatactggatgtgctatgggagaatattttagagacaatggtatgcatgctttaatcatatatgatgatctttcaaaacaagctgttgcatatagacaaatgtcactattactgagaagacctccaggaagggaagcttatccaggagatgtattttacctacatagtaggttgcttgaaagagcagctaaattaagcgatgagcatggaggaggatcattgacagctcttccaataattgaaacacagggtggcgatgtttctgcatttatacccactaatgtaatttcgattacagatggccaaatttttttggaaactgaattatttaaccaaggtataagaccggcaattaatgtgggactttcagtatccagagtgggatcatcagctcaaacaaaagctatgaaaaaagtttctggatctatgaagcttgaacttgctcaatatagagaaatggctgcatttgcacagtttgatcagacta

SEQ ID NO: 272586 - DNA, 865 bp, Unknown
  Bacterial polypeptide expressing nucleotide sequence isolated from the Sargasso Sea
gttaaatcattagaggatgccggtgcaatggaatatacaacgattgtatctgctacagcttctgacccagcgccacttcaatttttggctccatatactggttgcactatgggagaatattttagagataatggtatgcatgcgttaattatttatgatgatttatcaaagcaagctgttgcatatcgacaaatgtcacttttattaagaagaccacccggcagggaagcctatcctggagatgtattctatttacacagcagacttcttgaaagggctgcaaaacttaatgatgataaaggtggcggatctcttacagcgttgccaataatagaaacacaggcaggtgatgtgtctgcctatattccaactaatgtaatttctataactgatggacaaatttttttagaaactgaattatttaatcaaggtataagacctgctgttaatgttggattatccgtttctagagttggttcagccgctcagactaaggcaatgaaaaaagttgctggttcaataaaactagaattggctcaatacagagaaatggctgcatttgcccaatttggttcagatttggatgcatcaacacaaaaattattgaacagaggttcaaaattaactgaacttttgaaacaagatcaatactctccaatgccggtagcgcaacaggtaattgcagtattttctggcgtaagaggttttttagatgatgtagaacttgcaaatattaaaaatattgaaaaacaaatttatgatgaagttaaatcttctaaccctgagataattgatagcattaatagcacaggaaaattagaagacgaaatagagaaaaaattagtttcagttatcgaaaaattaa

SEQ ID NO: 272587 - DNA, 847 bp, Unknown
  Bacterial polypeptide expressing nucleotide sequence isolated from the Sargasso Sea
atattaaaagaacaaattaaaaactttggtgataaagcagaggtaacggaagttggtcaagtactatcagtaggtgatggtattgctagaatttatggactcgataatgttcaagctggtgaaatggtagaatttgcagatggatcaaaaggcatggctcttaacttagaaaatgaaaacgttggggttgttatttttggagatgatagaaacattaaagaaggtgatacagttaaaagaaccggaagcattgttgatactccagtgggtaaagaattattagggagagttgttgatggattaggaaatccgattgatggtaaagggcctttagacaaaaatgttaaaaaaagcagagtcgaagtaaaggctcctggaattattccaagacaatcagttagtgaacctatgcaaacaggcttaaaatctattgatagtttagttccagttggaagaggtcaacgagaattaattattggtgatagacaaacgggtaaaactgcagttgcaattgatgcaattattaaccaaaaaaagattaatgagtctggtgatgaaaaacaaaagctttattgtatttatgttgctattggtcaaaaaagatcgactgtaagacagattcaaaaaactttagaagaggctggtgcaatggaatatactacaatcattgctgcaacagcatccgactctgcacctcttcagtttttggcgccttatacagggtgtacaatgggtgaatattttagagataatggaatgcatggattaattatttatgatgatttatctaaacaggctgttgcttacagacaaatgtcgctactgttaagaagacctccaggacgtg

SEQ ID NO: 272588 - DNA, 215 bp, Unknown
  Bacterial polypeptide expressing nucleotide sequence isolated from the Sargasso Sea
aaaaatcaaaagatttttatctcaaccattcaatgttgctgaagtttttactggatcaccaggtgttttagtacctttagaagatactataaaaggatttaagggaattgcagacggtgagtatgatgatttaccagaaactgctttttacatggtaggtactattgaagaagcaatagaaaaagcaaagaaattagcaaaagatgctgcttaat

SEQ ID NO: 272589 - DNA, 418 bp, Unknown
  Bacterial polypeptide expressing nucleotide sequence isolated from the Sargasso Sea
aatgaccaaaaatggaaaaatcattcaagtaatcggcgcggtggttgatgttcaatttgatggagcattacccgaaattttaacagcattagaagtagataattctggaaacaaactggttttagaagttgcacaacatcttggagaaaatagtgtaagaaccattgcaatggatagtacagagggtctaaaaagaggcgacgcagttcaaaatactggtgcaccaataagtgtacctgtaggacctgaaactttagggagaattataaatgttattggtcagcctattgatcaaaaaggagatgtaaagacaaaagagaaatggccaatacaccgagaggcaccaaaatttacagatcagtccactgaaacagaaattctagaaactggtattaaagttatagatcttcttgcacca

SEQ ID NO: 272590 - DNA, 541 bp, Unknown
  Bacterial polypeptide expressing nucleotide sequence isolated from the Sargasso Sea
atgagtcaattaaacccatcagaaatatcaagcgtattaaaagaaaaaattgctgggcttgatttatcagcagaaagaaaaaatgaaggaattatagtaagtgtgtcagatggaattgtaagaattcatggtatgggtgatgtaatgtacggggaagtcattgaattcgaaaatggaactaagggattggccttaaatcttgaacaagactctgttggtgccgtggttttgggtgactatcttgagcttgtagaaggacaaaaagctgtgtgtactggaaaggtcttagaagttcctgttggtgaggctcttcttggaagagttgtaaatactcttggagttccaatagatggaaagggtgagataaaatcagaaggaactgccccggttgaggttgtagctcctggggttattgctcgtcaatcggttgatcagccagtacagattggacttaaagctgttgatgcaatggttcccattggaagaggccaaagagaattaataattggagacagacaaacaggcaagactgctgtgcaat

SEQ ID NO: 272591 - DNA, 226 bp, Unknown
  Bacterial polypeptide expressing nucleotide sequence isolated from the Sargasso Sea
gcaagagcaagaaaaattcaaagatttctatcacaaccattttttgttgctgaagtatttactggatcaccgggtaaacttgtagatttagagtcaacaataaaaggttttgatgcaatctgtaaaggtgaatatgatcatctgccagaagctgctttttatatggtcggtacaattgaggaagcaatcgaaaaagctgaaaaaatgaaaaaagatgctgcttaat

SEQ ID NO: 272592 - DNA, 415 bp, Unknown
  Bacterial polypeptide expressing nucleotide sequence isolated from the Sargasso Sea
atggatatacaaccttcagaaatatcaaaaatattaaaagaagaaattaaaaactttggttctgactctgaaatcagtgaagttggacaggtattatcaatcggagatggaattgcaagaatatatggattagataatgttcaagctggtgaaatggttctctttgatgatggaactaagggaatggctttaaatcttgaagacgataatgttggtgtagttttatttggaagtgatgcaaatattaaagagggagatactgttaagcgaactaatgcaattgttgatgtaccagtaggtaaggaacttctaggtagagtagttgatgcgttaggaaatccaatagatggaaaaggcaacattgattcagaaaatagaagtagaattgaagtaaaagctcccagggattattcca

SEQ ID NO: 272593 - DNA, 757 bp, Unknown
  Bacterial polypeptide expressing nucleotide sequence isolated from the Sargasso Sea
atgagcaaaaacggaaaaattatacaagtgataggagcagtagtagatgttcaatttgatggtgctttgcctgaaattttgactgctttagaagtagataactctggaaataaactagtgctagaggtggcgcagcatcttggagaaaacagtgtaagaacaatcgcgatggatagtactgaaggtttaaaaagaggtgataatgttcaaaacactggtgcaccaattagtgttcctgttggtcctgaaactttaggaagaattataaatgttattggacaacctattgatcaaaaaggagaggtaaagacaaaagagaaatggccaatacaccgagaggcaccaaaatttacagatcaatcaacagaaacagaaattctagaaactggtattaaagttatagatcttctggcgccatactcaaaaggtggaaaaattggattattcggaggagctggagttggaaaaacagtaattattatggaattgataaacaacattgcaaaagctcatggaggattttctgtttttgcaggtgttggagaaagaactagagaaggaaatgatctataccatgaaatgattgagtctggtgttatcaaacctgaaggcaagggatctaaagctgccttggtatatggtcaaatgaacgagcctcctggagctagagcaagagtaggtttaacaggcttaactgtagcagaatattttagagacaaagaaggccaagatgttttgttttttgtagataatattt

SEQ ID NO: 272594 - DNA, 694 bp, Unknown
  Bacterial polypeptide expressing nucleotide sequence isolated from the Sargasso Sea
aatgagtactaaaataaacccatcagaaatctcaagcatcataaagaagaaaattgaagattataagggtgcgagttctgaatcaaatgtaggagaagttctttctacagcagatggcattgttcaaatttttggactagaggatgcaatgtatggagagctattagattttggagagggtacctatggattggcgcttaaccttgagaatgattctgttggggcagttgttttaggtgacgctggacatatcaaggagggtcaaaaagtaaaaacaaccggaagaattttagaagttcctgttggggaagggctaaaaggacgtgttattgacgcactaggcagaccaattgatggaaaaggggaagttaagtcagaaacaaatgcacctattgaagtcgtagcgccaggtgttattgacagacagggtgttgatcagccagttcaaacaggaatcaaatctatagatgtaatggtgccaattggtcgtggtcaaagagaacttattattggagatcgccaaacagggaaaactgctattgctgtagatgcaattattaaacagaaagattcagacataacatgcgtatatgtcgcaataggccaaaaacagtctactgtggcaacagttgtaagacagcttgaggaagctgatgcactcaaaaatacaattgttgtttcagcgagtgcagca

SEQ ID NO: 272595 - DNA, 901 bp, Unknown
  Bacterial polypeptide expressing nucleotide sequence isolated from the Sargasso Sea
gatgaacgaggtccaatttgaatcaaaaaaatctcttcctattcacagagcagctcctgattttgttgatcaatctactgagaccgaagttcttgtaactggtattaaagttatcgatcttttagctccatattcaaaaggtggtaaaattggtctttttggtggtgccggtgttggaaaaactgttttaattatggaattaattaacaacgtggctaaagcgcatggtggatattctgtttttgctggagtgggtgagagaactcgtgaaggaaatgatctttatcatgaaatgatcgagtcaggggttataaaccttgatggtgatacctctaaagtgtcacttgtttatggtcaaatgaacgaacctcctggagcaagatctagagttgctttatcaggattaactcaagcagaatattttagagatgaggaaaaccaagatgttttattttttgtggacaacatcttccgttttacacaagcaggttctgaggtttccgctctccttgggcgtataccttctgcggtgggttatcaacctactttggcaacagatatgggtgcacttcaggaaagaattactactaccaacaaaggttcaattacctctgtgcaagcaatttatgttcctgccgatgatttaactgacccggctcctgcaacatcattttctcacttagatgcaactactgtgttgaacagatcgatcgcagaacttggaatttatccagctgtggacccgttagactctacctctagaattttagaaccaagaacattgggtgataagcattatcaagtagcaagagatgttcaaaaaactcttcaaacgtataaaagtttgcaagacattattgcgatcttgggtatggatgaattatctgaagaagataattag

SEQ ID NO: 272596 - DNA, 313 bp, Unknown
  Bacterial polypeptide expressing nucleotide sequence isolated from the Sargasso Sea
ggttctacaaacttataaatcattacaagatattattgcaattttaggtatggatgaattatctgaagacgataagcttactgttgcaagagctagaaaaattcaaagatttttatctcaaccattctttgttgctgaggtgtttactggttcaccaggaaaattagtggatctagagtcaacaatcaaaggatttgatgctatttgcaaaggtgaatatgatcatttaccagaagctgctttttatatggttggaacaatagaggaagcagttgaaaaggcagaaaaaatggcaaaagaagctgctgcataa

SEQ ID NO: 272597 - DNA, 793 bp, Unknown
  Bacterial polypeptide expressing nucleotide sequence isolated from the Sargasso Sea
aatgccgagtttagatgatctaaaaaaaagaattaaaagcgttaaatctacacaaaaaattactaaggctatgaagatggtcgctgccgcaaaattacgaaaagcccaagaaagcgctgaaaaaggtaggccttttagtcaaaaaatgcaaaacataatactcaatcttactaaatcgataagtgatcgtgaaaatgctcctaaactcctagttggaacaggaaaagacataacatatttattagttatacttacggccgataggggattatgtgggggttttaattcaaatatttgtaaactagcaaaaataaattttaagaagctcatttctgagggaaaaaaaataaaaattataacagttggttcaaaaggagaagaccaaataaaacgagaatttggaaaatatattataaaaaaatttagcttcaaagaaaaaaaacaaattacatttaaggaagccgaattaattggtaatgaaatcattaatttatttaaaaaaaatgaatttgataaatgtattttattttataataattttaaaaatgttattacgcaaattcctcaagccctgcaaataataccagctgatacaaaatcttctgagcctaaagaagaaaaaatttcatcttatgaatttgaacctgatgaagacgaaatcttagaagatttgcttccaaaaaatatatctactcaagtgtttagggctttcttagaaaatgcagctagtgaacaaggttcaagaatgacagctatggacaatgcaacaagaaatgcgggagatttagtagat

SEQ ID NO: 272598 - DNA, 334 bp, Unknown
  Bacterial polypeptide expressing nucleotide sequence isolated from the Sargasso Sea
aatggctgcgtttgctcagtttgcctctgacctcgatccagcaactcaacgattactggcacgaggcgagcgtttaacagagctactaaagcagggacagtatgctccgctaccggtagaagagcaggtcgtatcgatttttgctggagttaggggctatcttgatcaagtcgatgttggtgatgtaactcgatttgaacaaggactgctatcggatattaaggcaaacggttctgatattctgacaaaaatcagagatgaacaggaattgagtgaagccaccgataaggagctcgtgtcctttgttgaatcgtatgcgaaaaagtttgtttga

SEQ ID NO: 272599 - DNA, 439 bp, Unknown
  Bacterial polypeptide expressing nucleotide sequence isolated from the Sargasso Sea
aatgttgggttgtcagtttcaagagttggatctgcagctcaaactaaggcaatgaaaaaagtgtcaggttcaatgaaacttgaattggctcaatatagggaaatggcagcgtttgctcaatttggttctgacctagatgcatctacacaacaattattaaatagaggttctaaattaacagagcttttaaaacaaaaacaatactctccaatgactgttgcagagcaagtaatttcagtgttttgtggagtaaagggttatttagatgatattgatttaaaagatattgcagattttgagaataaaataatcgagaaatgtaaatctgataaacctgaaataatagactcgattctaagttctgggaaattagaagaagatcctgagaaaaacttaattgaagtaattacaaatttaaaaaaagcatttaaatcttaaa

SEQ ID NO: 272600 - DNA, 379 bp, Unknown
  Bacterial polypeptide expressing nucleotide sequence isolated from the Sargasso Sea
atggctagtttagacgatctaaaaaaaaggataaacagtgtaaaatctacacaaaaaattacaaaggctatgaaaatggtagctgcagctaaactaaaaagagcccaagaaaatgcggaaagaggaagaccatactctcaaaaaatgaacaatgttattttaaacttatcaaataatatatcggataaagataatgcgcccaaattgttatctggtacaggaaaagaagatatacacctttgtgttgttattacttcagatagaggtttgtgtggtggatttaatgctaatataattaaaaaagccaaaaattattttttaaatctaaccaatgagggaaaaacgttaaaaattattactgttggatctaaaaggtaat

SEQ ID NO: 272601 - DNA, 436 bp, Unknown
  Bacterial polypeptide expressing nucleotide sequence isolated from the Sargasso Sea
atggctaataatttaactggaaaaatatcacaagttttaggggcagttgttgatattgagtttgaaggcgaacttccttcaattatgaatgctcttgaagttgataataatggaacgctattagttttagaggttgcacaacatttgggtgaaaatgctgttcgtaccattgcaatggacacaactgatggattagtcagaggtcaaactgcaacagatacaggtgcccctatttctatgcctgtaggaccagaaacacttggccgtattatgaatgttgttggtgaaccagttgatgaaagaggagatattggaacatcaaaaacttatcctattcatcggccagctcctgaatttgttgatcaatcaactgaaactgaagttttagtaactggaatcaaagtagttgatcttcttgctccttatgctcgtggag

SEQ ID NO: 272602 - DNA, 835 bp, Unknown
  Bacterial polypeptide expressing nucleotide sequence isolated from the Sargasso Sea
gttacaggaataaaagtcgttgatttactagccccttatgctcgaggaggaaaaattggtttatttggaggagcgggagttggaaaaacagtactaattatggaactaataaataatattgctaaggcccatggaggatattcagtttttgcaggtgtaggtgaaagaacacgtgagggtaatgacttatatcatgaaatgattgaatcaggtattattgacttaaaaggtgataaatctaaagttgccttggtctatggacaaatgaacgaacctcctggagcaagagctcgagtagctttatctggattaacgcaggctgaatatttccgtgatgaagaaggacaagatgttcttttttttgtggataacatatttagatttactcaggctggatcagaagtttcagccttgttaggacgtatcccatctgcagttggttatcaaccaacgttagcaacagatatgggagctttacaagagcggattacgacaactaataaaggatcaattacttctgtgcaggcaatatatgttcctgcagacgatttgacggatccagctcctgcaacttcattttctcatttagatgctacaacagttttgaacagagcaatttctgaaaaaggaatttatcctgctgttgaccccctcgattcaacgtccagaattctagatcctcaggttgttggagatgatcactatcgtgttgcaagggaagtacaaagagttcttcaaacttataaaagcttacaggatatcattgctatacttggaatggatgaactttcggaggaagataaattaactgttgctagggcaagaaaaatgaaaa

SEQ ID NO: 272603 - DNA, 560 bp, Unknown
  Bacterial polypeptide expressing nucleotide sequence isolated from the Sargasso Sea
aatggaaataaatccttcagaagtaacaaaaatattaaaagaacagataaaaaaatttggagataaagcagaagtaactgaagtcggacaagttttatctgtaggtgatggtattgcgagaatatacggtctagataatgttcaagcaggagagatggtcgaattttctgacggttcaaaaggtatggctttaaatttagaaagtgacaatgttggcgttgtaatttttggtgacgatagagctgtaaaagaaggtgatacagtaaaaagaacaggagcaattgttgatacccctgtgggaaaagaattattaggaagagtagttgatggattaggaaacccaatagatggcaaaggtgcactagataaaagtattaaaaaaagtagagttgaagttaaagctccaggaataattccaagaaaatctgtaaatgagccaatgcaatcaggacttaaatcagtcgatagtctagttccaattgggagaggtcaaagggaattaataataggtgatagacaaaccggaaaaactgcagttgccatcgatactattattaatc

SEQ ID NO: 272604 - DNA, 589 bp, Unknown
  Bacterial polypeptide expressing nucleotide sequence isolated from the Sargasso Sea
atgacaataaacccatcagaaataacaaaactattaaaagaccagattaaaaactttggagaaaaagctgaaatttcagaaattggtaaagttttatcggttggtgatggtatcgctagagtttacggcttagataatgtgcaagcaggggaaatggtagagtttgaagatggttctaaaggaatggctttaaacttagaaaacgacaatgttggagtggttatatttggtgacgatagaaatataaaagagggtgatacaattaaaagaacgaacgctattgttgatgtacctgtaggtaaagaacttttaggaagagtagtagacgggttaggaaatcccatagatggaaaaggttctttatctgtgaaaagcaggaaacgtgttgaagttaaagctccaggaattatcccaagacagtcagttaatgaaccaatgcagactggtttgaaatcaatagactctctgattccaataggcagaggacaaagagaattgataattggagataggcagactggtaaaacagcagtggccattgatgcaatcattaatcaaaaaaaaataaatgagtcctcggagaaaagaa

SEQ ID NO: 272605 - DNA, 280 bp, Unknown
  Bacterial polypeptide expressing nucleotide sequence isolated from the Sargasso Sea
attgcaattttaggtatggatgagttatctgaagaagataaattaacagtggctagagcacgtaaaattcaaagatttatgtcccaaccgttctttgttgccgaagtctttacaggaactccgggaaaatatgttgaattagaggacacgatcaaaggatttgatgcgatctgtaagggtgaatatgatcatctacctgaggcagctttttatatggttggtacaattgaagaagctattcaaaaagcagaaaaaatggctgaagaagccgctgcgtaac

SEQ ID NO: 272606 - DNA, 481 bp, Unknown
  Bacterial polypeptide expressing nucleotide sequence isolated from the Sargasso Sea
tgagagcagtgtaagaactatagccatggactcaacagaagggttaaaaagaggcgataaagtaaaaaatacaaaagctccaatcagcgtcccagtcggtcctgaaaccttaggaaggataataaatgtaataggccagcctattgatgagaaaggcgaagttagcactaaggagaagtggccaatacatagagatgctcctaaatttacagatcaatcgacagagactgaaattttagtgaccggtattaaagtcattgacttgttggcaccatatgcaaaaggaggaaaaataggtttgtttggaggagcaggagttggaaaaactgttaccataatggaactaattaataatattgcaaaagcgcatggtggcttttcggtttttgcaggagtgggtgaaagaactagagaaggaaatgatctttaccatgaaatgattgaatcaggcgttattaaaaaagatggaaaaggttcaaaa

SEQ ID NO: 272607 - DNA, 472 bp, Unknown
  Bacterial polypeptide expressing nucleotide sequence isolated from the Sargasso Sea
aacatcatttgctcacctagatgcaacgactgtattatccagacaaattgctgaaataggtatttatccggctgtggatccactagactcaacgtctagaattctagaccctagaattgttggtgatgaacattatagagtagctagagaagttcaaaaagtattacaaacttacaaatcactgcaagatattattgcaattttaggaatggatgaactatctgaagaggataagttaattgttgctagagcaagaaaaattcaaagatttttatcacagccattttttgttgcagaagtatttacaggttctccaggtaaattagtagacttagagtcaacaataaaaggttttgatgctatttgtaagggagagtatgatcacttacctgaagcagctttttacatggttgggacaatagaggaagctatagaaaaagctgaaaaaatggctaaggatgcagcagcttaa

SEQ ID NO: 272608 - DNA, 900 bp, Unknown
  Bacterial polypeptide expressing nucleotide sequence isolated from the Sargasso Sea
cgaattttgaatgttgttggtagtccagttgatgagcgagggccgattaatactaaacaaagcctacctattcatcgagatgcgcctgagtttgttgagcagtctacagagaccgaaattttggtaactggcatcaaggttgtggatttgttagcgccatattcccggggtggtaaggtaggactattcggtggggccggtgtcggcaaaactgtcatcataatggagttaatcaataatatagcgaaagcacacggaggttattctgtttttgccggagttggtgagagaacccgagaaggaaacgatctatatcacgaaatgatcgaatctggagttatagatttggagggagcttccaaagcagcactggtgtatggacagatgaatgaaccccctggagcaagagctcgagtcgccctaactggactgacattggcggagtattttcgggattctgagggtcaggacgttttactttttgtcgacaatatttttcgctttacccaggctggttcggaggtgtctgcactcctcggccgtattccttcggcggttggttatcaaccaactttggctacagatatgggggcaatgcaggaacggattactactactaataagggctcaataacctcggtacaggcgatttacgtaccggccgatgacttgacggatcctgcacctgctacatcgtttgctcacttagacgctacaacggtgttgtcacgacaaatcgcagaacttggaatttacccggcggttgacccacttgactcaacatcgcgaattcttgatccgcgtattctgggtgatgaacactatgaagtggcacgtagtgtgcaggaagttttacagcgatacaaaagtcttcaagatattattgctattcttggtatg

SEQ ID NO: 272609 - DNA, 898 bp, Unknown
  Bacterial polypeptide expressing nucleotide sequence isolated from the Sargasso Sea
atgtcaattaatccatccgaaataacaaaaatcttaaaggaacaaattaaaaatttcggtgataaagccgaagttacagaagtaggaaaagttttaaccgttggagatggtatcgctagaatatatggcctagacaatgtacaggctggagaaatggtggaatttgacgatggttctaaaggaatggcattgaacttggagagtgataacgttggagtagttatatttggtgatgacagaaaaataaaagaaggcgatacagttaaaagaacagggtctattgttgatgttcctgttggaaaagatttattaggaagagttgttgatggactaggaaatccaattgatggaaaaggtaatttaaatgataaagctcaaagaaaaagagtagaagttaaagctcccggtattattcctagacagtctgtgagcgaacctatgcaaacaggtttaaaggcaattgatagtttaattcctatagggagagggcaaagagaattaataattggagaccgtcaaacagggaaaacagctgttgctatagatacaataataaaccaaaaagaaattaatgagtctaatgaagagaaaaaaaagttgtattgtgtttatgtagctattggccaaaaaaggtcaacagtagcgcaaattgtaaaaactttagaggatgcaggagctatgaaatatacgaccatagtatctgctacagcgtcagactccgctccattacaatttttggcaccttatactggctgtacaattggagagtacttcagagataatggaatgcatgccttaataatttacgatgatttatctaaacaagctgttgcatatagacagatgtcacttttattaagaagacctccagggagagaagcttatcctggcgacgtat

SEQ ID NO: 272610 - DNA, 418 bp, Unknown
  Bacterial polypeptide expressing nucleotide sequence isolated from the Sargasso Sea
cttgggatttacccagcagtggatcctttagactcaacatcaagaatacttgatccaagaattgttggagaagaacactatagagttgcaagatctgttcaaaaaattttacaaacatataaatctttacaagacataatagcaattctagggatggatgagctatcagaagaagataaattgacagtagcaagagcaagaaaaattcaaagatttttatctcaaccgtttttcgtagcggaagtttttacaggatctccaggaaaacttgtggatttagaatcaactatcaaaggatttgatgcaatatgtaagggtgaatatgatcatttacctgaggcagctttttatatggttggcacaatcgaagaggcagttcaaaaagctgaaaaaatggctaaggaagcagcagcctaaa

SEQ ID NO: 272611 - DNA, 904 bp, Unknown
  Bacterial polypeptide expressing nucleotide sequence isolated from the Sargasso Sea
ttggaagttgcacagcatttaggcgagtcaactactagaactattgcaatggatgctaccgaaggattaaaaagaggagatgaagtagtaaatacaaaagctcctattaaagttccagttggacctgaaactttaggaagaattataaatgtagttggtgaaccaatagatgaaaaaggagaagttaaaactaaagagagttggccaattcatagacctgctccagagtttaatgatcagtctactgaaacagaaattcttgtcacaggtattaaagtaattgatttgttggctccatatgcaaaaggtggaaaaattggtttgtttggtggtgctggtgttggaaaaacagttttaattatggaattaattaataacgttgcaaaagctcatggtggattttctgtttttgcaggtgtaggtgaaagaactagagaaggaaacgatctttatcatgaaatgatggagtcaggtgtaattaaatctgatggtcctggatctaaagcagcattagtttatggacaaatgaatgaacctccaggagcaagggctagagttgcgcttaccggattaactgttgctgaatattttagagaccaagaaggacaagacgttcttttctttgtggataatatttttagatttactcaagcaggatcagaagtatcagctcttttaggtagaataccatcagctgttggatatcaaccaacattagctactgatatgggaaacctacaagaaagaattacaacaacaaataaaggttcaattacatctgtacaggcaatttatgtccctgctgatgatttaactgacccagctccagcaacatcttttgctcacttggatgcaacaaccgtactttcaagacaaatagcagaaattggtatttatcctgctg

SEQ ID NO: 272612 - DNA, 628 bp, Unknown
  Bacterial polypeptide expressing nucleotide sequence isolated from the Sargasso Sea
atgagtaaaaatggaaaaattattcaagtgattggagctgtagtagatgtgcagtttgaaggagaactgcctgaaatattaacagctttagaagttgataattctggaaataaactgatattagaagttgctcaacacttaggagaaaatggtgtgagaactatagctatggatagtacagaaggtttaaaaagaggagatcctgttcaaaatacgggtgcccctataagtgttcctgttggcccagaaactttagggcgaataataaatgttataggtcagcccatcgatcaaaaaggtgaggttaaaacaaaagaaagatggccaatacatagagaggccccaaagtttacagatcagtcaactgagacagaaattttagaaacagggataaaagttatagatctattggctccatactcaaaaggtggaaaaatcggtttatttggtggagccggagtaggaaaaacagttattattatggagctgattaataacatagcaaaagcccacggtggattttcagtatttgcgggagttggagaaagaacacgagaaggtaatgatttatatcacgaaatgatcgagtcgggagttattaaaccagatggcaagggatcaaaagcag

SEQ ID NO: 272613 - DNA, 406 bp, Unknown
  Bacterial polypeptide expressing nucleotide sequence isolated from the Sargasso Sea
atggcaatttctcttaaagtcttagctcctaataaaaatgtttatcaaggcgaagcggaagaagtaatccttcctagtactactggtcaacttggcatactgccggggcatatctctttagttactgcgatagatattggcgttttaaggctaagaatgaattcccagtggaaatcaatagccttaatgggaggcttcgctgaaattgaatcagatgaagtaatagttctagtaaataacgctgaaattggttctgaggttaatgttcaaaatgctgaacaagatcttaaagaagcaaaatcaataataagcaaattttctgacactgaaaaaactccagaaaaaatcaaagcattgaaagaagtttcgaaggctgaggctaggattcaagctgcaaaaaactaat

SEQ ID NO: 272614 - DNA, 160 bp, Unknown
  Bacterial polypeptide expressing nucleotide sequence isolated from the Sargasso Sea
aggggtcggcgaaaggacaagagaaggaaatgatgcgtatcatgaaatgatagagtccggcgtaatcaaacctgatggaaaaggatccaaagctgcactcgggaagggtcaaatgaatgaaccaccaggagcacgtgcaagagtgggtccaacagggtaa

SEQ ID NO: 272615 - DNA, 649 bp, Unknown
  Bacterial polypeptide expressing nucleotide sequence isolated from the Sargasso Sea
attgtactcactgctgatagaggtttatgcggaggttttaatactaacattattaaaaaagcaaaaagttatttcgaaaaaataatatctgaaaataaaactttaaagattattactgttggatctaaaggatatgatcaacttaaaagacagtataaaagttatattgtagagaatatttctttcaaagagtcaaaaaatataaattactttgatgcagataaagtaggaaaaattataattgaaaaatttgaaaaaaatgaatttgatgtttgtgcaatattttacaataaatttaaaaatgtaattacacaaattccacaagaacaacaaatagttccacttaatgaagataaagatgataaagatgataaagatgactctggtaatgataatgactatgagtttgaaccagatgaagatgagattttaagtaatttattgccgaaaaatatttcaacgcaaatatttaaagcaatgttagagaattctgccagtgagcaaggttcgaggatgacagcaatggataatgcaaccagaaacgcaggcgaattggttgataggcttacaattgagtataatagaagccgtcaagcagcaataacaaaagagttaattgaaattatatcaggagcagaaagtttataat

SEQ ID NO: 272616 - DNA, 949 bp, Unknown
  Bacterial polypeptide expressing nucleotide sequence isolated from the Sargasso Sea
aatgagcaacgaaaaagtaatacaaatcatcggagctgttatcgatgtcgagtttgaaaaagataacattccgaacgtctatgaggccttaaccattgatggtttggaaattatcttagaggtccagcagcaacttggcgatggaattgttagaaccattgcaatgggaaccactgagggattaaaacgtggtcttcaagccgaaagaaccaatgcaccaatatcagttcctgtgggaacagaaacccttggacgcatcatggatgttttgggtaatccaattgatgaaaagggcctaattggtgaacaggaaagaatgccaattcacagaaagccaccttcttatgttgatcagtccggctccaatgaacttttagaaacaggtattaaagttattgatttaatttgtccttttgctaagggtggaaaaattggtctcttcgggggtgctggtgtaggtaaaacagtaaacatgatggagctcattaacaacattgcaactgagcattctggtttatcggtctttgccggtgtcggagaaagaactagagagggaaatgacttctactatgaaatgcaagaatcaggtgttgttaacgtagaaaaaccaagcgaatcaaaggttgcgatggtgtatggccaaatgaacgaacctccaggcaacagactaagagttgcattaacaggtttaacgattgctgaaaagtttagggatgaaggacgggatgtgcttctctttattgataatatttacagatacacactcgctggtgttgaagtatcagctttgttaggcaggatgccatcagcggtgggatatcaaccaactctagctgaagaaatgggagcacttcaagaaagaattacatcgactaagacaggatcgatcacctccattcagacagtttatgtcccagccgatgacttaaccgacccttcacctgcaacc

SEQ ID NO: 272617 - DNA, 673 bp, Unknown
  Bacterial polypeptide expressing nucleotide sequence isolated from the Sargasso Sea
ttgttgtcgggaactggagaagataaagttcatttatgcgttgttatgacctcagatagaggtctgtgtggaggatttaatactaatatcataaaaaaagctaaaatattttttcaaaaaattttagatgagggaaaaactttaaaaattattactgtaggatctaaaggttatgatcaattaaaacgtgtttatggtgataatattatagaaagaatatcctttaaagattctaaaaatgtaaattattttgatgcagataaagttggtaagttagtaatcgaaaaatttgaaaaaaaagaatttgatgtatgtacaattttttataatcaatttaaaaatgtaattactcaaataccccaagagcaacaaattattcctttaaatacatctgaaaaagcagaaaattcatctgaagataattatgaatttgagcctgaagaagacgaaatattaagcaatttgctacctaaaaatatttcaacacagatttttaaagcgatgttagaaaattcagctagcgaacagggttcaagaatgagtgcaatggacaatgcaaccagaaacgcaggtgaaatggttgacaaacttactattgaatataatagaagtcgtcaggcagcaattacaaaagagttaatagaaataatttcaggagcagaaagtttataat

SEQ ID NO: 272618 - DNA, 614 bp, Unknown
  Bacterial polypeptide expressing nucleotide sequence isolated from the Sargasso Sea
aagagcagcaaaattaggtgatgaacatggtggaggctccctaacagctcttccaatcattgagactcaaggaggtgacgtttctgcgtttataccaacaaatgtgatttcaattactgacggacaaattttccttgaaactgaactttttaaccaaggtataaggccagcaattaatgttggtttatctgtatcaagagtaggatcgtcagcccagacaaaggccatgaaaaaagtttcagggtcgatgaagttagaattggcccaatatagagaaatggctgcatttgcacagtttggttcagacctcgatgcatctactcaaaaattacttaaccgaggttcaaaattaactgaattattaaaacaaaatcaatattcacctatgactgttgcagaacaagttatttctgtattttgtggagtaagaggacaccttgacgatattgaacaaaaagatattgcaagttttgagagtaaaattattgaaaaatgcaaagctgaaaagccagatataattgagtcaatcacatcttcaggaaaacttgaagatgacaaagaaaaagaattgaatgaaattatcactcaacttaagaaagattttaattcataaa

SEQ ID NO: 272619 - DNA, 769 bp, Unknown
  Bacterial polypeptide expressing nucleotide sequence isolated from the Sargasso Sea
tatgagaaaaggaaaaattacacaggttattggagcagtagtagatgttaaatttgatggagagttgcctgagattttaactgcattagaatgtaataatgcaggcaacagacttgtattagaagttgcacagcatttaggagaatcaagtgtgcgaacgattgcaatggatgcaactgaaggattaaaaagaggagatcaagttacagatactggttctccaattaaagtcccagtaggtcccgaaacattaggaagaattgttaatgttataggtgaacctattgatgaaaaaggtgaagttaaaactaaggaaagttggcctatccacagagcagcaccagagtttaatgatcaatcaactgaaactgaaattttagtaactggaattaaagtagtggacttattagcaccttacgcaaaaggtggtaaaattggtttatttggaggtgcaggagttggaaaaacagtaattataatggaattaattaacaacattgcaaaagcacacggtggcttttctgtatttgctggagttggagaaagaactagagaaggaaacgatctttatcatgaaatgatagaatcaggagtaattaaacccgaagggcccgggtcaaaggccgcgttagtctatggtcaaatgaatgagcctcccggtgcaaggtcaagagttgcccttacaggattaacagttgcagaatacttcagagaccaagaaggtcaggacgtactttttttcgtagataatatttttagatttacacaa

SEQ ID NO: 272620 - DNA, 862 bp, Unknown
  Bacterial polypeptide expressing nucleotide sequence isolated from the Sargasso Sea
agaggccaaagggaattaattattggtgatagacaaactggtaaaacagctgtgcaaattgacgcaatcattaatcaaaaaggcacgggtattaaatgtatttatgttgctattggtcaaaaacaatcaactgttgctaacgttgttagaaaactagaggaacatggagccatggaacacaccattgttgtttcagccacagctgctgatccagcacctatgcaatatctatcagcctatgctggatgcacaatgggagaatattttagagataaaggagaagatgctctaatagtatacgacgacctatcaaaacaagctgttgcatatagacaggtatcattgcttcttaaaaggcctccagggagagaggcatatcctggtgacgtattctatcttcactcaaggttgcttgagagggctgcgagagtaaatgccgactatgttgagcaagttactggtggtaaagttaaaggtaaaacaggctcattaactgcattgccgattattgaaactttggctggagacgtttcagcctttgttccaaccaatgtaatttctattacagacggacaaatatatttagaaacagaattatttaattcaggtgtaagacccgcaattaacccaggtttatctgtatcaagggttggcggatcagcgcaaacgaaaattatgaaaaaattagctggtggtgtgagaactgcgttagctcaatatcgtgaattagctgctttctctcagtttgcttctgatttagacgatgctaccaaacagcaacttgcaaatggtaaagcttttacagaacttctaaaacaaaaacaatatgcgccaatgagtgttgctcaacaagcattaagtt

SEQ ID NO: 272621 - DNA, 664 bp, Unknown
  Bacterial polypeptide expressing nucleotide sequence isolated from the Sargasso Sea
atggaaataaatccttcagaagtaactaagattttaaaagaacaaattaaacaatttggagacaaagccgaagtttcggaagttggacaagtattatctgtaggcgatggtattgcaagaatttacggtctagataatgttcaggctggagaaatggttgagttttcagatggatcaaaaggtatggcactaaaccttgaaagcgaaaatgtgggtgttgtaatttttggtgatgatagagccgttaaagaaggcgatacagttaaaagaacaggagctattgttgatactccagttggaaaagaacttctaggaagagtcgttgacggtttaggtaacccgatagatggcaaaggtgctctagataaaggtattaagaaaagcagggttgaggtaaaagcgcctggaattattccaagaaaatctgttagtgaacctatgcaaacaggtttaaaatcaattgacagtttggttccaattggaagaggtcaaagagaattaataattggcgacaggcaaactggaaaaaccgcggtcgcaattgatgcaatcatcaaccaaaaaaaaataaatgaatctggtgatgaaaaacaaaagctttattgtatttatgttgctattggtcaaaaaagatcaactgtaagacaaatgaaaagactttaga

SEQ ID NO: 272622 - DNA, 875 bp, Unknown
  Bacterial polypeptide expressing nucleotide sequence isolated from the Sargasso Sea
tgacaatgtcggtgttgtaatttttggtgatgacagagctgtaaaagaaggtgatacagtaaaaagaacaggatcaattgtagacactcctgttggaaaagaattattaggaagagtagttgatggattaggaaatccaatagatggtaaaggtgcattagataaaaaaattaaaagaagtagagttgaagttaaagccccaggtataattccaagaaaatctgtaagcgaacctatgcaatcaggacttaaatcagttgatagtttagttcctattggaagaggtcaaagagaattaattataggtgatagacaaactggaaagactgcagtagcaattgacactataattaatcagaaaaaaataaatgaatccaatgatgaaaaacaaaaattatattgtatctatgtagcaattggtcaaaaaagatcgaccgttcgacaaatagaaaaatctttagaagaggctggagctatggagtatacaacaatagttgcggcaacagcttcagatgctgcaccacttcaatttttagctccttatactggttgtgcaatgggagaatattttagagataatggaatgcatgctttgattatttatgatgatttgtctaaacaagcggttgcttatagacaaatgtcattattgttaagaaggccacctggaagagaagcttatccgggagatgttttttatttacacagtagacttttagaaagagcagctaaactaagtgacgatcatggaggaggatctctaacagcacttccaattattgaaacacaaggtggtgacgtatctgcatttattccaactaatgttatttcaattacagatggacaaatatttcttgaaacaaaatttatttaac

SEQ ID NO: 272623 - DNA, 794 bp, Unknown
  Bacterial polypeptide expressing nucleotide sequence isolated from the Sargasso Sea
ccttggagagtcaagtgttagaaccattgctatggatagtacagagggactcaaaaggggtgatgaggtaaaagatacaggtgctccaattcaagttccagtaggcccagaaacattaggacgaattgtaaacgtaataggtgaaccaatcgatgaaaaaggacaaatttctactaaagaaaattggcctatacaccgacaagctccttcttttaatgatcagtctacagaaacagaaattctagtaactggaataaaagtaatcgacttattagcaccttatgccaaaggtggaaaaatcggattgttcggtggagcaggagttggaaaaactgtaattataatggaacttataaataatatagctaaggcacacggtggattttcagtattcgctggagtgggagagagaactagagaagggaacgatttatatcacgaaatgatcgagtcaggagtgatcaagccagagggaactgggtctaaagcagcattagtttatggacaaatgaatgaacctccaggagctagagctagagtagctttaactggtcttactgtggcagagtatttcagggatcaagagggtcaagatgtattgttctttgttgataacatttttagatttactcaggcaggttcagaagtatcagctcttctaggaagaatcccttctgcggttggttatcagcctactcttgcaacagatatgggaaacctgcaggaaagaattaccactactaataaaggatcaattacatcagttcaggcaatttatgtacctgcagatgatt

SEQ ID NO: 272624 - DNA, 583 bp, Unknown
  Bacterial polypeptide expressing nucleotide sequence isolated from the Sargasso Sea
atgccaagtttagacgatctcagaaaaagaattacgagtgttaaatcaactcagaaaataacaaaagctatgaaaatggtggctgcagctaagttgagaaaagcacaagagaatgctgaaaaaggcagaccttattcagaaaaaatgaacaatgtaattttaaatctttcaaaaagtataacagataaagaaaatgctcccaagttactggttgggacaggtgaagagaaagttcatttatgtattgttcttactgctgatagaggtttatgcggaggttttaatactaacattattaaaaaagcaaaaagttatttcgaaaaaataatatctgaaaataaaactttaaaaattattactgttggatctaaaggatatgatcaactcaaaagacagtataaaagttatattgtagagaacatttctttcaaagagtcaaaaaatataaattactttgatgcagataaagtaggaaaaattataattgaaaaatttgaaaaaaatgaatttgatgtttgcgcaatattttacaataaatttaaaaatgtaattacacaaattccacaagaacaacaaatagttc

SEQ ID NO: 272625 - DNA, 445 bp, Unknown
  Bacterial polypeptide expressing nucleotide sequence isolated from the Sargasso Sea
aatgcctagtctcgatgatttaagaaaaagaattgccagtgtaaaatctacacaaaagatcacaaaagctatgaaaatggtagcggcagcaaaacttcgtaaagcacaagaaatggcggaaaaaggaagaccttatagtgaaaaaatggatataattatacaaaatttgagtaaggcaattaatgacccttcaaatgccccaaggcttttagttggaaccggagaagacaaaagttatttatgtgttgtaatgacagcagatagaggtctttgtggtggttttaatacaaatatagttaagttagcaaaaaattactttaataaaattttaaatgattctaagagtttaaaaattatcacagtcggtactaaaggcctcgatcaactcaaaagagattatggaaaatatattattaaaaaaataaacttcaaagataagaaaaaa

SEQ ID NO: 272626 - DNA, 455 bp, Unknown
  Bacterial polypeptide expressing nucleotide sequence isolated from the Sargasso Sea
ccagctgttaatgtgggtcttttcagtttcaagagttggttccgccgcgcaaaccaaagctatgaaaaaagtagcgggatcaattaaacttgaattagcccagtaccgtgaaatggcagcatttgctcaatttggttctgatttagatgcttcaacacaaaaacttttaaatagaggatcaaaacttacagagttattaaaacagaatcagtacagccctatgactgtggcagagcaggtggtaacaatctatgcaggtgttaaagggtatttggacagcattgatttaagtcaaattggttcttttgaaaaaggtctattagagttggtaaaaagcgataagccagaaatactagagtcgatacaaaaaagtggaaagatagaagacgatatagataaaattttatcagaagttattactagttataaaaaaacaaattttgaaaaaaaataat

SEQ ID NO: 272627 - DNA, 419 bp, Unknown
  Bacterial polypeptide expressing nucleotide sequence isolated from the Sargasso Sea
aaatggtatttatcctgcagtagatccacttgattctacatcaagaattttagatccaagaatagttggagatgagcattatagagtagcaagagatgttcaaagaatcctacaatcatataaatcactacaagatattatagctattcttggtatggacgagttatctgaagaagataaactagttgtagcaagagctagaaaaatccagagatttttatctcaaccattctttgttgcagaagtatttactggttctccaggaaaacttgttgatcttgactcaactatcaaaggttttgatgcaatctgtaaaggtgagtatgatcacttacctgaagctgctttttatatggttggaacaattgaagaagctatagaaaaagctaagaaaatggaacaagaagctgctgcttaat

SEQ ID NO: 272628 - DNA, 826 bp, Unknown
  Bacterial polypeptide expressing nucleotide sequence isolated from the Sargasso Sea
gctgcgggcgacgatgattcaaagaagttgttttgtatttacgtggcagtggggcaaaaacggtctaccgttgcacaaatagttaaaacactagaggactatggagccatggagtattcaattgtgatagcttcaactgcttctgaaccagcgcccatgcaatttttagctccttatgccgggtgtaccatgggtgaatactttagagataatggtatgcacgccctgattgtctacgatgacttgtccaaacaggctgtagcttaccggcagatgtctttgctgctaaggcgccctcctggacgtgaagcataccctggtgacgtgttttacattcactcaaggctgctagagcgtgcagcaaagatgaatgatgataacggagcaggttcacttaccgcactgccggttatcgaaacgcaagctggtgatgtttctgcatacattccaaccaatgttatttctataaccgacggtcagattttcttggaaaccgaattattctacagaggcataaggcccgcggttaacgtgggactctctgttagtcgcgttggttcagcggctcaaattaaagccatgaaacaagttgcaggcagaattaaattggaactggcccagtatcgagagatggcagcgttcgctcaatttgcttcggacttggatccagtgacacaaagactactggcgaggggtgtccgactaacagagttattaaaacagggtcaatatgcaccattaaccgtagaagagcaggttgtttcaatttttgcgggcgttcgcggatacctcgacgaaattgaagtgaatgaagtgacaaggttcg

SEQ ID NO: 272629 - DNA, 694 bp, Unknown
  Bacterial polypeptide expressing nucleotide sequence isolated from the Sargasso Sea
taaattattaacaggtactggaaaagatgagaaatatcttatcattcctgttactgctgatagaggtttgtgtggaggttttaatagtagtataaatcgtgccactacaaagtttattaattctcttgagagcgatggaaaaaatactagtttaattactataggaaaaaaaagtagagatttttttaatcgtactatgaaagataaaattattgaaagttatatagatttgggagaatcgggttatgatagctctcttcaaatttctaacaaaattcaaaacttatattttgataatcaatttgataaatgtatactcatttacaacaagtttgtgtccgctattacacaagatgttactcgtcagcagttaattcctttagatattaaacaaaatgataaagaagaaacagtagatactagtggtaaaaaaaactcagcaatttatacttatgagcccgatgaatcttcaatactaaaagatttgttgcctaaaaatatttcaattcaaattttcaaagttttgttagaaagtagtgcaggagaacaaggagcacgtatggcggctatggataatgctacaagaaacgcaggtgaaatgatagataatttaacattaaaatataatagaactagacaagcatttattactaaagaattaatagagattatttcaggagctgaagcaatttaa

SEQ ID NO: 272630 - DNA, 523 bp, Unknown
  Bacterial polypeptide expressing nucleotide sequence isolated from the Sargasso Sea
cattccaacaaatgtaatttcaattactgatgggcagatatatcttgagactaacctttttaattcaggaataagacccgcaatcgatgttggcctatctgtttccagagtaggtggtaatgcccaaatcaaggcaatgaaatctgttgctggaactttgcgtttagacttagctcagtacagagagctagaggcatttgcaaaatttggttctgatttagataaggcgacactttcccagctaacaaggggcgagaggatggtagagatactaaaacaaaatcaatatgttccgatggatgttgaaaagcaaattgccatcatttttgctgcctccaaggggcagctagatgatttggatattgaagaaatatctgattttgagactggcttatttgaatatcttgatgcaaatgcatcagaaagtcttgcttcaatagtaaacgaaggaactatatcggaaaacactggagagaagcttgaaaaagcaatctcagatttcaaggcaggatttaaagcttag

SEQ ID NO: 272631 - DNA, 837 bp, Unknown
  Bacterial polypeptide expressing nucleotide sequence isolated from the Sargasso Sea
tatgagtaatggaacagtaatacaaataattggagcagtaattgacgtcgagtttccaaaggaaaacttgcccaaaatctatgacgcattaactgttgatgaaactggacttgttttagaagtgcagcagcagttaggtgatggcgttgtaagaacaattgcaatgggtgcctcagaagggcttaaaagaggtgtatcggttaccaataccgaaaatccaatatctgttcctgttggagaggcaacacttggaaggataatgaatgttctaggagagccaattgatgaaaagggtcctgtggatgcaaaatctgcaatgccgatacatagaaatccgccttcatatgaggatcaggcagagacaaccgaacttctagagacgggtatcaaggtaattgatttaatttgcccctttgccaagggtggaaaggttggtttatttggcggtgctggagtagggaaaacggtaaatattcaagagttaataagaaatattgcatacgagcatagcggatattcggttttcgctggtgtgggcgagagaactcgtgaaggaaatgacatgtaccacgagatgattgaaggtggtgttttggataaagtagcccttgtatatggacagatgaatgagccccctggaaacagattaagggttgctctttctggacttacaatggctgaaaactttagagatgaagggcgagatgttcttttattcgtagacaatatctatcgatacactttggctggaacagaatgttcagctctattaggcaggatgccatctgcggtgggataccagcctacacttgcagaagaaatgggtgttcttcaaga

SEQ ID NO: 272632 - DNA, 502 bp, Unknown
  Bacterial polypeptide expressing nucleotide sequence isolated from the Sargasso Sea
gtaatttctataactgatggacaaatatttttagaaactgaattatttaaccaaggaataagacctgcggttaacgttggtttatccgtatcgcgagtaggatctgcagcacaaactaaagcaatgaaaaaggtagctggctcaattaaattagaacttgctcaatatagagaaatggcagcctttgcacaatttggatcagacttagatgcttctactcaacaactattaaatcgaggagcaaaattaacagaattattaaaacaagaccaatactctccaatgactgtcgcagaacaagtaatttcagtttttgctggagtaaaaggatatttggatgacgttgatttaggaaaaattaaaggatttgagaaagatataatcgaaaaaattaaaaatgataaaccagaaattattgaagccattcaatcgtcaggaaaattagatgaagataccgaaaatcaattaaaacaagttatagaggaatataagaaaaaataat

SEQ ID NO: 272633 - DNA, 764 bp, Unknown
  Bacterial polypeptide expressing nucleotide sequence isolated from the Sargasso Sea
aattttaagaaaaagagtcgaggttaaggcacctggaataattcctagacaatcagtaaatgagcctatgcaaacaggtcttaaagcaattgatagcttaataccaattggaagaggtcaaagagagcttataattggtgatagacaaactggcaaaactgctgtggcggtggatacaattattaatcagaaggcaataaatgagtctaatgatgaaaagaaaaaactatattgtgtttatgttgctattggacaaaaaagatcaacagtcgctcaaattgttaaaactttagaagatgctggcgcgatgaaatatacaaccgttgtttcagctacagcttctgactctgcgcctttgcaatttttggcaccttacacaggatgcacaatcggagaatattttagagataatggaatgcatgcattgataatttatgatgatctttctaaacaagctgttgcatatcgacagatgtcattgttgttaagaagaccaccgggcagagaagcttatcctggagacgttttttatcttcatagtagacttttagagagagcggcaaagttaaacgaaaaaaatgggggtggctctttaacggcattaccaattattgaaacacaggccggcgatgtttccgcttatatcccaactaatgttatttcaataactgatggacaaatatttttggaaacagaattattcaatcaaggaataagacctgctgtaaacgtaggattgtctgtttcaagagttggttctgcag

SEQ ID NO: 272634 - DNA, 812 bp, Unknown
  Bacterial polypeptide expressing nucleotide sequence isolated from the Sargasso Sea
tatgaataaaaaaggaaaaattacacaaattattggtgcagtagttgatgtaaactttgatagtgacttacctgaaatttatactgcacttgaagctaataattctggaaacaaacttatattagaagttgctcaacatttgggggaaaatgatgttagaacaattgcaatggatgcaacagaaggtttaaagcgaggagatgaagtcattaatactgagtctcctataagtgtaccggttggaccagagactttaggtagaattataaatgttgtgggtgactcgattgatgagaaaggtgatgtgaaaacaaaagaaaaatggccgatacacagacctgcaccaaaatttactgatcaagcgactgaaacagaacaactagtaacaggaataaaggttgttgatttattagcgccatacgcaaaaggtggaaaaataggattatttggtggcgcaggtgttggtaagacagttactataatggagttaataaacaatattgcaaaagcacatggaggcttctctgtttttgcaggtgtgggggaaagaactagagaaggaaatgatttatatcacgaaatgatagagtcaggagtaattaaaacagatggcaaaggttcgaaagcagctttagtgtatggacaaatgaatgaacctccaggagcgagagcaagagtagcgttaacgggattgactgtggcagaatactttagagataaagaaggtcaagacgttctgtttttcattgataatatttttagatttactcaggcaggttcagaggtatctgccttgcttggaagaatccatc

SEQ ID NO: 272635 - DNA, 271 bp, Unknown
  Bacterial polypeptide expressing nucleotide sequence isolated from the Sargasso Sea
tggggcaatagcgattatttattttgagcctacaaaagaagaaattgttactgaattggttcctaaatctctgaaaatccaacttttcaaatcattgcttgactcacacgctgccgaacatggtgcaagaatgaccgcaatgcataaggcaactgataatgcttcagaattgcaaaaagatttgaaattaagctataataaagcgagacaagctgcaattaccaatgaaattttagaaattgttggtggagctgaagcattgaacgcataa

SEQ ID NO: 272636 - DNA, 901 bp, Unknown
  Bacterial polypeptide expressing nucleotide sequence isolated from the Sargasso Sea
tttgtcagttggtgatggtatcgcaagaatatacggtttagataacgttcaagcaggagagatggttgaattttctgatggttcaaaagggatggctttaaacttagaaactgacaatgttggtgttgtaatttttggtgatgatagagctgtaaaagagggtgatacagtaaaaagaactggagcaattgtagatactcctgtgggaaaagaattattaggaagagtagttgatggattaggaaatccaatagatggcaaaggtgctctagataaaggtatcaaaagaagcagagttgaagttaaagcccctggtataattccaagaaaatctgtaagtgaacctatgcaatcgggacttaaatcagttgatagtttagttcctattggaagaggtcaaagagaattaattataggcgataggcaaactggaaagactgctgtcgcaattgatactataattaatcaaaaaaaaataaatgaatctaatgatgaaaaacaaaaattatattgtatttatgtagcaattggccaaaaaaggtcaactgtcagacaaatagaaaaatctttagaggaggctggagccatggaatatacaacaatagttgctgcaacagcatcagatgctgccccgcttcagtttttggctccttatactggatgtgcaatgggtgaatattttagagacaatggaatgcatgctttaattatttatgacgatttatctaagcaagctgttgcgtatagacaaatgtcattattgttaagaagaccaccaggaagagaagcttatccaggagatgttttttatttacatagtagacttttagaaagagcagctaaacttagtgatgaacatggaggaggatctttaacagcgctaccaattattgaaacccaa

SEQ ID NO: 272637 - DNA, 679 bp, Unknown
  Bacterial polypeptide expressing nucleotide sequence isolated from the Sargasso Sea
gcaccaaagttattgtcaggaactggtcaggaaaaaaatcatctttgtgtggtgatgacttctgatagaggtttatgtggtggatttaattctaatattattaaaaaggctaaaagttattttgtaaaaattttagatgaaggtaaagaacttaaaattattacagtaggctcgaagggaaatgatcaattaaaaagagtttatggtaataaaataattgaaaatatttctttcaaagaatctaaaaatgcaaattatttcgatgctgataaagttgggaaaatggtaattgaaaaattcgaagcaggtgaatttgatgtttgcacaattttttataatcaatttaaaaatgtaattactcaaattcctcaagcacagcaaattatccctttaaataatgaaggagaaaaaaatagttcagatgaaagttacgaatttgaaccagatgaagatgaaattttaaacaatttattgccaaaaaatatttctacacaaatatttaaagcaatgttagaaaattcagctagcgagcaagggtctagaatgagtgcaatggataatgcaacccgaaacgcaggtgaaatggttgacaaacttactatcgaatataatagaagtcgtcaggcagcaattacaaaagaactaatagaaatcatatcaggagcagaaagtttataat

SEQ ID NO: 272638 - DNA, 823 bp, Unknown
  Bacterial polypeptide expressing nucleotide sequence isolated from the Sargasso Sea
aatgggcgacgttatgtatggtgagcttgtagagtttgaaaatggtgtctttggacttgcacttaacttagagcaagactctgttggagttgttgtgttgggtgattaccttgggctaagtgaaggacaaaaagttacatgcacaggtaagatcttagaggttcccgtcggtgaggaaatgcttggtcgagttgttgatgctttaggaaacccaattgatgggaaaggcgaacttaaaacaaaacaaactgctcctattgaagtagttgcgccaggagttattgccaggcaatcagttgatcaaccagtgcaaattgggcttaaatcaatcgatgcaatggttccaataggaagaggtcaaagagagctcattattggtgacagacaaactggaaaaaccgctgtagcaattgacgcaataattaatcaaaagggtacaggaattaaatgtatttatgtagctataggtcaaaaacaatcaacaatagccaatgtcgtagcaaagcttgaagagtatggagcaatggagcacacaattgttgtttcagcggcagcagctgatccagctgcgatgcaatacctctcagcatattcaggttgcgcaatgggagaatattttagagacacagggcaagatgcattaattgtttacgatgatttgtcaaagcaagcagttgcttacagagagatatcgctattgcttagaaggcctccaggtagagaagctttccctggagatgttttttatcttcactcaagacttttagagagagcagctagagtgaatgcggaatacgtagaaaaaatacagaaggaaaggtaa

SEQ ID NO: 272639 - DNA, 817 bp, Unknown
  Bacterial polypeptide expressing nucleotide sequence isolated from the Sargasso Sea
aatggaaataaaagcagccgaaatttcatcagttataaaggatcaaattgcaaattttgattctaaatctgatgtagctgaagttggaacagttttaagtgtgggagatggtattgcacgtgtatatggtttggataaggttcaagcaggagaaatggttgagttcccaggtggcattaagggaatggctcttaatttagaaatggataatgttggtgtttctatttttggagatgacacaggcattaaagaaggcgacactgttaaacggacaggagaaattgttgatgttcctgtcggtaaagaacttttgggtcgagtggttgatggattaggaaatccaattgatggtaaaggtccaataaaatcaactgacaaaagaagaattgaaataaaagctccaggtataattccccgacaaagtgtgtctgaaccaatgcaaactggaattaaggcacttgatgctttggtacccataggaagaggccaaagagaattaattattggagatagacaaactggtaaaactgctgttgcgatagatactattctcaatcaaaaaacagttaatcaatctacaaacgaaaaagaaaagctttattgtatttatgtggctataggtcaaaaaagatcaacagttgcacaaattgtaaaaacattagaagataatggtgcaatggagtatacaattgttgtttctgcaacagcttcagaaccagcacctcttcaatttttatctgcatatacgggttgcacaatgggagaatattttagagataatggtatgcatgctcttatagtatacgatgatttatct

SEQ ID NO: 272640 - DNA, 857 bp, Unknown
  Bacterial polypeptide expressing nucleotide sequence isolated from the Sargasso Sea
gttgacgttcctggttggaaaagaattgttaggacgtgttgttgatggtttaggaaatcctattgatggtaaaggtcctattcaatcttctgaaaagagaagaattgaattaaaagccccaggtattattcctcgtcaaagtgtatctgaacctatgcagacaggtattaaagcacttgatgctcttgttccagttggaagggggcaacgtgaattaataattggtgacagacaaacaggtaaaactgctgttgctattgatacaatcttaaatcaaaaatctgtaaatcaatcagacaacgaaaaagaaaagttatattgtatctacgttgcgattggtcagaaaagatcaacagttgctcaaattgtaaaaacactagaagataatggtgcaatggaatatacaattgttgtatctgcaactgcatcagagcctgcaccgttgcaatttttatctgcttataccggttgtacaatgggtgagtattttagagataacggtatgcatgcattaattgtctatgatgatttatcaaagcaagcagttgcttatagacagatgtctcttttattaagaagacctcctggacgtgaagcatatcccggagatgtattttacattcatagtcgtcttttagaaagagctgccaaaatgagtgatgaacatggtggcggaagtttgaccgctctaccaattattgaaactcaggctggtgacttgtctgcctatattccaacgaatgttatatccattactgatggacaaatattcttggaaaccaacctattctttgctggtattcgacctgcgattaacgtaggactttcagtaagtcgtgttggatctgctgcgcaaa

SEQ ID NO: 272641 - DNA, 772 bp, Unknown
  Bacterial polypeptide expressing nucleotide sequence isolated from the Sargasso Sea
aatgccgagccttgatgatttaagaaaaagaattgctagtgtaaaatccactcaaaaaataacaaaagccatgaagatggtggcagcagcaaaattaagaaaggcacaagaaatggctgaaaaaggaaggccattcagtgataaaatggatacgattatacaaaatttaagtaaagcaattaatgatccatcaaatgcacctaaacttttagttggaacaggaaaggatagcacccacctatgtgttgtcatgacagctgaccgaggtctttgtggcggtttcaacacaaacatagtcaaacttgcaaaaaattattttaatataattttaaaagattcaaaaaacctaaaaattataacggtcggcacaaaaggccttgatcaacttaaaagggattatggaaaatttattataaaaaaaattaactttaaagataagaaaaatctatcttttcaagatgctgaaattataggaaatgaaatcgtcaaattattcaaaaataatgaatttgataaatgtgtaattttctttaataaatttaaaaatgtcatgactcaaattccacaaaatcaacaggttataccagcaaaaaaagacgaagagtcaaaagttgtggagaattcatcatacgagtttgagccagaagaagatgaaattttagaagatcttcttccaaaaaatatttctactcaaatttataagggcattttggaaaattctgccagtgaacaaggctcaagaatgactgctatggataatgcgacgagaaaa

SEQ ID NO: 272642 - DNA, 574 bp, Unknown
  Bacterial polypeptide expressing nucleotide sequence isolated from the Sargasso Sea
agtacagaaatgggtgatttacagaaaagaataacatctacaaaaaatggttcgattacatccgtacaagctgtttatgttcctgcggatgacttaacagatccagcgcctgcaactgcttttgcacatttagacgcgacgtctgttcttgaaaggaaaattgcagaactaggaatatatccggccgttgatcctcttgcttctacatctagaattttagatccaagaatcataggtgatagacattatgatactgctcaaaaagtacaagccgtattacaacaatacaaagaccttcaagacattattgctattctaggaatggatgagctatctgatgatgataagttaacagtctctagggccaggaaaatgcaaaaattcatgtctcagccattttttgttgctgagcaatttactggtttcgaagggcgctattgtagcttagaggatacagtgtctggttttgaggcgattttaaatggtgatgtggatgaattagctgaaaattcatttgcatatgttggtactattgatgaggctattgataaagataaaaaggcagctgcataat

SEQ ID NO: 272643 - DNA, 891 bp, Unknown
  Bacterial polypeptide expressing nucleotide sequence isolated from the Sargasso Sea
ggaaaggttttggaagttcctgtgggtgaagagctcttaggaagagttgttaatactcttggaactcctatagatggaaagggtgagataaaagctgaaaaaacattgcctgttgaggttgttgctccaggtgttattgcaagacaatcggttgatcaaccagttcaaatcggtttaaaagcggttgatgcaatggttccaattggaagaggtcaaagagaattgataattggtgacagacaaaccggaaaaacagctgtagctgttgacgcgataatcaatcagaaaggaactggaataaaatgtatctatgttgcaattggtcaaaaacagtccacggttgcaaacgttgttagaaaacttgaagaatatggcgcaatggaacacaccattgttgtctcagcaacagctgctgatcctgctcctatgcaatacttgtcagcctatgctggttgcacaatgggtgaatattttagagataagggtgaagacgctttaattgtatacgatgatctttctaaacaagcggttgcatacagacaagtgtctttattgctgaagaggcctcctggtagggaagcttatcctggtgatgtcttttaccttcactcaaggttgttagaaagagctgcaagagttaacgctgaatatgttgaacaggttaccggcggtaaagtaaaaggtaaaaccggttccttaacagcattaccaattattgagactttggctggtgatgtttctgcattcgttccaacaaacgttatatctattacagatggacaaatatatttagaaacagaactatttaattctggtgtcaggccagcgattaatccaggcctttcagtttcaagggttggaggctcagcacaaacaaagattatgaagaaa

SEQ ID NO: 272644 - DNA, 870 bp, Unknown
  Bacterial polypeptide expressing nucleotide sequence isolated from the Sargasso Sea
ttagaggaagcaggtgcaatggagtacacaactattgttgcagctacagcatcagattctgcgccattacaatttttagctccatatacaggatgtgctatgggtgagtattttagagataatggaatgcatgcacttattatctatgatgatttatctaaacaagctgttgcttacagacaaatgtctctattattgagaagacctccaggccgtgaggcttatccgggagatgtattttatctacatagtagattacttgaaagagctgcaaagttaagcgacgagcatggtggtggttcattaacagcacttccaattattgaaacacaagggggagatgtttctgcatttattcctacaaatgtaatttcaattactgatggtcaaatattcttagaaacagaattatttaaccaaggtataagaccagcaattaacgttggattatcagtatctagagttggatcatcagctcaaacaaaagctatgaaaaaagtttcgggatcgatgaaactagaattagcccaatacagagaaatggcagcatttgctcaatttgggtctgatttggatgcatctacacaacaacttttaaataggggctcaaaactaactgaacttctaaaacaaaaacaatactcaccattaactgttgctgagcaagtaatatcagttttctgcggtgttaaaggttatctcgatgatattgatttgaaagatgtatcggagtttgaaagcaaaattattaataaatgtaaatcagataaacctgaaataatcgaggcaattcaaagcactggaaaacttgatgaagataaagaaaagctattggtagaagtaattactcagctgaaaggaacctttaaa

SEQ ID NO: 272645 - DNA, 409 bp, Unknown
  Bacterial polypeptide expressing nucleotide sequence isolated from the Sargasso Sea
gtttcagcggcgcagatcaaagctatgaaacaagttgcgggtagaatcaaattagagctagcccagtaccgcgagatggcggcttttgctcaattcgcctccgatctagatccagttacacagagattgctagcgaggggtgttcggttgactgagctgttaaagcaggggcaatatgcgccgctcactgtagaagagcaggtggtatcaatttttgctggagttcgtggatacctcgacgagattgcagtaaacgacgttactagatttgaacaagggcttttatctgaagttcgtgctagcggcgcttcgattttggcatccataagagatgaacaagaacttagtgacgatacggacaaagctttaacggagtttgtagacgcttacgccaagaagtttgcataaa

SEQ ID NO: 272646 - DNA, 604 bp, Unknown
  Bacterial polypeptide expressing nucleotide sequence isolated from the Sargasso Sea
ggataccaacctactcttgcaactgacatggggtcacttcaagaaagaattacatctacaaataaaggttcaattacatctgtgcaggcaatatatgttcctgctgatgatttaaccgatcctgctcctgcaacctcgtttgcacaccttgatgcaacaaccgtgctttcaagacagattgcagaacttggcatttatcctgccgttgatccgttagatagtacttcaagaatattagaccctcgtgttgttggagatgaacattatcaagttgcaagaaatgtacaagctgtacttcagacttataagtctctacaagacattattgcaattttaggtatggatgagttatctgaagaagataaattaacagtggccagagcacgtaagattcaaagatttatgtcccaaccgttctttgttgctgaagtctttacaggaactcctggaaaatatgttgaattagaggatacgattaaaggatttgatgcgatctgtaagggtgaatatgatcatctacctgaggcagctttttatatggttggtacaatagaggaagctattcaaaaagcagaaaaaatggccgaagaagccgctgcataac

SEQ ID NO: 272647 - DNA, 637 bp, Unknown
  Bacterial polypeptide expressing nucleotide sequence isolated from the Sargasso Sea
atgccaagcttagatgatttaaaaaaaagaattaaaagcgttaaatctacacaaaaaattacaaaagcaatgaaaatggtagctgctgctaaacttaaaaaagctcaagataatgctgaaaagggaagaccatacagcgaaaaattacaaaacataattttgaatttaacaaaatcactttcagaaggaagtaatgctccaaagttattagtcggaagtggaaaagataaggtacatttatgtgtcgttattactgcagacagaggtttatgcggtggtttcaattctaatatctgtaaattagcaaaaagccactttaaaaaaattttaaaaggaggaaaggaattaaaaataattactgtaggtagcaaaggacacgatcaaattaaagcggaatacggtgattacataatatataaaaaaagttttaaagaaaagaaacaaatcacatttaatgaggctaacgagatcggaaaaaaggtaatggaattatatgatcaagaacaatttgataaatgttttatattctataacaattttaaaaatgtgataacacagatacctcaagctgaacaaataattcctacttttataaaacaggaagataaaaataaagaaaaggctcttttttatgaat

SEQ ID NO: 272648 - DNA, 883 bp, Unknown
  Bacterial polypeptide expressing nucleotide sequence isolated from the Sargasso Sea
gttgatactcccagttggaaaagaattattaggaagagtagtggatggtttaggaaatcctattgatggaaaaggaccattagataaaggaattaaaaaaagcagagttgaagtaaaagctcctggtattattccacgacaatcagtaagtgaaccaatgcaaactggtcttaaatcaattgatagtttagttccgattggaagagggcaaagggaattaattattggtgatagacaaactggtaaaacagcagttgcagtagatgcaattattaatcaaaaaaaaatcaatgaatctggtgatgaaaaacaaaaactgtattgtatatacgttgcagttggacaaaaaagatcaacagtaagacaaattcaaaaaacattagaagaagctggagctatggagtacacaacaatcgttgctgctactgcatctgactctgctcctttacaatttttagcaccatacacaggttgtgctatgggagagtattttagagataatggaatgcatgcgttaataatttatgatgatttgtctaaacaagcagttgcttacagacaaatgtcattgctattaagaagacccccaggacgtgaggcttatcctggagatgtattttatcttcatagtagattacttgaaagagcagctaaattaagtgacgaacatggtggtggatcacttactgcactgccaattattgaaacacaaggtggagacgtatccgcgttcattccaactaacgttatttcaattacagacggtcaaattttccttgaaacagaactatttaaccaaggtataagacctgcaattaacgtaggtttatcagtatctagggttggttcatcagctcaaacaaaagcgatgaaaaaagtttct

SEQ ID NO: 272649 - DNA, 617 bp, Unknown
  Bacterial polypeptide expressing nucleotide sequence isolated from the Sargasso Sea
gttacttggtagaatgccttctgctgtagggtatcaaccaaccttagctgaagagatgggtgtgttgcaagaacgaataacttctactaaatctggttctattacttctattcaagctgtttatgtaccagcagatgatttaacggatccaagccctgcaacgacttttgctcatctggatgcaacggtagtattatctcgaaatattgcagagctgggtatatacccagctgtggatccattagattctaccagtagacagctagaccctctaattttaggccaagaacattatgatactacaagagctgtgcaaggcgttttgcaaaagtataaagaacttaaagacattatcgcaatcttaggaatggatgaattatcagaggaagataagttagctgtaaaccgtgccagaaaaatacaaagatatttatctcaaccattttatgttgcagagacatttactgggacaccagggaaatatgtagctttgaaagacacgatgaaaggctttcagtccattgttaatggcgacatggaccacctccctgaacaggcattttatatgataggagaaatatcagaggctgaaaaaaaagcagaggatgttaaataat

SEQ ID NO: 272650 - DNA, 748 bp, Unknown
  Bacterial polypeptide expressing nucleotide sequence isolated from the Sargasso Sea
cacgcattaattatttatgatgacttatcaaaacaagcagttgcatatagacaaatgtcattactgttaagaagacctccaggcagagaagcttatcctggagatgttttttatttacatagtagacttttagaaagagcagccaaacttagtgatgaacatggaggaggttctttaacggcattaccaattattgaaacacaaggtggtgatgtatctgcttttattccaaccaatgtaatttcaattactgatggacaaatatttcttgaaacaaatttgtttaaccaaggtatcagaccagcaattaatgttggtttatctgtatctagagttggatcttcagctcaaacaaaagctatgaaaaaagtatcgggttcaatgaaattagaattagcacaatatagagaaatggcagcatttgctcaatttggatcggatctagatgcatcaactcaaaaactattaaatagaggatcaaaattaactgaacttttgaaacaaaagcaatattcaccaatgacagttgcagaacaagtaatttcagttttttgtggtgtaaaaggatatttggatgatttagagcttaaagatatatcgtcgtttgaaagaaaaattattgaaaaatgtaaatctgagaagccagaaattttggagtcgatatctaaatctggaaaattagaagaagatactgaaaatttattagttgaaactattaaagaattaaaacaaaactttaactcttaaa

SEQ ID NO: 272651 - DNA, 819 bp, Unknown
  Bacterial polypeptide expressing nucleotide sequence isolated from the Sargasso Sea
tgatctaatatgtccatttactaagggtggtaaagttggtctatttggtggtgctggtgttggtaaaacagtaacgatgatggagcttattaataatatcgcaactgagcacagtggttattctgtatttgccggtgttggtgagcgtactcgagagggtaatgacttttaccatgagatgagcgaatctaacgtattagataaagtatcacttgtttatggtcagatgaatgagcctcctggcaacagattacgtgttgctttaactggcttgactgttgcggagagtttccgtgatgaaggccgtgatgtattattatttgtagataatatttatagatatacactagctggggttgaggtttctgctcttttagggcgtatgccatcagctgtgggttatcaaccaactcttgcagctgaaatgggtgcattacaagagcgtattacatctactaaaaatggtagtattacatctatccaagcagtttatgttccagcggatgatttaacagatccatcgcctgcaacaacgttctcgcatttagatgcgactgtagtattatctagacaaattgctgaattaggtatctatcctgcggttgatcctctagattcaacatcaagacagctagacccattagtagttggtaaagagcattacgaggtggctcgtggagtgcagcagactttacagcgttataaagagcttaaagatatcattgctattttaggtatggatgagcttagtgaagaagataagttaattgtatctagagcgcgtaagattcaacgtttcttatcccaaccattttttgt

SEQ ID NO: 272652 - DNA, 772 bp, Unknown
  Bacterial polypeptide expressing nucleotide sequence isolated from the Sargasso Sea
ggaattaaagaaggtgatacagttaaacgtacaggagaaattgttgacgttcctgttggaaaagaattgttaggacgtgttgttgatggtttaggaaatcctattgatggtaaaggtcctattcaatcttctgaaaagagaagaattgaattaaaagccccaggcattattcctcgtcaaagtgtatctgaacctatgcagacaggtattaaagcacttgatgctcttgttccagttggaagaggacaacgtgaattaatcattggtgacagacaaacaggtaaaactgctgttgctattgatacaatcttaaatcaaaaatctgtaaatcaatcagataatgaaaaagaaaagttatattgtatctatgtcgcaattggtcagaaaagatcaacagttgctcaaattgtaaaaacactagaagataatggtgcaatggaatatacaattgttgtatctgcaactgcatcagagcctgcacctttgcaatttttatctgcttatactggctgtacaatgggtgagtattttagagataacggtatgcatgcattaattgtttatgatgatttatcaaagcaagctgttgcttacagacagatgtctctattattaagaagacctccaggacgtgaagcatatcccggagatgtattttacattcatagtcgtcttttagaaagagctgccaaaatgagtgatgaacatggtggtggaagtttgaccgccctgccaattattgaaactcaagcaggagatttatctgcttata

SEQ ID NO: 272653 - DNA, 523 bp, Unknown
  Bacterial polypeptide expressing nucleotide sequence isolated from the Sargasso Sea
atggctagtttagacgatttaaaaaaacggattaccagtgtaaaatctacacaaaagatcactaaagctatgaagatggttgccgctgctaaattaaaaagagctcaagatagtgcagaaaaaggtagaccatattctcaaaaaatgaacaatataattttgaatttatctggtggtatatctgataagactaatgcacctaaacttttatcgggtacaggaaaagaattagtacacctttgtgtagttatgacctcagataggggtttatgcggtggttttaatgctaatattattaaaaaagctaaaagttatttttcaaaattaaaaaatgaaggcaaggaattaaaaattattactgtagggtctaaaggtaatgatcaactaaaaagaacttatggagataaaattatcgaaaatatatcttttaaaaattcaaaaaatgcaaattattttgatgctgaaaaagtaggaaaaattattattgataagttgaaaaagaggaatttgatatttgtacaat

SEQ ID NO: 272654 - DNA, 438 bp, Unknown
  Bacterial polypeptide expressing nucleotide sequence isolated from the Sargasso Sea
atgtgggattatcagtttctagggttgggtctgcagctcaaacaaaagcaatgaaaaaagtttcaggttcaatgaaacttgagttagctcagtacagagaaatggctgcatttgctcagtttggttctgatttggatgcttcaactcaacagcttttaaatagagggtctaaattaactgaacttttaaaacaaaaacagtactctccaatgaccgtagcagaacaagtaatttcagtgttttgcggtgtcaaaggttatttagatgatatagaattaaaagagatttcagattttgaaaataaaataattgatagatgtaaatccgataaacctgaaattatggagtctattttaagttcaggaaaattggaagaggcttctgaaaaaagtttaattgaagttataaccaacttgaaaaaaaattataaatcttaat

SEQ ID NO: 272655 - DNA, 706 bp, Unknown
  Bacterial polypeptide expressing nucleotide sequence isolated from the Sargasso Sea
catggtatctatacgccctgatgaaatcagttcaattttaaaacaacaaataactgattatgaccaatccgtaagtgttagcaatgtaggaactgttctgcaaattggtgatggcattgcaagaatatatggcttagatcaggtcatggcaggtgagttgttggaatttgaggatggtaccgaaggtatagctttgaatcttgaggatgataatgttggagctgttttaatgggggaggcacttggtgtccaagaaggaagtaacgtaaagtccacaggtaaaatcgcatctgttcctgttggcgaggcaatgcagggaagagttgtaaaccctctgggacaacctattgacggtaagggggaaattccaacaagcgatactaggttgatcgaagaaatggctcccggaataatcaaaaggagatcagtacatgaaccaatgcaaacaggtattacatctattgatgccatgattcctgtggggagaggtcaaagagaattaattattggtgacagacaaactggaaaatcagctatcgctattgacacgataattaaccaaaaaggacaagacgtagtttgtgtttacgttgccattggtcagaaatctgcatcagtagcaaatattgtagaagttttaagggagagaggtgcattagactatacagttgtagttagtgcaggagcttcagaaccagcagcttgc

SEQ ID NO: 272656 - DNA, 767 bp, Unknown
  Bacterial polypeptide expressing nucleotide sequence isolated from the Sargasso Sea
aatgacaattaatccaactgaaatcagcgatatcataaaagataaaattaataagttagacactaaaacacagtctcataatcagggtactgtaatttcattaacggatggtatagcaagaatctacggcataacagatgctctacaaggtgaaatgttagaattcccaaataatatttttggacttgcccttaatctcgaaagagattcggttggcgcggtgattctaggagattataaatccatttcagagggtgacaccgttaagtgtactggtaaaattttagaggttcctgtcggtgaagctctactaggacgcgttgttaattcgctaggtgaaccaattgataatgctggtgaaattaaatctggcttatcatcgccgattgaaaaaatagcgccaggtgtgattgaacgaaaatcggtagatcagccagtacagacgggactcaaatctattgattcaatggtaccgataggtcgtggacaacgcgagctgataattggagatagacagacaggcaaaaccgctgttgctgtcgatgctataattaatcaaaaagatactggtgtgaaatgcatatatgttgcgataggacaaaaagcctcgtctattgcagctgtagttagaaaactcgaagaacatgacgctctaaaacatacaatcatagttgctgcctctgctgctgattctgcagcgatgcaatacattgcgccatactcgggttgtgcgatgggagagtattttagagataatggagaggatg

SEQ ID NO: 272657 - DNA, 602 bp, Unknown
  Bacterial polypeptide expressing nucleotide sequence isolated from the Sargasso Sea
cggcgggctcaacatcaacctgttccggcaggtgctccagagcatgtccgagtggcgtgacaaaggggtcgagatcgacgtaacgatcattgggcgaaaaggcctgggatttttcaagcgggtgggggtaaacattgtctccgaagcgacccagcttggagacaagccgcagctggctgacctcattggcgccatgaaggtaatgatggatgccttcagcgagggtcagattgaccgcttgttcctcgcacacaacggctttgtcacaacgatgacacaggaaccgcgggtggatcagttgctgccggtgtcggccgccgagcccgatgagcgccttgagcagcactgggattatctctatgagcccgatgcgcgcgaggtcgtagacgcgctcatgatgcgctacgttgagtcgctgatttatcgcggggtggtagagaacatctcctgcgaaatggccgccagaatggtggcaatgaagtccgcatcggacaatgcgggtaacctgattgatgaactgcagctggtctacaacaaggcccgccaggctgctattacccaggaaatttctgaaatcgtcggcggcgctgcagcggtttaac

SEQ ID NO: 272658 - DNA, 959 bp, Unknown
  Bacterial polypeptide expressing nucleotide sequence isolated from the Sargasso Sea
cttttatgttattggtgatccagtagatgatggtaagccggttaagtccaagacaacattacctattcatagagatgctccagaatatgttgatcaatccacttctgctgacattttagtaacaggaataaaagtggttgaccttttagcaccctatgcaaaaggtggtaaaatcggactttttggtggtgccggtgttggtaagacagttttaattatggagctcataaataacgtagctaaagcacatggtggatattctgtttttgcaggtgttggcgaaagaactagagaaggtaatgatcttttccatgaaatggtagaatctggagttatcgttccagatggtccaggttctaaagcagcacttgtatatggtcaaatgaatgagcctcctggagctagagcaagagtggctttaacaggactaacgttagctgaatattttagagatcaagaaggtcaagacgttctgttttttgttgataacatttttaggtttactcaggctggatccgaggtttcagcattattaggaagaataccatctgctgtaggatatcaaccaactttggctacagatatgggagcacttcaagaaagaattacgactacaacaaaaggatctattacttctgtgcaagcaatatatgttcctgcagatgacttaactgatcctgctcctgctacatcttttgctcacttagatgctactactgttttatcaagacaaatagcagaaataggaatttatcctgcggttgatccattagactcaacttcaagaatgctagatcctagaattgttggtgaagagcattatgaagttgcaagaagagttcaagaagttcttcaacaatataaatcgttacaagatatcattgccattttaggtatggatgaactatctgaagaagataaactagttgttagtagagctagaaaaattcaaagatttt

SEQ ID NO: 272659 - DNA, 542 bp, Unknown
  Bacterial polypeptide expressing nucleotide sequence isolated from the Sargasso Sea
agacaaggatcatataacctccgttcaagctatctatgtaccagctgacgatctaacagatcctgcacctgcaacctctttttctcatttagatgcgactacagtattatcgagacaaatcgctgagattggtatttatcctgcagttgaccctttggactctacttcaagaattcttgatccaaggatagttggagaggaacactatcgtgtagcgagagatgttcaaagaatcctacaagcatataaatctttgcaggatattattgcaattctaggaatggatgagctatctgaggaagacaaattaactgtcgctagggcaagaaagattcagagatttttatcacaacctttctttgttgctgaagtgtttactggatctccgggtaaattagttgatttagactcaacaattaaaggatttgatgctatttgcaaaggagaatatgatcatcttcctgaagctgccttttatatggtaggcggaatagaggaagtaatagaaaaaggtgaaaaacttaacaaagatagcaaataat

SEQ ID NO: 272660 - DNA, 933 bp, Unknown
  Bacterial polypeptide expressing nucleotide sequence isolated from the Sargasso Sea
gtgccggtcggcgagaagaaccctgggtcggatcatggacgttctggggaatcccgtggacgaagccggacccgtgggtgccgacgcttccctgccaattcaccgcaaggcgccgggttatgccgaccagtcgccaacggtcgacatcctcgaaaccggcattaaggtcatcgacctcattatgccgatctccaaaggcggcaaaatcggcctgttcggtggcgcgggtgtgggcaagaccgtgaccatcatggaactcatcaacaacatcgcgaaagagcactcgggcctctcagtctttgccggtgtgggcgagcgtactcgtgaggggaacgacttcttccacgaaatgaaagagtccggcgtgctcgataaggtggcgatggtgttcggccagatgaacgagcctcccggtaaccggctgcgcgtcgcgttaacaggcctcaccatggcagagcactttcgcgatgaaagccgcgacgtgctgctgttcgtcgacaacatctatcgctacacactggccggcaccgaggtgtcagcgctgcttggacgtatgccgtctgcggtgggttatcagcctactctggcggccgagatgggggtactgcaggagcggattacctcaacccgcaccgggtcgatcacctcgttccaggcggtctacgtccccgcggatgacttgacggacccctctccggcaacgacttttgcccaccttgacgccacgctggtgctgtcccgccaggttgccgagctcggcatctatcccgcggtggatccgctggattccaccagccgccagctcgacccgctggtcgttggccaggagcactatgacaccgcgcgggcggtccagggaacgctgcagcgctacaaggaactgcgcgacattatcgcgattctgggtatggacgagctgtcggaagaagacaa

SEQ ID NO: 272661 - DNA, 844 bp, Unknown
  Bacterial polypeptide expressing nucleotide sequence isolated from the Sargasso Sea
ttggaatgtaaaaatggcgataatagattggtcttagaagttgctcaacatttaggtgaaacaacagttagaacaattgcaatggatgctactgaaggactaaaaagaggtgatgaagtaataaacactaatgctcctattcaagtacctgtcggacctgaaactcttggaagaattattaatgtaattggtgagcccatagatgaaagaggtaaagttaaaacaaaagaaagttggccaattcatagagcggcccctgaatttaatgatcagtctacagaaacagaaattcttgtaactggtatcaaggttattgatctgttagcaccttatgctaaaggtggaaaaattggattattcggtggagctggggtaggtaaaacagtcttaattatggaattgataaataatgttgcgaaagcacatggaggattttcagtttttgcaggagtaggtgaacgaactagagaaggaaacgacctttatcatgagatgatggactctggagtaataaaaaaagatggtcctggatctaaagctgcactagtttatggacagatgaacgagcctccaggagcaagagcaagagttgcgcttacaggtttaacagttgctgaatattttagagaccaagaaggtcaagatgttcttttctttgttgataatatttttaggtttacacaagctggctcagaggtttcagcactattaggaagaattccgtctgcagttggctatcaaccaacactagctacagatatgggaaatctacaggaaagaattacaacaacaaacaagggttcaattacatcagttcaagcaatttatgtaccagctgacgacc

SEQ ID NO: 272662 - DNA, 730 bp, Unknown
  Bacterial polypeptide expressing nucleotide sequence isolated from the Sargasso Sea
tacgctgaaggtatgcgcaaagtgatcggcaatatcgcaaatggcagcattgaataccgtcacccgtttttaacggaacgtccggtaaaaaatgtcggctacattgtgatatcgacagaccgtggcctttgcggcggcttaaataccaatgagttcaaacgtattgctctggatatgaagaactggaaagagcagggagctcaggctcagattgcggtgatcggcaataaagctacagcgtttttcaaacgttttggcggtaaggtgctggcacaacaaactggccctggcgataacccacgtttagctgatgtgattggttcggttcaggtgatgctcaaagcatacgaagaaggccgtatcgaccgcttgttcctggtgttcaacaaattcgtcaacaccatgaaacaagagccagtgatcgaacaactcttacctttgccaaaagcagacgtaacagcgaaaagccatagctgggattacatatacgaaccggatccaaaggtaattttagataaattactgagccgctacgtagagtctcaggtgtatcagggtgtagttgaaaacgcggccagcgaacaagcggcccgtatggtggcgatgaaagccgccacagacaacgctggtagcttaatggatgacctgaagttggtttacaacaaagcgcgtcaagcagctattacccaggaactgagcgaaatcgtcgccggtgccgctgctgtttaag

SEQ ID NO: 272663 - DNA, 583 bp, Unknown
  Bacterial polypeptide expressing nucleotide sequence isolated from the Sargasso Sea
atggcaagtttagatgatttaaaaaaaagaatatcgagcgttaaatctacccaaaagattacaaaggcaatgaaaatggttgcagcatctaaattaagaagagcccaagaaaatgcagaaaaaggaagaccgtattcagaaaagatgaataatattattcttaacctttcaaataacatttcagacaaagaaaactctcctaaattactagctggctcaggagaaaataaagttcatttatgtattgttatgacttccgatagaggactttgtggaggttttaatacaaatataattaaaaaagctaaatcatattttcaaaaaatttcagatgaaggaaaagatttaaaaattattactgtaggatcaaagggttatgatcaattaaaaagaatttacaaagataatattattgaaaaaatttctttcaaagactctaaatatgctaattattttgacgcagataaagttggaaaaataattattgaaaagtttgaaaaaaaagaatttgatgtatgtgcaattttttataatcaatttaaaaatgtaataacacaaataccacaagaacaacaaattatcc

SEQ ID NO: 272664 - DNA, 855 bp, Unknown
  Bacterial polypeptide expressing nucleotide sequence isolated from the Sargasso Sea
aatggggataacagattagttttagaggttgctcaacatctaggtgaaacaacagttagaacaattgcaatggatgctaccgaaggattaaaaagaggtgacgaagtaatgaatactaatgctcctatccaagtacctgttggacccgaaactcttggaagaattatcaatgtaattggtgagcctatagatgaaagaggtgaagttaaaacgaaagaaagttggccaattcacagagcggcccctgaattcaatgaccagtcaactgaaacagaaattcttgtaactggtataaaggttatcgacttattagcaccttatgcaaaaggtggaaaaattggattatttggtggagctggagtaggtaaaacagttttaattatggaactaattaataacgttgcaaaagctcatggaggattttcagtttttgcaggagtaggtgaacgaaccagagaaggaaatgatctatatcatgagatgatggactctggagtaataaaaaaagatggtcctggatctaaagctgcactagtttatgggcaaatgaacgaacctccaggagcaagagcaagagttgcgcttacaggtttaacagtagctgagtatttcagggatcaagaaggtcaagacgttctattctttgttgataatatttttaggtttactcaagctggctcagaggtttctgcgcttttaggaagaattccttctgcggttggctatcaaccaacattagcaactgatatgggaaaccttcaggaaagaattaccacaacaaataaaggttcaattacatcagttcaagcaatttatgtaccagctgatgatttaactgatccagctccagcaact

SEQ ID NO: 272665 - DNA, 694 bp, Unknown
  Bacterial polypeptide expressing nucleotide sequence isolated from the Sargasso Sea
ttaaatttagaaaatgataacgttggtgttgtaatttttggagatgacaggcttatcaaagagggagatactgttaaaagaacaaattcaattgttgatgtaccagttggtaaggaactactcggtagagttgttgatggacttggaaaccccattgatggaaaaggagaattgccttctaaggttttgagaaaaagagttgaggtaaaagcacctggtataatacctagacaatctgttaatgaaccgatgcaaaccggtctaaaagcaatagacagcttaataccgataggtagaggacagagagaacttattataggtgatagacaaacaggtaaaactgctgttgctgtagatacaattataaaccaaaaagcaataaatgaattagatgatgagaaaaaaaagctttattgtgtttatgttgctattggacaaaaaaggtcaactgtagctcaaattgttaaaactttagaagatgctggtgcaatgaaatataccacggtagtttctgctactgcttcggactccgcacctttacaatttttagctccatatactggctgcacaataggtgaatactttagagataacggaatgcatgccttaataatctacgacgatctttctaaacaagcagtagcttacagacaaatgtcactattactcagacggcctccagggagagaagctt

SEQ ID NO: 272666 - DNA, 496 bp, Unknown
  Bacterial polypeptide expressing nucleotide sequence isolated from the Sargasso Sea
gatggccaaatattttcttgaaacaaatttatttaaccagggaattagaccggcaattaacgtgggtttatcagtatctagagtaggctcgtcagctcaaactaaagctatgaaaaaagtttcaggttcaatgaaattagaacttgcacaatatagagaaatggctgcatttgctcaatttggatcagacttagacgcatctactcaaaaacttttaaatagaggttcaaaattaactgaacttttaaaacagaagcaatactctccaatgacagtagcagaacaagtaatctcagtcttttgtggggttagaggatttttagatgatgtggaattaaaagatatttctaagtttgagtcaaaaatcattgaaaaatgtaaatctgaaaaaccagaaatacttagctcaatatctagttcaggtaagctcgaagaaaatattgaaaaaatgttaagcgaagtaatagttgagcttaaaaaaaattataattcttaa

SEQ ID NO: 272667 - DNA, 441 bp, Unknown
  Bacterial polypeptide expressing nucleotide sequence isolated from the Sargasso Sea
tatggcaagtttagacgatttaaaaaaaagaatacaaagtgttaaatcaactcaaaagattaccaaggccatgaaaatggtagctgcagcaaaacttagaaaagcacaggaaaatgctgaaaaaggaagaccttattcagaaaaaatgaataatattattcttaatctatctaatggaatttcagataaagaaaatgcacccaaattgcttactggatcaggagatgaaaaagtacatttatgtgtagttttaacatcagatagaggattatgtggtggttttaatagtaatataattagaaaagcaaaatcttattttcaaaaaattttaaatgaaggtaaaaatttaaaaataattacagttggatcaaaaggatatgatcaattaaaaagaacatttaatgaaaatatagttgataaaattacttttaaagagtctaa

SEQ ID NO: 272668 - DNA, 548 bp, Unknown
  Bacterial polypeptide expressing nucleotide sequence isolated from the Sargasso Sea
aatgagtaatggagttgtgacacaaattatcggagcggttatagatgtcgaattcgatagagagaacataccaagcgtgtatgaggctcttaatattgtcggtcttgaaactgtgcttgaggttcaacaacaactaggtgatggaattgtaagaactatcgccatgggttcaacagaaggactaaaaagaggtttagaggttgttagaactaatgcacctatttctgttcctgttgggcaagaaactctgggaagaattatggatgttttaggaaatcccattgatgaaaaaggtgacattggtgagaaagaaagacaaccaattcataaaagcccgccaagctacactgatcaagctggatcaaacgagttactagaaacaggcatcaaagttattgacctaatgtgtccttttgcaaaaggaggaaaagtcggattatttggtggagctggagttggtaagaccgttaacatgatggagcttataagaaacattgcgattgagcattcagggttctcagtttttgctggagttggtgaaagaactc

SEQ ID NO: 272669 - DNA, 874 bp, Unknown
  Bacterial polypeptide expressing nucleotide sequence isolated from the Sargasso Sea
atgacaattaatccatccgaagtaacaaaattattaaaagaccagattaaaaactttggggaaaaagctgaagtttcagaaattggaaaagttttatctgttggtgatggtatagcaagagtttatggtttagacaacgttcaagctggtgaaatggttgagtttgaagatggatctaagggtatggcacttaacttagaaaacgataacgttggtgtagttatttttggtgacgataggaatattaaagagggcgataccataaaaagaactaatgcaattgttgacgtcccagttggtaaagaacttttaggaagagtagttgatgggttaggaaatccaatagatggaaaaggctcactttctataaaaaatagaaaacgtgttgaagtaaaagcccctggtattattcccagacaatcagtaaatgagccaatgcagacaggtttaaaatcaattgactctttaatacctattggaagaggacaacgagaattaattattggtgacagacaaacaggtaaaacagcagtagcgatagatgcaatcattaatcaaaaaaaaattaatgagtctactgacgaaaagaagaaattatattgtgtttatgtagctattggtcagaaacgttctacggttgcacaaattacgaaaactttagaagaagccggagcattaaaatacacaacaatagttgctgccacagcatcagactcagcgccgttacaatttttagctccatatacaggttgtacaattggtgaatattttagagataatggtatgcacgctttaattgtttatgatgatttgtcaaaacaagctgtggcatacagacaaatgtctctccttttaagaagaccaccaggaagga

SEQ ID NO: 272670 - DNA, 611 bp, Unknown
  Bacterial polypeptide expressing nucleotide sequence isolated from the Sargasso Sea
tcgcatgccgtcggcggtgggttaccagccgactctcgctactgagatgggcgcgctccaagagcgtatcacgacgacaaagaacggatcgatcacgtctgtgcaggccatttacgttcctgcagacgactacaccgatccgggtgtggtgacggcatttagtcaccttgacggtcgtatcgtactcgaacgaaacctggccgatcagggtctgtatcccgcggtcgacccgcttgcctcgaattcgaggattcttgacccgcgagtcgtgggcgacgagcactacgatgtggcgcagggcgtgcagcagatcctgcagcgttacaacgacctgaaggagatcatcgcgattctcggcattgacgagctttcggacgacgacaagctggtcgtcggccgtgcccgacgtatccagatgtacctgacacagccgtttacagtgggtgaaggttttacgggcatcccgggtgagtatgtgaagatcgaggacacagttcgcggtttcaagggactcgtggacggcgaatatgacgatctgccagagacggccttctacatggtcggtacgattgagcaggcagtcgagaaagccaagggaatgagcagctaga

SEQ ID NO: 272671 - DNA, 866 bp, Unknown
  Bacterial polypeptide expressing nucleotide sequence isolated from the Sargasso Sea
cctttcagttggtgacggtattgccagagtttatggtcttgataatgtccaagctggagaaatggtcgaatttaaagatggatcgaagggaatggcattaaatttagaaagcgacaatgttggaattgtaatttttggtgatgacaaagcaattaaagaaggagataccgttaaaagaacaggggcaatagttgatgttcctgtaggaaaagaattacttgggagagtggttgacgcattaggaaacccaattgacggaaaggaaaccttaaaaaaaggagttaaaagaaaaagagttgaggtaaaggctccaggaataattccaagaaaatcagttagtgagccaatgcaaacaggattgaaagccattgatagtttaattccaattggaagaggtcaacgtgaattaattattggtgatagacaaacaggaaaaacggctgtagccattgatacaataattaatcaaaaaaaaataaacgaatctaatgatgagaaaaagaaactttattgtatttatgttgctataggacaaaaaaggtcgacagttgctcaaattcttaaaacactacaagatgctggagcaatggattatacaatcatagtgtcagctaccgcatccgatcctgcccctttacagtttttagcgccttacaccggttgtacttttggggaattttttagagacaatggaatgcatgcattgattatttatgatgacttatctaaacaggcggttgcttacaggcaaatgtcacttttattgagaagaccacctggtagagaagcatatccaggagatgttttttatttacacagcaggttacttgaacgagccgctaaacttaatgatgataatggagggg

SEQ ID NO: 272672 - DNA, 814 bp, Unknown
  Bacterial polypeptide expressing nucleotide sequence isolated from the Sargasso Sea
ttcagatccagcgccaatgcaatttcttgctccatatgctgccgctgctatgggtgagttttttagagataatgaaatgcatgctgtagttgtttatgatgatttatcaaaacaagctgtcgcttacagacaaatgtcacttcttttgagaagacctccaggaagagaagcttatccaggagatgttttttatttacactctcgtttattagaaagagcagcgaaattgaatggagataatggatctggttctttaacagcccttccaattattgaaacacaaggtggtgatgtttcagcttttattcctacaaatgtaatttcaattacagatggacaaatatttttagaaacagagttgttttataaaggaataaggcctgcagttaatgttggtttatcggtatcaagagtaggttctgctgctcagattaaagctatgaaacaagttgctggtacaattaagctcgatttagctcaatatagagaaatggcagcatttgctcaatttgcctcggatatggatgcttcaacaagacagttattgtcaaggggagagagattaaccgaattactcaaacaatcacaatattcaccaatggaagtagaagaacaagttgcagttatttttgcaggcgttaaaggttatttagaccagataccaactcaaaagattggtgaatttgagcaatcacttcttcaaaaattaaaagctaaagactcgaaaatactagatgttattagaaaagacaaagctatttcagatgaaacagaaaaagcccttaaagatactttagatcagttaataaagaat

SEQ ID NO: 272673 - DNA, 724 bp, Unknown
  Bacterial polypeptide expressing nucleotide sequence isolated from the Sargasso Sea
atgcaaattaatccatcagaagttacaaaaattttaaaagaacaaataaaaaaatttggtgaaaaagcagaagtaactgaagtcggacaagtactatccgtcggtgatggtattgcaagagtttacggtttagataatgttcaagctggagaaatggtagaattttctggaggattaaaaggtatggccttaaatctagaaaacgacaatgtgggagtagtaatttttggcgatgacagatcaattaaagagggagatgttgtaaaaagaacaggatctattgtagacgcgccagtaggaaaaaatttattaggtagagtagttgatgcgttaggtaatccgatagatggtaaaggtgatttagataaaaaaatagaaaggcgaagagttgatgttaaagcaccaggaataattcccagacagtcagtaaatcagccaatgcaaacaggactaaaagctattgatagtttaataccaataggaagaggacaaagagaattaataataggagataggcaaacaggaaaaactgcagttgcaatcgataccattattaatcagaaagaagttaataaaactagtgaggaaaaaaataaactttattgtatttatgttgctataggacaaaagagatcaaccgttgcacaaattgtgaaagcattagaagatgctggtgctatggagtatacaactatagtatctgccacagcatctgatcctgctc

SEQ ID NO: 272674 - DNA, 897 bp, Unknown
  Bacterial polypeptide expressing nucleotide sequence isolated from the Sargasso Sea
aatggctaatgcaaaaggtaaaatcacccaagtgatcggcgctgtggttgatgtgcaatttgaagaccatcttccagaaattttaaatgccttgactactgataacaatggtaaaaaattagttttggaagttgctcaacacttgggtgaaaatacagttcgaacaattgcaatggatgcgtctgaaggtttagttagaggacaagaagttgttgatacggcgggtccaatatctgttccagtaggcaacgccactctaggcagaattcttaacgtcgtgggtgaaccggttgacgagcagggtccagtaaaggccaaggaatcaagagctattcaccaaccagctccagaatttaatgaacagtcaacggagtcagaggttctagtaactggcatcaaagttatcgatctcctcgcgccttattcaaaaggtggtaaaattggcctttttggaggtgctggtgtgggtaaaacggtattgatcatggagttgataaacaacattgcaaaagtccattcgggcttttctgtttttgctggcgttggagagcgaacacgagagggaaacgatttatatcatgaaatgatcgaatctaatgttattaagccagacaacttagaagagtctcaggtggctctagtttacgggcaaatgaatgaacctccaggagcgagagcgcgggttgctttgactggattaaccttggctgagcaatttcgggatcagtccggtacagatgtgcttttcttcgtcgataatatctttcggtttactcaagcgggttctgaggtgtcagcgcttcttgggcgaatcccatcagctgtgggatatcagcctactctggccactgatatgggtgccatgcaagaacgtatcacttcgactaagaacggttt

SEQ ID NO: 272675 - DNA, 799 bp, Unknown
  Bacterial polypeptide expressing nucleotide sequence isolated from the Sargasso Sea
acagctaggaaataacacggtaagaactctatccatggggattagtgacggccttcagagagggcaaacagtcctgagtaccggcggaccaataaaaacgcccgttggaaagtgtatgctaggccgtatcgtgaatgtactgggggaaaaaattgatgacggagatccgatcaaagcacaaacatatgcttcgatacacagccctgctccaaagctccccatgctcaatccaagtaccgatatactgtcaacaggtatcaaagtcattgacctgatgtgcccaattgcaaaaggaggaaaagtcggttgttttggaggcgctggggttggaaaaacagtgattatgcttgagctaattcgaaacattgcagtggagaccaaggggttatctgtctttgccggcgttggtgaaagaactcgagaggggaatgacttttttcatgaaatgatcgcgtctaaagtgattgataagactgctctggtgtatgggcaaatgaacgagcctccaggaaatcgcttaaggacagccaatacagcattgacgattgctgagcatttccgagaccaaggaaacgacatacttgtgttcatagacaacatattcaggttcactcaggcaggaagtgaagtttctgcactgttaggaagaatgccttcagccgtgggctaccaaccaacacttgcagaagaaatgggtaaacttcaagaaaggatagcctcaacaaaagatggttctatcacatcagtacaagccatttatgtacccgcagacgacctcacggacccatctccggcaaca

SEQ ID NO: 272676 - DNA, 733 bp, Unknown
  Bacterial polypeptide expressing nucleotide sequence isolated from the Sargasso Sea
gcggagcggatccgacaggtaatcggccatctggcctttgccaacccggaataccgtcatccgttcatggtagagcgtccggtcaagcgtgtcggctacatcgtcgtgtcgaccgatcgtggtctttgcggtggcctgaacatcaacctgttcaaggtcctgatcaagaacatgaaggagtggcacgatcagaaggtcgaagtcgacctctgcgtgatcggcaacaagggcgcgagcttcttccgcagcttcggcggcaacgtcgtcgcagcgatcggcaacctcggcgaagagccgtcgatcaatgatctgatcggcagcgtcaaggtcatgctggacggcttccacgagggccgtatcgatcgcttgtacctggtatccaacaagttcatcaacaccatgacccagaagcccacggtcgaccaactgctgccgctggctgcagatgagaacgccgagccggtcaagaaaggtcagtgggactacctctacgagccggacgcccagcagttgctggatgctctgctggtacggttcatcgagtcccaggcctatcaggcggtagttgagaacggcgcagccgaacaggccgcgcggatgattgccatgaagaacgcaaccgacaacgccggtgagctgatcggcgacctgcaactggtctacaacaaggcccgtcaggctgcgatcactcaggaaatttcggaaatcgtcggcggcgctgccgcggtttaag

SEQ ID NO: 272677 - DNA, 906 bp, Unknown
  Bacterial polypeptide expressing nucleotide sequence isolated from the Sargasso Sea
ctttcagttggagatggtattgctagagtatacggtcttgataatgttcaggccggtgaaatggttgaatttaaggacggttcaaaggggatggctttaaacctagagagtgacaacgttggtatagtaatttttggtgatgataagggaattaaggagggcgatacagtcaaaagaaccggcgctatagttgatgtaccagttggaaaagaactattgggcagagtagttgatgcgttgggaaacccaattgatggtaaagaaccattaaaaaaaggtattaaaagacaaagagttgaagtaaaggcacccggaataattcctagaaaatcagttaacgaaccaatgcaaacaggattaaaggcaattgacagtttaattccagttggcagaggtcaaagagaattaattattggtgacaggcaaactggaaaaactgctgtagctattgacactatcattaatcagaaaaaaataaatgagtctgatgacgaaaaaaagaaactttactgtatatatgttgctattggtcaaaaaagatcaactgttgcacaaatattaaaaactttgcaagacgcaggtgcaatggaatataccattattgtttcagctactgcctctgaccccgcacctttgcaattcttagcgccctatacaggctgtacatttggcgaattttttagggacaatggcatgcatgcattaattatttatgatgatttgtcaaaacaggcggttgcttatagacaaatgtctctattattaagaagaccacctggtagagaagcctacccaggagacgttttctatctacatagtagacttcttgaacgtgcagcgaaactcaatgaagataatggaggtggatcactaacagctcttccaattattgaaacccaagcggga

SEQ ID NO: 272678 - DNA, 943 bp, Unknown
  Bacterial polypeptide expressing nucleotide sequence isolated from the Sargasso Sea
gggactaaaaagaggagatgaggtagttaatactaatgcaccgattaaagttcctgtaggacctgaaactttaggtagaattattaatgttattggtgaacctattgatgaaagaggcgcagttaaaacaaaagaaagctggcctattcatagacctgcacctgaatttaatgatcagtcaaccgaaacggaaattttagttacaggtataaaggtaattgatttgttggcaccttatgccaagggtggaaaaattggattatttggaggagcaggagttggaaaaactgttttgattatggaattaattaacaacgttgctaaagcacatggaggcttttctgtttttgctggcgttggtgaaagaactagagaaggtaatgatctttatcacgagatgatagagtctggtgtaatcaaaaaagatggtgcagggtcaaaggcggcattagtatatggtcaaatgaatgaaccaccaggtgctagagccagagttgcccttacaggattgactgtagctgaatattttagagatcaagaaggccaagacgttcttttctttgttgataatatttttagatttacacaagctggttctgaggtatcagcacttttaggaaggataccctcagcagttggttatcaacctactttggcgactgatatgggtaacttgcaagaaagaattacgacaacaaataaaggatcaattacttctgtacaggctatttatgttccagcagatgatttaactgatccagcacctgctacttcatttgctcacttagatgcaactacagtgctttcaagacaaattgctgaaattgggatctatccggcagtagatccattagactctacttctagaattcttgatccaagaatagttggtgatgaacattacagagttgctagagaggtcaaaaagttcttcaacatataa

SEQ ID NO: 272679 - DNA, 868 bp, Unknown
  Bacterial polypeptide expressing nucleotide sequence isolated from the Sargasso Sea
atggatatcaatccttcagaagtcacaaaaatattaaaagaacaaatcaaaaattttggtgaaaaagctgaaatttctgaggttggtcaagttttatcagttggagatggtatagctagaatttatggcctagacaatgttcaggctggtgaaatggtagaattttctgatggatcaaaaggtatggctttaaatttggaaagtgaaaatgtaggtgttgtaatttttggagatgatcgaaatattaaagaaggagatgtagtaaaaagaactggaagtattgttgatactcctgttggaaaagaattattaggaagggtcgtagatgggttgggaaatccaattgatggaaaaggaccattagacaaaagtgttaaaaaaagtagagttgaagttaaggctcccggtatcattccaagacagtctgtaagcgaaccaatgcaaacaggtttaaaatcaattgatagtctagttccgattggaagaggtcaacgagaattaattattggagatcgacaaactggtaaaactgcagttgcagttgatacaatcataaatcaaaaaaagataaatgagtccggagatgaaaaacaaaaactttactgtatttatgttgcggttggtcaaaaaagatcaacagtaagacaaattcaaaaaactttagaggaagctggtgcaatggaatatacaactatagttgcagcaacagcatcagactcagctccacttcaatttttggctccttacacgggttgtgcaatgggagaatattttagagataatggaatgcatgctctgataatttatgatgatttatctaagcaagcagttgcttaccgacaaatgtcattgatcttaagaagaccgc

SEQ ID NO: 272680 - DNA, 868 bp, Unknown
  Bacterial polypeptide expressing nucleotide sequence isolated from the Sargasso Sea
tggactcaaatcaattgatgcaatggttccaataggaagaggtcaaagagagctcattattggtgacagacaaaccggaaaaacagctgtagcaattgatgcaatcattaatcaaaaaggcacaggaattaagtgtatttatgtagctattggtcaaaaacaatcaacaatagctaatgtcgtagcaaaacttgaagagtatggagcaatggagcacacaattgttgtttcagcggccgcagctgacccagcggcgatgcaatacctctcagcatattcaggttgtgcaatgggagagtattttagagacacaggccaggatgcattaattgtttacgatgatttatcaaagcaagcagttgcttacagagagatatcactattacttagaaggcctccaggaagagaagccttccctggagatgttttttatcttcactcaagacttttagagagagcagctagagtaaacgcggaatacgtagaaaaaattacagagggaaaagtaaaaggtaaaacaggatctctaacagctttaccaattattgaaacacaagccggagatgtatctgctttcgttccaactaatgtaatttcaatcactgatggacagatatttctagaaacagatctttttaattcaggtgtcagaccagctattgatcctggactttctgtatcaagggttggtggagctgcacaaactaagataattaaaaaacttagtggtggaattagaacagaccttgctcagtacagagagcttgcggcattctcacagtttgcatctgatctagatgatgcaacaaaagaacaattagaacacggtaagagaattaccgagcttcttaaacaaaaacaatatctc

SEQ ID NO: 272681 - DNA, 952 bp, Unknown
  Bacterial polypeptide expressing nucleotide sequence isolated from the Sargasso Sea
agattatttctggagctgaatcaatataaagggggatatatggctaacaatttaactggaaaaatatcacaagttcttggagctgttgttgatgtagagttcgatggtgaacttcctgcaattatgaacgctcttaaagttgataacaacggaacaagattaatgctagaagttgctcagcatttaggagaaaacgctgttcgtacaattgctatggatacaacagatggactagttagaggtcaaacagctactgatacaggtgcccccatttcaatgccagtaggaccggaaactttaggtagaattatgaatgttgtaggagagccagttgacgaaagaggtgacattggaacaagtaaatcttatcccattcatagaccagcgccagagtttgttgatcaatcaacagaaactgaagtcctagtaacaggaattaaagttgttgatctactagcaccgtatgcaagaggtggtaaaattggattatttggtggagctggagttggtaagacagttttaattatggagctaattaataatattgcaaaggcacatgggggatattcagtattcgcaggtgtgggagaaagaacacgtgaggggaatgacctgtaccacgaaatgattgaatcaggaattatcgacttaaaaggtaaggattcaaaagttgcactcgtttatggacaaatgaatgagccaccaggagcaagagctagggtagccttatcaggtttaactcaagcagaatattttagagatgaagaaggtcaagatgtgttattcttcgtagataacatttttagatttactcaagcaggctcagaagtgtcagcacttttaggccgtattccatcagctgttggatatcagccaacacttgccacagatatgggcgcattacaggaacgaattacaactacaaaaaaaggatctatcacttcagttcaag

SEQ ID NO: 272682 - DNA, 590 bp, Unknown
  Bacterial polypeptide expressing nucleotide sequence isolated from the Sargasso Sea
tatggatattaatccttccgaaataacaaaaattttaaaagaacagattaaaaatttaggagataagactgaagtttctgaaattggtaaagttttatcagtcggtgatggtattgccagagtatatggtcttgacaatgttcaggctggagaaatggttgagttcaaagatggcttaaaaggaatggctttaaatttggaaagcgataatgttggaattgtaatttttggtgacgataaatcaatcaaagagggagatactgttaaaagaacaggagcaattgttgatgttccagtgggaaaagaattacttggaagagtggtcgatgcattgggaaatccaattgatggaaaagaagctttaaaaaagggagttaaaagaaaaagagttgaggtaaaggccccaggaataattccaagaaaatctgttagcgaaccaatgcaaacaggattaaaagctatcgatagcttaattccaattggaagaggacagcgtgaattaattatcggggacagacaaacaggaaaaactgctgtagccattgatacaattatcaatcaaaaaaaaataaacgaatctaatgatgaaa

SEQ ID NO: 272683 - DNA, 394 bp, Unknown
  Bacterial polypeptide expressing nucleotide sequence isolated from the Sargasso Sea
cctttagactcaacatcaagaatacttgatccaagaattgttggagaagaacattatagagttgcaagatctgtccaaaaaattttacaaacatataaatctttacaagacataatagcaattctaggaatggacgagctatcagaagaagataaattgacagtagcaagagcaagaaaaattcaaagatttttatctcaacctttttttgtagcggaagtttttactgggtccccaggaaaacttgtcgatttagactcaactattaaaggatttgatgcaatatgtaagggtgaatatgatcatttacctgaggcagctttttatatggttggtacaatcgaagaggtagttcaaaaagctgaaaaaatggctaaggaagcagcagcctaaa

SEQ ID NO: 272684 - DNA, 616 bp, Unknown
  Bacterial polypeptide expressing nucleotide sequence isolated from the Sargasso Sea
ggatcaatctttatcagacgatcttcttgaaacaggcatcaaggtcattgatttgatatgcccttttgcaaaaggtggaaaaattggtctatttggaggagctggagttggtaagacagtcaacatgatggagcttattaacaatattgcaaccgagcattctgggctttcagtttttgcgggggttggtgaaagaacccgtgaaggaaacgacttctattatgaaatgcaagaatcaggagttgttaacgtcgagaagccaagcgaatctaaagttgccatggtgtatgggcaaatgaatgagccccctggaaataggcttagagttgccttaacagggttaacaatggctgaaaaatttagggatgagggaagagatgtactattgtttatcgacaatatttatcgttacacccttgctggagttgaggtttctgccctgttaggaagaatgccatcagctgttggttatcagccaacattggctgaagaaatgggtgctttacaagaaagaattacctcaacaaaagacggctctattacttcaattcaagccgtatatgttccggccgatgatttacagaccccatcccagcaacgacatttgctcacttag

SEQ ID NO: 272685 - DNA, 850 bp, Unknown
  Bacterial polypeptide expressing nucleotide sequence isolated from the Sargasso Sea
aaagctcatggtggattttccgtatttgcaggcgtaggagaaagaactagagaaggtaacgatctttatcatgagatgattgagtctggagtaataaagacagagggtaaaggatcgaaggcggcattagtttatggtcaaatgaatgaacctcctggagcacgtgcacgtgtcgctcttacaggtttaacagttgcagaatactttagagataaagagggccaagacgtactattctttgttgataatatttttagatttacccaagctggatcagaggtttcagctttattaggaagaataccatctgcagtaggatatcaaccgacactggcaaccgacatgggtaacttacaggaaagaattacatctacagataaaggatctattacatctgttcaggcaatatatgtacctgccgatgatttgacagatccagctccggctacttcattttctcacttagatgcaaccacagttttatcaagacagattgcagaaataggtatttatccagcagtggatcctttagattctacatcaagaattttagacccacgaatagttggagaagaacattacagagtagctagagacgttcaaaggatattacaagcatataaatctttacaagatattattgcaattttaggaatggatgagctttctgaggaagataaattaacagtagcaagagctagaaagatacaaaggtttttatctcaacccttctttgtagcagaggtattcactggttctccaggcaagttggtagatttagagtcaacaattaaaggatttgatgcaatatgtaagggagaatatgaccacttaccagaagcagcttttt

SEQ ID NO: 272686 - DNA, 895 bp, Unknown
  Bacterial polypeptide expressing nucleotide sequence isolated from the Sargasso Sea
ttgaatcctcagacactagacttattgaaacaattgcaccagggaattgttgccagaaaatcagtacatcagccaatgcagaccggacttaaagcaattgactcaatggtcccaataggtcgtggacagcgtgaattgataataggagatagacagacaggaaaaaccgcaattgcaatagacactatcatcaaccaaaaaggtggtgatgtgatctgcatatatgttggaattggccagaagcgctcaaccatggcccagattgttcaaagactggaaaatgaaggcgcaatggaacatacaatcgtcgtttcctcaaccgcttctgagcctgcgccactacagttcctagctccgtattccggagtaagcatcggtgaatatttccgagataagggtggacacgtactttgtgtttatgatgatctttcaaaacaggctgtagcctatcgacagctttcacttctactgcggcgcccaccaggacgggaagcatatccaggtgatgttttttatctgcacagtcgcttgctggaaagagcctgcaaactaagtgatgaacttggcgcaggttcactgacagcactaccgattattgaaacccaagctggagatgtttcagcatacattcccacaaacgtgatttcaattactgatggacagatttttctgagtacagaccttttcaattccggagttcgtccagcaattaacgttggtctgtcagtgtctcgagtaggtggtgctgctcaagttaaagcagtgaagcaagttgctggaacattgcgtcttgaccttgcacagtacagggaaaaagaagcctttgcccaatttggtagtgacttggaccaggctacccaaaaacagcttcaacgtggacaacgcctggtagaaa

SEQ ID NO: 272687 - DNA, 463 bp, Unknown
  Bacterial polypeptide expressing nucleotide sequence isolated from the Sargasso Sea
tttctctccttggatgccacaacagttttgaacagagcaatttctgaaaaaggaatttatcctgcagttgaccctcttgattcaacatcaagaattttagatccacaagttgttggtaatgatcactacagagtggcaagagaagtgcaaagagttctacaaacttacaaaagtcttcaggatatcattgctattcttggaatggatgaattatcagaggaagataaattgacagttgcaagagcaagaaaaattgagaaatttttaagccaacctttctttgttgctgaaatctttactggatcaccaggaaagtatgttgatcttgaagatacaattaaaagttttgatggacttgttaaaggtgaatatgatcatatgccagaagcagccttttatatggttggtggtatggatgaagctattgaaaaagctaagaaattagaagctgaagcagcataat

SEQ ID NO: 272688 - DNA, 289 bp, Unknown
  Bacterial polypeptide expressing nucleotide sequence isolated from the Sargasso Sea
gaactgcaagatattatagctatacttggaatggaggaattatcggaagatgataaacttgcagtagcaagagcaagaaaagtacaaagatttttatcccagccttttcatgttgctgaacagtttactggtattccaggtgttcttgttgatataaaagatactataaaaggatttaatatgataatggatggagaacttgatcatcttcctgaagctgcttttaatttaaagggaaatattgaggaagcaattgcagccggagaaaaaatgttgtctgaagcttaga

SEQ ID NO: 272689 - DNA, 577 bp, Unknown
  Bacterial polypeptide expressing nucleotide sequence isolated from the Sargasso Sea
atgggaaatttgcaagagagaatcacaaccactggaaagggatccatcacttcagtacaagccatctatgtgccagcagatgacctgacagaccctgctccagctacgtcattctcacatttggatgcaacaacggttctttcaagacaaatagctgaactaggaatttatccggccgttgatccacttgattctacttctagaatcttagatccaagaattttgggggaggaacattatagagtagctagacaagttcaaaaaatcttgcaaacatacaaatctctacaagatataatcgcaattttaggtatggatgagctttctgaagaggataaactgactgttgcacgagcaagaaaaatacaaagatttttatcccaacctttttttgtagcagaagtatttaccggaacaccaggtaaacttgttagtttggatgctactattaagggtttcgattcgatttgcaagggagagtacgatcacttgcccgaggcagctttttatatggtaggcactattgaagaggctattgcaaaagcagaaaaaatggcaaaagaagctgcagcttaaa

SEQ ID NO: 272690 - DNA, 598 bp, Unknown
  Bacterial polypeptide expressing nucleotide sequence isolated from the Sargasso Sea
agtgaagagcttggtggaggatcactaactggtctcccaattattgagacaaaagccggtgacgtttcagcattcattccaactaacgtgatttctattacagatggccagatttatttggaatcagaactcttttattctggtgtgagacctgctgtaaacccaggtacatcagtatcaagagttggtggtgcagcacagactaaggctatgaaaaaagtctctggtcctttaagaattaaccttgcacagttcagggagttagaggcatttgctgagttcggatctgacttagacgcagcatctcaagcacagcttgatagaggtagaagagttgttgagttgttaaaacaaccacagtatcaaccagtacctatggaagagcaagtggtttcactttacgcagtaacagaggggttccttgatgtagtagatcctgctgatattccacaagctgagcaagatttgattgagtttgtaaaaacaagacactctgatgttattaattcaattaaaacaactggtgagttgcctgtagatgaattaaaagctgctgttgaggctttcgtaagtacattggagaaaaaagaagagtaaa

SEQ ID NO: 272691 - DNA, 843 bp, Unknown
  Bacterial polypeptide expressing nucleotide sequence isolated from the Sargasso Sea
tcgaatttccccggtggcattaaggggatggctctgaacctcgagaccgataatgtaggtgtcgtgatttttggagacgaccgaaacattcgcgaaggcgatacggtgaagcgtacaggggctatcgtcgacgtgccagtaggcaaaggcttactcggccgcgtcgttgacggtctcggcaaccccatcgatggcaagggtcctattgaagacgccaagcgcatgcgcgtcgaagtgaaggcgccgggcattattccccgaaaatcagttcacgagcccgtgcagaccggccttaaggccatcgactcactgatccccgtcggccgcggccaacgcgaactgataatcggtgaccgtcagacggggaaaacagcggtgatcattgacaccatcctcaaccagaaagccgcgaacgaaggtgacaaggaatctgagaagctctactgcgtctatgttgctatcggtcaaaaacgttccaccgttgcgcagctagtgaagacgcttgaggacaacgatgcgatgaaatattccattgtcgtcgccgcgactgcgtccgagccggcaccactgcagttcctggcgccctacacgggctgcaccatgggtgagtactttcgcgacaatggcatgcacgcctgcatattctatgatgatttgtcgaagcaggctgtggcctatcgtcagatgtcactgctgctgcgccgcccgccgggacgcgaagcctatcccggtgacgtcttctatctgcactctcgcctgcttgagcgcgcggccaagatgggcgacaaagccggcaacgggtccctgacagccttgccagttatcgaaacccaggccggtgac

SEQ ID NO: 272692 - DNA, 871 bp, Unknown
  Bacterial polypeptide expressing nucleotide sequence isolated from the Sargasso Sea
gctccaattaaagttccagtaggtcctgagactctcggaagaattataaatgtaataggtgagcctatagatgaaagaggagaagtaaaaagttcagataactggccaattcatagagcagcaccagaatttaatgatcaatcaacagaaactgaaatattagtaaccggaataaaagtcattgatctattagcgccttatgcaaaaggtggaaaaattggcttatttggtggagctggtgttggtaaaactgttttaattatggaattgattaataatgtagcaaaagctcatggtggattttcagtttttgctggagtgggagaaagaactagagaaggaaacgacttatatcatgaaatgattgactctggcgtaattaaaactgatggagaaggttctaaagcggcattagtttacggacaaatgaatgagcccccaggagctagagctagagtagctttaaccggattaactgttgctgagtattttagagatcaagaaggtcaagatgtgctattctttgttgataatatttttaggtttactcaagcgggatctgaagtttcagcattattaggcagaataccttctgctgtaggatatcaaccaacattagcaacagatatgggtaaccttcaggaaagaattacaacaacgaataaaggatcaattacatctgtacaagcaatttatgtgcccgcagatgacctaactgaccctgcgcctgcaacttcatttgctcacttagatgcaactactgtactttccagacaaattgcagaaataggaatttatccagctgttgaccctttggattcaacttcaagaattctagatcctagaatagttggagatgaacattatagag

SEQ ID NO: 272693 - DNA, 748 bp, Unknown
  Bacterial polypeptide expressing nucleotide sequence isolated from the Sargasso Sea
agaatctggagtaataaaacttgatactgatgaatcaaaagcagcattggtttatggtcaaatgaatgaaccacctggtgcacgcgcaagagttgcactaactggtttaacattagcggaatactttagagatgaagaaggacaagatgttcttctttttgtagataatatttttcgtttcactcaagcaggttcagaagtttcagcattacttggaagaattccatcagcagttggatatcaaccaactttatctactgatatgggtgcacttcaagaaagaataacatcaactaataaaggatcaattacatcagtacaggctatttatgttcctgcggatgatctaacagaccctgctccagcaacatcttttgcacatcttgatgctacaactgttttatcaagacaaatagctgaattaggaatttatcctgcagttgatccactagactcaacttctaggattttagatccgagaataattgggcaagagcattattctgtagcaagaaaagttcaagagactttacaaaaatataaatctctccaagatataattgccattttgggtatggatgaattatcagatgaagataaattagtcgtagatagagcaagaaaaatacaaagatttttgtctcaaccatttcatgtggcagaagtatttacaggaacacctggagtttttgttggtttgcaagatacaattaagggttttaaagggcttgtgaaggtgaatttgata

SEQ ID NO: 272694 - DNA, 786 bp, Unknown
  Bacterial polypeptide expressing nucleotide sequence isolated from the Sargasso Sea
gatgcagacgggcgtcaaggccgtcgactccatgatccccatcggccgcggccagcgcgagctcatcatcggcgaccgcaagaccggcaagaccgccgtcggtgtcgacaccatcatcaaccagaagcgatactggggcacggacgacgccgtcgtctgcatctacgtcgccgtcggtcagaaggaatcgaccgtcgcgggcgtggtggaagccctccgcgagaacggcgctcttgagtacaccatcgtcgtctccgcctccgcgtccgaccccgcgccgatgtcctacatcgcgccgtacgccggctgcgccatgggcgagtatttcatgtgggccggcaaggacggcaagacgcccaagcacgcgctgctcgtctacgacgacctctccaagcaggccgtcgcctaccgccagctctcgctcctcctccgccgcccgccgggccgcgaggcgtacccgggcgacgtcttctatctccactcccgcctcctcgagcgcgccaccaagctctccgacgagaacggcggcggctccctgaccgccctgcccatcatcgaaacacaagaaggcgacgtctcggcgtacatcccgacgaacgtcatctcgatcaccgacggccagatctacctcgagcccgagctcttcttcgccggccagcgccccgccgtgaacgtgggtatctcggtctcccgagtcggcggcaacgcccagatcaaggcgatgaaacagatcgccggctccctccgcctcgacctcgccgccttccgcgaactggaagccttcgc

SEQ ID NO: 272695 - DNA, 632 bp, Unknown
  Bacterial polypeptide expressing nucleotide sequence isolated from the Sargasso Sea
attactaggaagaattccatctgctgtaggataccaaccgacattagctactgacatgggcaacctacaagaaagaattacgactactaataaaggttctattacatctgtacaagcaatatatgtacctgcagatgatttaacagacccagcaccagctacatctttttcgcacttagatgcaacaacggtgttatccagacaaatagcagagattggaatttatccagctgtagatccacttgattcaacttctagaattttagacccaagaattgttggagatgaacattatagggttgctagggaagttcaaaaagtattgcaaacttataagtctttacaagatattattgccattttaggtatggacgaattatctgaagaagataaactaactgtagctagagctaggaaaattcaaagatttttatcccaaccattctttgttgcagaagtttttacaggctctcctggaaaattagtagatttagaatctacgattaaaggttttgatgctatttgcaaaggtgaatatgatcacttaccagaagctgctttttatatggtaggaacaatcgaagaggcaattgaaaaagctgaaaaaatggcaaaagacgctgccgcataat

SEQ ID NO: 272696 - DNA, 394 bp, Unknown
  Bacterial polypeptide expressing nucleotide sequence isolated from the Sargasso Sea
acaaccaatagatgggaaaggggaaattccaacaagtgatactagattgattgaagaaatggctcctggaataatcaagaggagatcagtgcatgaaccaatgcaaacaggtatcacatctattgatgcaatgattcctgttggaagaggtcaaagagaattaattattggtgatagacaaactggaaaatctgcgattgcaatcgacacaataatcaaccaaaaaggtcaagacgtagtttgtgtttacgtagcaattggtcagaagtcagcatcagtagcaaacatcgttgaggtcttaagagagagaggagctctagattatacagtcgtagttagtgcaggagcgtcagaaccagctgctttacagtacttagcaccttataccggtgca

SEQ ID NO: 272697 - DNA, 793 bp, Unknown
  Bacterial polypeptide expressing nucleotide sequence isolated from the Sargasso Sea
atggcaacagcaatcgcctctgacaaaaagaatggcaaagtcacacaggtcattggatcaacatttgacgttgagtttcctgaatcttctctgccggcaatttacaatgcagttcgaattgatgccgatcacaagggcgtcaaacttgagctagttggtgaagtacagcagcaccttgggggcggaaaagtccgttgcgtggcacttggctcaacagatgggcttatcagaggacaagaagttgttgataccggatcaccagtaagcgtgcccgttggacccgctacccttggccgggtttttaacatgcttggagaaccaatcgataatggtggcgaagtaaacgctgatgagcggtggtctattcatcgagacgccccacctatttctgaactctctacaaaaacagaacttttcgaaaccggcattaaggtcattgatcttctcactccattcgttcgaggtgggaaagcgggattatttggcggtgccggcctcggtaaaaccgttatcttgaccgaactgattgcaaggatcgcaagcgctcacggcggaaattcagtctttgctggtgttggagaaagaacacgagaaggaactgacctctggcttgagatgcaagatgccaaaattggtgacaccggacgaagcgtcattgaacaaacctgcatggtctttggccagatgaatgaaccaccaggcgcgagattgcgagttgcactttctgccctgacaatggctgagtatattcgtgacacgactggaacggatacgcttctgttcgtagacaaca

SEQ ID NO: 272698 - DNA, 424 bp, Unknown
  Bacterial polypeptide expressing nucleotide sequence isolated from the Sargasso Sea
agctgagcttggaatttatccagcagtagacccgttagattctacttcaagaattttggatccaagaattgttggcgaagaacattatcgagtagcaagacaagttcaaaaaattttacaaacctataagtctttacaggatataatagctattcttggtatggatgagctttcagaagaagataaattgactgtagctagggctagaaaaatacaaagatttttgtcgcaacctttctttgtggcagaagtatttaccggaactcctggaaagttagttaatttagattccacaatcaaaggtttcgatgccatctgcaagggtgattatgatcatttacccgaagcagcattttacatggttggaacaatagaggaagccttagccaaagcagaaaaaatggcaaaggaagcagcagcataa

SEQ ID NO: 272699 - DNA, 520 bp, Unknown
  Bacterial polypeptide expressing nucleotide sequence isolated from the Sargasso Sea
atgagcaaaggaacaattacacaagttattggagcagtagtagatgtaaaatttgaaggagatcttccagaaattttaacagcattagaatgtaaaaatggagataatagactagttttagaagttgctcagcatttaggagaatctacagttagaactattgctatggatgccaccgaaggattaaaaagaggtgatgaagtaatgaatactaactctccgataaaagttcctgttggtcccgaaacacttggaagaattataaacgttattggagaaccaattgacgaaaaaggagaagttaagactaaggaaagttggccaattcatagacctgctccagaatttaatgaccagtcaacagaaacagaaatacttgttacaggtattaaagtaattgatttacttgcaccttatgcaaaaggaggaaaaattggattatttggtggagctggtgttggaaaaacagttttaattatggaattaattaataacgttgctaaagcgcatggtggatttt

SEQ ID NO: 272700 - DNA, 916 bp, Unknown
  Bacterial polypeptide expressing nucleotide sequence isolated from the Sargasso Sea
ttgtatttatgtagccgtggccaaaagagatctacagtaaggcaaattgaaaaaacattagaagaagctggcgctatggaatatacaacaatagtagcagcaacagcatcagatgctgcgcctttgcaatttttagctccatacactggatgtactatgggtgagtattttagagacaatgggatgcatgctttgattatatatgatgatttatcaaaacaagctgttgcatatagacaaatgtcacttctattaagaagaccccctggaagagaagcatatcctggagatgtattttacttacatagtagattattagaaagagctgcaaaattaagtgatgagcatggtggaggatcattaacggctcttccaatcatcgaaacccaaggtggagatgtttctgcattcataccaacaaatgttatttcaattactgacggtcaaatatttcttgaaacagagctttttaaccaaggaataagacctgcgataaatgtcggattgtctgtatcaagagttggatcatctgcacaaactaaagcaatgaaaaaagtctcaggatcaatgaaattagaacttgcacagtatcgtgaaatggcagcgtttgcacaatttggttcagatcttgatgcatctacccagaaattacttaacagaggatcaaaattaactgaacttttaaagcaggatcaatattctccaatgacagttgcagaacaagtcatttctgtattttgtggagttagaggacatcttgatgatattgaacaaaaggatatttcaagttttgagaataaaattattgaaaaatgcaaagctgaaaagccagatataattgagtcaatcacagcttcaggaaaacttgaagatgacaaagagaaagaattgaatgaaattattttacaacttaaga

SEQ ID NO: 272701 - DNA, 379 bp, Unknown
  Bacterial polypeptide expressing nucleotide sequence isolated from the Sargasso Sea
aatgagaaaaggaaaaataacacaagttattggagcagtggttgacgtaaaatttgaaggagaacttcctgagatcttaacagctttggaatgtaaaaatgatggaagtagactagttctggaggttgctcaacatttaggagagtcgagtgttagaacaattgcaatggatgcaacagaaggattaaaaagaggcgacgaggtcattgatacaggtgctccaataaaagtaccagtaggtccggaaacgctcggaagaattacaaatgttgttggtgaacctatcgatgagaagggcgaagtaaaaactaaggaaaattggccaataaatagagcagctccagagtttaatgatcagtcaacagaaactgaaatacta

SEQ ID NO: 272702 - DNA, 859 bp, Unknown
  Bacterial polypeptide expressing nucleotide sequence isolated from the Sargasso Sea
tatggagtatacaacaatcgttgctgctactgcatctgactctgctcctttacaatttttagcaccatacacaggttgtgctatgggagagtattttagagataatggaatgcatgcgttaataatttatgatgatttgtctaaacaagcagttgcttacagacaaatgtcattgctattaagaagacccccaggacgtgaggcttatcctggagatgtattttatctacatagtagattacttgaaagagcagctaaattaagtgatgaacatggtggtggatcactaacagcattgccaattattgaaacacaaggtggagacgtatccgcgttcattccaactaacgttatttcaattacagacggacaaattttccttgaaacagaactatttaaccaaggtataagacctgcaattaacgtgggtttatcagtgtctagggttggttcatcagctcaaacaaaagcgatgaaaaaagtttctggttcaatgaaactagagctagctcaatacagagaaatggcagcttttgctcaatttggatctgatttagatgcatctactcagcaacttttgaatagaggctctaagttaaccgaacttttaaaacaaaaacaatattcacccatgactgttgcagaacaagttatttcagtattttgtggagtaaaaggttatctggatgatattgatttaaaagacgttgctgaatttgagagcaagatcattgaaaaatgtaaatcagataagcctgaaattatcgagtcaattttaacttcaggaaaacttgaggaagataaagaaaaattacttgttgaggtaatcactcaattaaaaggaaattttaaatcttaa

SEQ ID NO: 272703 - DNA, 700 bp, Unknown
  Bacterial polypeptide expressing nucleotide sequence isolated from the Sargasso Sea
aatgcctagtttagatgatctaaaaaaaagaataaaaagtgtaaagtctactcaaaagattactaaagccatgaaaatggtagcagcagcaaaattaagaaaagcacaggaaagtgctgagaagggaagaccatatagtcaaaaattgcaaaatataattttgaacttaacaaaatctattagtgatccacagaatgctccaaaacttttagttggaacaggagaagataaaaaatatttgtgtgtggtattaactgccgacagaggtttatgtggaggatttaattctaatatatgtaaattagctaagacaaactttaaaaaaattataagtgagggaaaagaacttaaaattattactgtcggttctaaaggctatgatcaaataagaagagagtacggaaaacacgtaattaaaaagtttagctttaaagataaaaaaaatatcacttttaaagaagcaaacgaagtaggaaatgagattttatctctgtttaatcagaatgaatttgataaatgtattatattttttaataatttcaaaaatgtaatcacacaaattccacaagctcaacaaataatcccagcgcatacaaaaaatataaaagaaaataactttgaaaatttttcatatgaatttgaacctgaagaggatgaaattttagaagatttgttaccaaaaaatatttcaactccagtt

SEQ ID NO: 272704 - DNA, 959 bp, Unknown
  Bacterial polypeptide expressing nucleotide sequence isolated from the Sargasso Sea
tacagagggtcttaaaaggggagatgaagtaacagatacaggcgcaccaattaaagtaccagttggaccagaaactttaggaagaattataaatgtcattggtgaacctattgatgaaaaaggtgatgttaagagtaaagaaaattggccaattcatagggcggccccagaatttaatgatcaatctacagagactgaaatattagttacaggtattaaggtaattgatcttttagcgccatatgccaaaggaggaaaaattggattatttggtggtgctggtgttggaaaaactgtcttaattatggaattgataaataatgttgctaaagcacacggcggtttttcagtttttgcaggtgtaggagaaagaactagagaaggaaatgacctttatcatgagatgattgactcaggagttattaagccagagggcaaaggttcaaaagctgcattagtgtatggtcaaatgaacgagcccccaggagcaagagcaagggtcgcgttaactggattgactgttgctgagtattttagggatcaagaaggccaagatgtattatttttcgttgataatatttttagatttacgcaagctggctcagaagtttctgcattattaggtaggataccttcagcagttggatatcaaccaactcttgctacagatatgggtaacttacaagagagaattacgacgacaaacaaaggttcaattacatcagtgcaagctatttacgttcctgcggacgatttaactgatcccgcaccagcaacatcttttgctcacttagatgcaacaacagtattatcgagacagatagcagaaataggtatttatcctgcagttgatcctttagactctacttccagaatactagatccaagggattgtggtgatgaacattatagagtagctagagaagtacaaaaagtcttcagacatacaaatctttaca

SEQ ID NO: 272705 - DNA, 574 bp, Unknown
  Bacterial polypeptide expressing nucleotide sequence isolated from the Sargasso Sea
atggaaataaatccttctgaagttactaagatactaaaagagcaaataaaaaattttggaaacaaagctgaaattacagaggttggccaagttctatcagtaggtgatggaattgccagaatctatggacttgataatgttcaagctggagagatggtagaatttactgatggttccaagggcatggcattaaacttagaaagtgaaaacgttggtgtcgttatctttggtgacgataaagctatcaaagaaggtgacactgtaaaaagaacaggagcaattgttgatactcctgttggaaaagaattattaggaagagtagtagacggtttgggaaacccaatagatggcaagggagcattagataaaggagttaaaagaagcagagtcgaagttaaagctccaggaataattccaagaaaatcagtgagtgaacctatgcaaactggactaaaatctattgatagtcttgttccaattggaagaggacaaagagaattaattattggtgatagacaaactggaaaaacagcagttgcaattgatgcaataataaaccaaaaaaaaataaacg

SEQ ID NO: 272706 - DNA, 406 bp, Unknown
  Bacterial polypeptide expressing nucleotide sequence isolated from the Sargasso Sea
atgccaagtttagatgacctaaaaaaaagaatttctagtgttaaatcaacacaaaagattaccaaagctatgaaaatggttgctgctgcaaaacttagaagagctcaggaaagcgcagagaaaggtagaccgttctcagaaaaaatgaataatatcatcctaaatttaagcaaaactgtttcagataaagacagtgcttcaaaatttttagttggaactggaaaagatgacattcatctttgtgtagttataacagcagatagaggtttatgtggaggttttaatacaaacatatgtagaaaagctaaaaactattttgaaaaagtattaaaagaaggcaaaacactaaaaatttttactgtaggatctaaaggccacgaccaattaaaaagaggatatggtcaat

SEQ ID NO: 272707 - DNA, 763 bp, Unknown
  Bacterial polypeptide expressing nucleotide sequence isolated from the Sargasso Sea
gagaggtcaaagagaattagttatcggtgatagacagacaggtaaaacaactgtttgtattgatacaatcttaaatcaaaaagagttttatgatgcaggagagcctgttttttgtatttatgttgcgattgggcaaaaagcatcaactgtagcagcaatcgctaaaacactagaagataaaggagcacttgcttatacagtaattgttgcagctaacgcatcagacccagctccaatgcaagtttttgctccattttcaggagcttgtataggggaatattttagagacacaggaaggcctgcactaattatatacgacgatttatctaaacaggcagtagcatacagagaggtttcattacttcttagaagacctcctggaagagaggcttatcctggagacgttttttatctccactcaagattattagagaggtcagccaaagtggtgaatgatgataaggtagcaagtggaatgaatgatttaccagattcattaaaatcaaaagtaaaaggaggaggttcattaacggcattaccaataattgaaacacaagccggagatgtatcagcctatattccaacaaatgtaatttcaattactgatggtcaaatatttttggagtcagacttatttaactcaggtgtaagacctgcaattaatgttggaatatctgtatcaagagttggaggttctgctcaaattaaatcaatgaaaaaggttgcaggtacattaaaattagaccaagcacaatatagagaa

SEQ ID NO: 272708 - DNA, 871 bp, Unknown
  Bacterial polypeptide expressing nucleotide sequence isolated from the Sargasso Sea
aatggaaataaaagctgcagaaatttcttcagtaattaaggatcaaatatcaaactttgaagcaaaagcagatgtatcagaagtaggtactgtgcttagtgttggagatggaatagcacgtgtctatggtttagataaagtgcaggctggtgaaatggttgaatttccaggaggcattaaaggtatggctttaaatcttgaaatggataatgtcggggtatctatttttggtgatgatacaggtataaaagaaggggatactgttaaacgtacaggagaaattgttgatgtcccagttggaaaagaattattaggacgtgttgtagatggattaggtaaccctatcgatggaaaaggaccaataaaatctgaaaatagaagaagaattgaattaaaggctcctggtattatacctcgtcaaagtgtttctgaaccgatgcagactggaatcaaggctcttgatgcgcttgttcctattggaagaggtcagagagaattaattattggtgatagacaaacaggcaaaacagctgttgcgattgatactattctaaatcaaaaaactataaaccaatctaacaatgaaaaagataaattatattgtatttatgttgcaattggacaaaaaagatcaacagtagctcaaattgtcaaaacattagaagataatggagcaatggattatacaattgttgtttctgctactgcttctgaaccagcacctctgcaatttttatcagcatatactggctgcacaatgggtgaatattttagagacaatggaatgcatgctttgatagtatatgatgatttatcaaaacaagctgttgcttatagacaaatagtcattacttttaagaagacctccagg

SEQ ID NO: 272709 - DNA, 614 bp, Unknown
  Bacterial polypeptide expressing nucleotide sequence isolated from the Sargasso Sea
attgttgcggcaacagcgtcagactccgctccactgcaatttttagctccttatacaggatgcactattggtgaatattttagagataatggaatgcatgcgttgataatttatgatgatttatcaaaacaagctgttgcatatagacaaatgtcccttttactaagacgaccacctggaagagaggcatatcctggggacgttttttatttacatagcagattattagaaagagctgctaagttaaatgacaaaagtggtggaggatctttaacagctttgccaataatagaaacgcaagcaggcgatgtatccgcatacatacccactaatgtaatttcaattacagacggacagatttttttagaaactgaattattcaatcaaggaatacgccccgcagttaatgttggtttatctgtttctagagttgggtctgctgctcaaacaaaagctatgaaaaaggttgctggatccatcaaattagaactggcacaatatagggaaatggcagcttttgcacaatttggctcagatcttgacgcttcgactcaacaattgcttaatcgaggtgcaaaattaacagaattactaaagcaagaccaatattcccc

SEQ ID NO: 272710 - DNA, 526 bp, Unknown
  Bacterial polypeptide expressing nucleotide sequence isolated from the Sargasso Sea
atggcgagcttagacgatcttaaaaaaagaatagctagtgtaaaatctacacagaaaattactaaagctatgaaaatggtagcagcagcgaaacttaaaagagctcaagaaagtgctgaaaagggaagaccatattcagaaaaaatgaataacgttatattaaatttatctaatggaatctcagataaagaaaatgctccaagattactctcaggaactggaaaagataaagtacatctttgtgttgtgatgacatctgataggggattgtgtgggggatttaattcaaatataataaaaaaagcaaaaagttattttgctaaattatctgaagaaggaaaagatttaaaaatagttacagttggttctaagggtaatgatcagttaaaaagagtttatggtgataaaattattgcaaatatttcgtttaaagagtctaaaaatgcaaattattttgatgctgaaaaagttggtaaaatggtaattgagaaatttgaagctgaagaatttgatgtttgtacaattt

SEQ ID NO: 272711 - DNA, 302 bp, Unknown
  Bacterial polypeptide expressing nucleotide sequence isolated from the Sargasso Sea
aatgagtaaaaaatctggaaaaattacacaggtaataggagcagtggtcgatgttcaattcgatggccaattaccagaaattttaacagctttagaatgcaataattctggaaataggctggtgttagaagtagcacagcatttaggagaaactacagttagaacaatcgccatggatagcaccgaaggccttaaaagaggaaatgaggtaattgatacgggttctccaattaccgtgccggttggaccggaaacactcggaagaataatcaatgttataggagagcctattgatcaaaagg

SEQ ID NO: 272712 - DNA, 715 bp, Unknown
  Bacterial polypeptide expressing nucleotide sequence isolated from the Sargasso Sea
tatgagcaaaggaataattacacaagttattggagcagtagtagacgttaaatttgatggagatcttccagaaattttaacagccttagaatgtaaaaatggagacaacagactagttttagaggttgctcagcacttaggagaatctacagttagaactattgcaatggatgctactgaaggattaaagagaggtgatgaggtgacaaatactaaagcaccaatccaagttcctgttggacctgaaacattaggaagaattataaatgtaattggagagcctattgatgaaagaggtgaagtaaaaactaaagaaagttggcctattcacagagctgctcctgaattcaatgaacagtcaactgaaacagaaattttggttactggtattaaagtaattgatttgctggctccatatgcaaaaggtggaaaaatcggtctatttggtggagctggagttggaaaaacagttttgattatggaattaattaacaacgttgcaaaagcacatggtggtttttcagtttttgccggcgttggagaaagaacaagagaaggtaacgatttatatcacgaaatgatagactcaggagtaatcaagaaagatggagatggatctaaagctgccttagtttatggacaaatgaacgaacctccaggagccagagccagagttgctcttacaggattaactgtagctgagtatttagagatc

SEQ ID NO: 272713 - DNA, 766 bp, Unknown
  Bacterial polypeptide expressing nucleotide sequence isolated from the Sargasso Sea
tatggcaagtttagacgacctaaaaaaaagaatagctagtgtaaagtctacacagaaaattactaaagctatgaaaatggttgcagcagctaaattaagaagagctcaagaaagcgctgagaagggaagaccttattctgaaaaaatgaataatgttattttaaatttatcaaatggtatatctgataaagaaaatgcaccaaagttattgtcaggtactggtcaagaaaaaactcatctttgtgtggtgatgacttctgatagaggtttgtgtggcggatttaattctaatattattaaaaaagctaaaagttattttgcaaaaattttagatgaaggtaaggaacttaaaattattacagtaggctcaaagggaaatgatcaattaaaaagagtttatggtgacaaaataattgaaaatatttctctcaaagagtctaaaaatgcaaattatttcgatgctgataaagttgggaaaatggtaattgaaaaattcgaagcaggtgaatttgatgtttgtacaattttttataaccaatttaaaaatgtaattactcaaattcctcaagcacagcaaattatccctttaaataatgagggagaagaaactagttcagaagaaagttacgaatttgaaccagatgaagatgaaatcttaagcaatttattaccaaagaatatttctacgcaaatatttaaagcaatgttagagaattcagctagcgagcaagggtctagaatgagtgcaatggataatgcaacccga

SEQ ID NO: 272714 - DNA, 502 bp, Unknown
  Bacterial polypeptide expressing nucleotide sequence isolated from the Sargasso Sea
cgtgatttcattactgatggacaaatatttttagaaactgaacttttcaatcaaggaataagaccagcagtaaatgtaggtttatccgtttctagagttggatctgccgctcaaactaaagcaatgaaaaaagttgcaggttcgattaagttagaattagctcaatatagagaaatggctgcttttgcacaatttggttcagatttagatgcttcaactcaacagctattaaatcgaggtgcaaaattaaccgaacttttaaaacaaaatcaatattctccaatgactgttgcagagcaagttatatcagtttttactggagtaagaggatatctagacgatattgatttaggaaagattaaagaatttgaaaagaatattattcaattagtaaaatcagaaaaacctgaaattattgatgaaattgagaccacaggaaaactcgatgataaatcagaaaaacttttagagcaaatactacaagaatataaaaaaggttaaa

SEQ ID NO: 272715 - DNA, 328 bp, Unknown
  Bacterial polypeptide expressing nucleotide sequence isolated from the Sargasso Sea
aatgccaagtttagatgacttaaaaaaaagaattaaaagtgtgaagtctacgcaaaaaattaccaaagcgatgaaaatggtagctgctgctaaactaagaaaggcgcaagaaaatgcagaaaaaggccgtccttacagtcaaaaaatgcaaaatattattttaaatcttacaaagtcaattaacgacccggatagcgcacctagactactcgttggcacaggtaaagataaaacttatttatgtgttttattaacagctgatagaggcctttgcggcggctttaactctaatatttcaaaattagctaaattaaattttaaaaagatt

SEQ ID NO: 272716 - DNA, 749 bp, Unknown
  Bacterial polypeptide expressing nucleotide sequence isolated from the Sargasso Sea
atattaaccgcattagagtgtgataatagtggtaacagactagttttagaagttgcgcaacatttaggagagtcaagcgtaagaacaattgccatggatgcaacagaaggtttaaaaagaggcgatgaagtaacagacactggagctccaattaaagttccagttggtccagaaactttaggaagaattattaatgtaattggtgaacctattgatgaaaaaggtgaagttaaaacaaaagaaaactggcctattcacagatcagcgccagaatttagtgaccaatctacagaaacagaaattttagtaactggtattaaagtagtagatctattagcaccatacgcaaagggcggaaaaattggtttatttggcggtgcaggagtaggaaaaacagttcttattatggaattaattaataatgtcgcaaaagcgcatggaggcttctcggtttttgcaggagtgggtgaaagaactagagaaggaaacgatctttatcacgaaatgatagagtctggagtaattaaaccagaaggttctggatcaaaagctgcattagtttatggccaaatgaacgaaccacctggggcaagagctagagtagcattgtctggattaactgtcgctgaatattttagagatcaagaaggtcaagacgtacttttttttgtagataatatttttagatttactcaagcaggctccgaagtttcagcattgttaggaagaattccgtccgctgtaggata

SEQ ID NO: 272717 - DNA, 553 bp, Unknown
  Bacterial polypeptide expressing nucleotide sequence isolated from the Sargasso Sea
atggatattaaagcagcagagatttcctctattctaaaagatcaaattaaaaattttggtacagacgccgaagttacagaaattggtaaagtattgtcagttggtgatggtattgcgagagttcatggattagatgaaataaaagcaggagagatggttgagtttgatggcggtattgccggaatggctcttaatcttgaaaaagataatgttggtattgttatttttgggagcgataaagatattaaagaaggtgatattgtaaaaagaacaggatctatagttgatgttccttctggacaaggtctacttggtagagttgtagatgcactaggcaatcctatagatggtaaaggtgcattaaagaatgttaaaagagcaagagtcgaaactaaagctccaggtattatgcctagacaatctgttcatgagccaatgcaaactggtttgaaagctattgattctttgatacctattggtcgaggtcaaagagaacttattattggtgatagacaaactgggaaaactgcaattgctattgatactttttaaa

SEQ ID NO: 272718 - DNA, 855 bp, Unknown
  Bacterial polypeptide expressing nucleotide sequence isolated from the Sargasso Sea
aaaccaaaaacaaataaacgagtcttctgatgaaagtaaaaagttatattgcgtttatgtagcaataggtcagaagcgatctactgtagctcagataacaaaaactttagaggaggctggggcattaaaatataccactattgttgctgcgacagcatcagactcagctcctttacaatttttagctccttataccggatgtacaattggggaattttttagggataatggcatgcacgctttaattgtttatgatgatttgtcaaaacaagctgttgcttataggcaaatgtctttattactgagacgaccaccaggaagagaggcatacccaggagatgtattttatcttcatagtagacttcttgaaagagcagcaaaattgagtgaaaaaaatggaggtggatcactaactgcgttaccaataatagaaacgcaagcaggagacgtttccgcctacataccaactaacgttatctcaattactgacggacaaatatttttggaaacagaattatttaatcaaggaatacgtccagcagttaatgttggtttatcagtatcaagagtaggatctgctgctcaaaccaaggcaatgaaaaaggtagctggatcaattaaattagaattagcacaatacagggaaatggctgctttcgcccaatttggatcagatctggattcctcaactcaaaaattattaaatcgtggtgcaaaactaactgaacttcttaagcaggatcaatattctccaatgacagtggccgaacaagttatatcagtatttactggagttaagggttacctagatgacattgatttaagtaaaattaaaaaatttgaagaggatgttat

SEQ ID NO: 272719 - DNA, 556 bp, Unknown
  Bacterial polypeptide expressing nucleotide sequence isolated from the Sargasso Sea
gatggctcagtattagttctcgaagttcaatctcatattggagaaaatgctgttagaacaatatcaatggactcaacggatggtgtaagtagaggaactgaagttgtatctactggtaatccaattcagatgccaattggaaaaaatgtatatggaagattattcaatgttgtaggagacccaattgatgggcttgaggtattaccaaaaacaaagagtgatggtatgtcaattcacagagaggcaccagcatttgatcaattgtcgacttcaactgaagttttatttacaggtataaaggtgattgatcttattgagccttatgccaaaggtggaaagattggtttatttggaggagctggtgtaggtaaaacagtactaattcaggaattaattaataatatcgcaaagggtcacggtggactatcagtttttgcaggagtaggtgaaagaaccagggagggtaatgatcttttaagagagatgatcgaatcaggtattataaactatggagcagaatttaaaaagtcaatggaagctggtgagtgggatttaa

SEQ ID NO: 272720 - DNA, 390 bp, Unknown
  Bacterial polypeptide expressing nucleotide sequence isolated from the Sargasso Sea
cactagattctacttcaagaattttagatccacaagttgttggtgatgaccattacagagtagcaagagaagtgcagagagttttacagacatataaaagtcttcaagatattattgctattttaggaatggatgaactctcagaagaagataaactaacagttgcgagagcaagaaaaatagaaaagtttttgagccaaccattttttgttgcagaagttttcactggatcaccaggtaaatatgttgatcttgaagataccattaagagttttgatggactggtaaaaggagaatatgatcatatgccagaagctgcattttatatggtaggtggcatagatgaagcaattgaaaaagctaaaaaattagaagctgaagccgcgtaat

SEQ ID NO: 272721 - DNA, 586 bp, Unknown
  Bacterial polypeptide expressing nucleotide sequence isolated from the Sargasso Sea
tggaggaggatctttaacagctcttccaatcattgaaacacaaggtggagacgtctcagcatttataccaacaaatgttatatcaataactgatggacaaatatttcttgaaacaaatttatttaatcagggaattcgacctgcaataaacgttggattatcagtgtctagagtaggttcttcagcacaaacaaaggcaatgaaaaaggtttccggatcaatgaaattggaacttgctcagtatagagaaatggcagcatttgctcaatttggatcagatctagatgcatcaactcaaaaacttttaaacagaggttcaaaattaactgaacttttaaaacaaaaacaatattcaccaatgacagttgcagaacaagtcatttcagttttttgtggcgttagaggttatctagataatattgagcttaaaaatattgcagaatttgaaaaaaaaattgttgaaaagtgcaagtctgaaaagcctgaaattttagactcaatatcacaatcaggtaaattagaagaaaatactgaaaaaacattgattgaagtaattaatgaatttaaaaaaaattttaattcttaa

SEQ ID NO: 272722 - DNA, 704 bp, Unknown
  Bacterial polypeptide expressing nucleotide sequence isolated from the Sargasso Sea
tcgtcaaatgtctctgttattaaggaggccacctggtaggaaagcatacccaggagatgttttttatctacacagtagacttttggaaagagctgcaaaactaaatgaaaaaaatggaggaggttctttaacggctttaccgatcatagaaactcaagcaggagatgtttctgcctacatacctacgaatgttatctcaataacagatggacaaatatttttagaaactgaactattcaatcagggcatacgaccagcagttaacgttggcctctctgtttcaagagtaggatcagcagcacaaacaaaagcaatgaaaaaagttgctggctctataaaactggaacttgcacagtaccgagagatggctgcgtttgcacaatttgggtcagatttggatgtttcaactcaaaaacttttaaatagaggatcaaagctaactgagctacttaaacaaaaccaatattcacctcttacagtagcagaacaagttgtatcaatatttacaggagtaagtggttatctcgacaatattgaacttaacaaaattaaaaagtttgaaacgaacttactagaaaagatcagaagtgattatcctgaaatattagaaaatataaatacatctggaaagttagaagatgaaacaaaaaataaattaattgagattatagaggtccaaaaaaaggaagtttctaatgcctagt

SEQ ID NO: 272723 - DNA, 801 bp, Unknown
  Bacterial polypeptide expressing nucleotide sequence isolated from the Sargasso Sea
tctgggtgtaattaaacctgatggcaaaggctctaaagctgctttagtttatggacaaatgaatgaacctccaggcgcaagagcaagggtaggattaacaggtttaacagttgcagaatactttagagataaagaaggacaggacgttcttttttttgttgataatatatttaggtttactcaagctggatcagaagtgtcagctcttctaggaagaattccatcggcagtaggttatcaacctactctagctactgatatgggtaatctacaagaaagaataactacaacaaacaaaggttcaattacttcagttcaggcaatttatgttcctgcagatgatttaacagatcctgcgcccgcaacttcatttgctcatttagatgcgactacagtattgtcaagacaaatagcggaactaggaatatatccagctgtcgaccctttagattctacatcaagaattttagatccaagaatagtaggtgaagaacactatagagtagctcgagaggtacaaagagtattgcaagcttataagtcattacaagacataattgcaattttaggtatggacgaattatcggaagaggataagctaacagtagcaagagcgagaaagattcaaagatttttatcacaacctttttttgttgctgaggtttttactggaacacctggaaaacttgtagatttggaagccactattaagggttttgatgctatatgcaaaggtgagtatgaccacttacccgagggagctttttacatggtaggcactatagaagaggcagttgaaaa

SEQ ID NO: 272724 - DNA, 190 bp, Unknown
  Bacterial polypeptide expressing nucleotide sequence isolated from the Sargasso Sea
atatttcctcgtcaaagtgtatccgaaccaatgcagactggtatcaaagctctcgatgcccttgttccagttggtagaggtcagcgtgaattaattattggcgatagacaaacaggtaagacagcagtagctattgatactattcttaaccaaaagacagttaatcaatcaaataatgaaaaagaaaaac

SEQ ID NO: 272725 - DNA, 844 bp, Unknown
  Bacterial polypeptide expressing nucleotide sequence isolated from the Sargasso Sea
ttagaaacaggaattaaagttattgatcttttagcgccatactcaaaaggaggaaaaataggattattcggaggagctggtgttggaaaaactgttataataatggaattaattaacaacattgcaaaagctcatggaggattttcagtatttgctggtgtgggtgaaagaactcgtgaaggaaacgatctatatcatgagatgatagagtctggagttatcaagccggagggaaaaggttcaaaagcggcactcgtttatggtcaaatgaatgagccaccaggtgcaagggcaagagttggattaacaggactaacagttgcagaatattttagagataaggaaggacaagatgttcttttttttgtagataatatttttagatttacacaagctggctcagaagtttctgcattgttaggaaggataccctcagcggttggatatcagccaactttagcaacagatatgggaaatttgcaagaaagaattacaacaaccggcaaaggttcaattacatctgtacaagctatatatgttccagcagatgatttgactgatcctgctcccgcaacatctttttcacatttggatgctacaactgtgctttcaagacagattgcagaacttggaatttatcctgcagttgatccgctagactcaacttcaagaattttagatcctagaattgttggcgaagagcattatagagtagcaagagaagttcaaaaaattttacaaacttataaatcattacaggatattatagcaatccttggtatggacgagctatctgaggaagacaagttaacagtagctagagcaaggaaaatacaaagatttt

SEQ ID NO: 272726 - DNA, 644 bp, Unknown
  Bacterial polypeptide expressing nucleotide sequence isolated from the Sargasso Sea
agacgtcttttatttacacagccggttgttagaacgtgcagctaagctaacggaaaaaaacggaggaggatctttaacagcactaccaataattgaaacacaagcaggtgatgtttccgcatatataccaacaaatgttatttcaataactgatggacaaatatttttagaaacagaattatttaatcaaggaataagacctgcagtaaatgttggtttatcggtatctagagtaggctcagcagctcaaaccaaagcaatgaaaaaagttgctggatcaataaaattagagttagctcagtacagggagatggctgcttttgcacaatttggttcagatcttgacgcatcaacccaacagctattaaatcgtggcgctaaattaactgaacttctaaaacaagatcagtattcgcctatgactgtggctgaacaagtaatatctgttttcacaggagttaaaggctacctagatgatgttgatttagctcaaattaaaaaatttgaaaaggatatagttgaaaaaattaaatctgaaaaatctgaaattattgaaactatacaatcatcaggaaaattagatgatgataccgaaaaacttttaattcaagtaattgaagattacaaaaaaggtaaaaaataat

SEQ ID NO: 272727 - DNA, 298 bp, Unknown
  Bacterial polypeptide expressing nucleotide sequence isolated from the Sargasso Sea
atgccaagcttggatgatttaaaaaaaaggattaaaagtgtaaaatctactcaaaagattactaaagctatgaaaatggtagctgctgcaaagcttagaaaagcgcaagaaagcgctgaaaaaggaagaccttacagtcaaaaaatgcaaaacattattcttaatttggtaaaatctattaaagattttgacaatgctccaaaacttcttgtgggaacaggcaaagataaatcttacctatgtgttgttttaaccgcagatagaggtttatgtggtggtttcaattctaatatttgta

SEQ ID NO: 272728 - DNA, 265 bp, Unknown
  Bacterial polypeptide expressing nucleotide sequence isolated from the Sargasso Sea
tgacgtcttttatatccactcaaggctgctagagcgtgcagcaaaaatgaatgatgagaacggagcaggttcacttaccgcactgccggttatcgaaacgcaagctggtgatgtctcggcatacattccaaccaatgttatttctataaccgacggtcagattttcttggaaacagaattattctacagaggcataagacccgcggttaacgtgggactctctgtaagtcgtgttggttcagcggcacaaattaaagccatgaaa

SEQ ID NO: 272729 - DNA, 772 bp, Unknown
  Bacterial polypeptide expressing nucleotide sequence isolated from the Sargasso Sea
acagaaattcttgtaactggaattaaagtcatcgatcttttagctccttatgcaaaaggaggaaaaatcggattgtttggaggagctggtgtaggaaaaacagttcttattatggaattgattaataacgttgcgaaagcacatggtggtttctcagtatttgcaggtgtaggagaaagaactagagagggtaacgacctatatcatgagatgatagaatcaggagtaattaagccaaatgaagctggctcaaaagctgcactagtttatggacagatgaacgaacctccaggagcaagagcaagagttgcgctaacaggtttaactgttgcagagtattttagagatcaagaaggtcaagacgtacttttctttgtagacaatatttttagatttactcaagctggttcagaagtatcagctcttttgggaagaattccatctgctgttggatatcagccaacgcttgcaacagatatgggtaatttacaagagagaatcacaacaacaaacaaaggttcaattacttcagtacaagccatatacgttcctgctgatgacttaacagatccagctccagctacatcatttgcacacttagatgcaacgactgtactgtcaagacaaattgctgagattggaatttatccagctgtagacccattagattcaacttctagaattttagatcctagaatagttggagatgagcactatagagtagcaagagaggtacagaaggttttacaaacctataaatcattacaagata

SEQ ID NO: 272730 - DNA, 691 bp, Unknown
  Bacterial polypeptide expressing nucleotide sequence isolated from the Sargasso Sea
tatgcccagtttagatgatttaaaaaaaagaatttctagtgttaaatctacacaaaaaattactaaagctatgaaaatggttgcggctgccaaactaagaagagcccaagaaagtgcagagaaaggaagacctttttctgacaaaatgaataatataattcttaacttaagtagttcaattcctgacaaagaaaatgcttctaaatttttggttggaactggaaaggataatactcatttatgtgtagttattacagcagacaggggtctgtgtggtggatttaataccaatatatgcagaaaagctagaaatgattttgaagaaattctaaaaaaaggcaaaactctaaaaatttttacagttggctcaaagggatatgatcaattaaaaagaacttatggaaaatatattattgaaaagttaaattttaaaggttttaaaaaaattacatataaggaagcagacgaagtaggtaaaaaaataataaaactgtttaacgaaaatcaatttgatgtttgtaatatatactataataagtttaaaaatgtaattactcaaattccgcaatcacaacaaattattcccattgaaaaaccaaaaaaagatgaaaaaaaaacagaaaatttttatgagtttgaaccagaagaaagtgaaatactagatgatttgcttcccacgccaatatttcaa

SEQ ID NO: 272731 - DNA, 799 bp, Unknown
  Bacterial polypeptide expressing nucleotide sequence isolated from the Sargasso Sea
tctcaagaaaaggcagaagctgcaagaccttactcctcaagattagaagaaatgttatcttctctggcttcttctgcgtcttcaggagaagggattataaaacttttaactggcactggtgaagatcaaaattatattgttgtacctgttagtgcagatcgaggtttatgtggtggctttaatagtagtattaatagagaaacatttaagctagttaaaaaattagaatctgaaaacaaaaaagttcaacttctacctattggtaaaaaaagcagagatttttttcttcgtactttgaaagataatataacagatagctttgtagatacgaatgtatctagtgcaggttataacatagcattagaaatttctgcaaaactacaatcattatattttgaaggaaaatttgataaatgtattcttgtatacaataaatttaaatcggcaatttctcaagaagtaacacagcaacagttaatacctcttgatatatctaacaaagacaacgaagataaaccaagcgaaactgaaagttcagataaggcaatatatacttatgagcctgatgaagaaacaatattgcaagatttacttcctaaaaatgtttctattcaaatttttaaagtattactagaaagtgatgcaggtgagcaaggagcacgtatggcggctatggataatgctactcgtaatgctggagaaatgatagatagtttaactttaaaatataatagaacaagacaggcatttattactaaagaattaatagagattatttctggagcagaatcaatttaaa

SEQ ID NO: 272732 - DNA, 217 bp, Unknown
  Bacterial polypeptide expressing nucleotide sequence isolated from the Sargasso Sea
agtatttgctggagttggagaaagaacacgggaaggaaatgatttatatcatgaaatgattgagtcgggcgttatcaaaccagaaggaaaaggatcaaaagcagcactggtgtatggacaaatgaacgaacctccaggggctagggctagagtaggcttaactggattgacggtcgcggaatattttagagacaaggaaggacaagacgttcttttc

SEQ ID NO: 272733 - DNA, 823 bp, Unknown
  Bacterial polypeptide expressing nucleotide sequence isolated from the Sargasso Sea
gtctacgacgctcttaaagtagatgaagctggattaaccttagaagttcagcaacaactgggagatgggattgtaagaacaattgccatgggaacttcagatggaataaaaagaggtttcgatgtcacaaatactggggcgccaatatctgttcctgtaggcgaaaaaactttagggagaattatgaatgttttaggtgagcctgttgatgaggccggtccgatagatgctccaaaagctatgcctattcatagaaaacctccgacttatgaagaacaagcaggtggaaatgaactattggaaacaggcattaaagttatcgacttactatgcccttttgccaaaggcggtaaagttggcttgtttggaggtgctggggtaggtaaaactgtaaatatgatggagctaattagaaatattgctacagagcatagtggttattcagtttttgctggcgttggagagagaactcgtgaaggaaatgatttctttcatgaaatgaaagaatctcaggttcttgacaaagtttctcttgtttacggacaaatgaatgagcctccaggaaatagattaagagttgcattgacgggtttaacaatggctgaggattttagggatgaaggaaaagatgtattgatgtttattgataatatttacagatatacattagcaggtacagaggtttcagctttgcttggaagaatgccgtcggctgtaggataccaaccaacccttgccgaggaaatgggagcacttcaagaaagaattacttctacacaatctgggtctattacctcaattcaagctgtttatgttccagcag

SEQ ID NO: 272734 - DNA, 882 bp, Unknown
  Bacterial polypeptide expressing nucleotide sequence isolated from the Sargasso Sea
agctttggccttcgaggttattgtcgacggtgaatcaactacagttatggctgaagtagctcaacagattggtgatagcagagtccgagctgtgtctttgaagccaacagatgggctaactcgaggaacagctgttcgaaatacagggtcaggtatagaagttcctgttggcgatgtaactctagggcatgtgtggaatgtgattggagaaccacttgacgtagatgcttcaaccctggaaatcgatgagaaatgggaaatacaccgacctgccccagattttgacagtctagaaccctcagcaaaaatgttcgagaccggtatcaaggtaatcgaccttctaacaccatataaagaaggcggtaaaattggcctattcggtggagcgggagttgggaagacagttctcatcaccgagatgattaaccgagttgcaacgcaacatggtggtgtttccgtttttgccggagtaggcgagaggacaagagaaggaacggacctattcctagaaatggaagaatccggagttctagataaagccgcattggtctttggccaaatggatgagccgcctggagttcgcctccgaatagctttggcaggagttaccatggccgagtattttcgcgatgtccaaaatcaagatgtcctcttgtttatcgataatattttccgtttcgttcaagctggctcagaagtgtctactctacttggacgaatgccttcggccgttgggtaccaacctacacttgctgatgaaatgggtgagctccaagaacgtatcacgtcgacaagaggaaaatcgattacttcgcttcaagcagtttatgttccagcggatgactacacagaccctgccccatttacctcctttacccactt

SEQ ID NO: 272735 - DNA, 679 bp, Unknown
  Bacterial polypeptide expressing nucleotide sequence isolated from the Sargasso Sea
aagctattagttggaaataaaaaagatgcaacttacttgtgcgtggtattaacagctgacagggggttatgtggaggttttaattcaaatatttgtaaattggcaaaaagcaattttaaaaaaattttgaatgaaggaaaaaatctcaagattattactgtgggctctaaaggcttagatcaaatcaaaagagaatatggtaaatacataattgaaaaaattagctttaaggataaaaaacaaattacatttaatgaagcagaatttgtaggaaataaaattataaatttatttaaaaacgatgaatttgacaaatgtattttgttttttaataactttaaaaatgtaattactcagataccacaagcccaacaaattatacctgtagaaaataatcaatccaaagatgaatcaaaaaatactcaaacttacgagtttgagcctgaagaagatgaaattttagatgaattattaccaaaaaatatatctactcaagtttttaaagcttttctagaaaacgcagccagtgaacaaggatcaaggatgacagctatggacaatgctacaagaaatgcaggagatttggtagataaattaacaattaattacaatagaagtaggcaagcttcaattacaaaagaattaatagaaattatatctggagcagaaagtttataat

SEQ ID NO: 272736 - DNA, 886 bp, Unknown
  Bacterial polypeptide expressing nucleotide sequence isolated from the Sargasso Sea
agcacacggcggctactctgtttttgcgggggttggtgaaagaacacgtgaagggaacgatttataccacgagatggttgaatcaggtgttataaaaacagacggtgatgggagtaaagcagcacttgtgtatgggcagatgaacgagcctccaggcgcacgggcaagagttgctctctctggactcacattagctgagtattttcgtgacgaagagggacaagatgtattattatttatagataatatttttcgttttacgcaagctggttcagaagtttctgcacttttggggcgtattccatcagcggtgggatatcaacccacattatctactgatatgggtgggcttcaggaacgcattacatccaccaacaaaggttctattacttcagttcaggcaatttatgtcccagcagatgatttaaccgaccctgcaccagcgacctcctttgcacacctcgatgcaacaacagtactttctcggcaaattgcagaaattggtatttacccagcagttgacccgcttgattccacttctcgtgttcttgaccctaggatagtgggagatgagcattatgagacagcacgcttggtgcaagaggttttgcagcaatataaagctttgcaagatattattgcgattttgggaatggatgagttatcagaagaagataaattaacagtagctagagctaggaagattcagcgtttcttatcgcaaccttttcacgttgccgaagtttttacaggtacgcctggcgttttagttggtctcgaagatacaatcaagggttttaaaggcatagctaaaggggattatgatcatttgcctgaagcttccttttacatggttggcacgatcgaagaggctatctcaaaagct

SEQ ID NO: 272737 - DNA, 895 bp, Unknown
  Bacterial polypeptide expressing nucleotide sequence isolated from the Sargasso Sea
agaggtcaaagagaattaattattggtgatagacaaactggtaaaactgcagttgcaattgatgcaataatcaatcaaaagaaaataaatgagtctggcgacgaaaaacagaaattatattgtgtttatgtcgctatagggcaaaaaagatcaactgtaagacaaatagaaaaaactttacaggaagcaggagcaatggagtatacaacaatagtcgctgcaaccgcttcagacgctgcgccactacagtttttagcaccatataccggttgtgctatgggagaatattttagagataatggtatgcatgctttaattatttatgacgatctttcaaaacaagcagttgcatatagacaaatgtcattattacttagaagacccccagggagagaagcatatccaggagatgtgttttatcttcatagtagattacttgagagagcagctaaactaagtgatgagcacggtggtggatcattaacggcacttcctattattgaaactcaaggaggagatgtatctgcatttattcctacaaacgtaatctcaattactgatggtcaaatattcttggaaaccgaactttttaaccaaggaattagacctgcaattaacgtaggattatcagtatcaagagttggatcctcagcacaaactaaagcaatgaaaaaagtttctggatcaatgaaacttgagctagctcaatatagagagatggcagcatttgctcagtttgggtcagatttagatgcttctactcaaaaattattaaatagaggttctaaattaactgaactattaaaacaaaaacaatattctcctatgacagtagctgaacaagtaatttcaatattttgtggtgttaaaggtcacttggatgacattgatcaaa

SEQ ID NO: 272738 - DNA, 148 bp, Unknown
  Bacterial polypeptide expressing nucleotide sequence isolated from the Sargasso Sea
aggaagaattccttctgcaattggttatcaaccaacattggcaactgacatgggaaatttacaagaaagaattacaactacaaataaaggatccataacttctgttcaagctatatatgtacctgcagatgatctaactgatccagct

SEQ ID NO: 272739 - DNA, 985 bp, Unknown
  Bacterial polypeptide expressing nucleotide sequence isolated from the Sargasso Sea
tccacacaagttattggagcggtagtagacgttaagtttgatggagaacttccagaaattttaacagcattagaatgtaaaaatggagataatagacttgttttagaagttgctcaacatctaggtgaaactacagtacgaacaattgcaatggatgctactgaaggattgaaaagaggcgatgaagtaattaatacaaatgcaccgatacaagttccagttggacctgaaactcttggaagaattatcaatgttattggagaaccaattgatgaaagaggtgaggttaaaactaaagagagctggccgatccacagagctgcacctgaattcaacgaccaatcaaccgagactgagatacttgtaactggtattaaagtaatagatctacttgccccctacgcaaaaggaggaaaaattggattatttggtggtgctggtgtgggtaaaacagttttgattatggaattaattaataatgttgcaaaagcgcatggtgggttttcagtttttgcaggtgttggagagagaactagagaaggaaatgatctttatcatgagatgatggagtctggggttattaaacaagatggccctggatctaaagcagcattagtttacggacaaatgaatgaacctccaggagcaagagctagagttgcacttacaggattaactgtagctgaatactttagagatcaagaagggcaagacgtactattctttgttgataatatttttagatttactcaagcaggttcagaagtttctgctcttttaggaagaattccatcagcagttggttatcaaccaactctggcaactgatatgggcaatcttcaagaaagaattaccacaacaaacaaaggatctataacttcagttcaagcgatttatgtaccagctgatgatttaactgatccagctccagccacgtcgtttgcacacttggatgcaacaacagtgctttcaagacaaatagctg

SEQ ID NO: 272740 - DNA, 875 bp, Unknown
  Bacterial polypeptide expressing nucleotide sequence isolated from the Sargasso Sea
aaagactttagaagaagctggagcattaaaatatacgactatcgttgcagcaaccgcatctgattctgctccgttacaatttttagctccttatactgggtgtacaattggagaatattttagagataatggcatgcatgctttaatcgtttacgacgatttatcaaaacaagctgtcgcttataggcaaatgtcgttattgttgagaagacctccaggcagagaggcttatcctggtgatgtattttatttacacagcagattattagaacgtgctgccaagttaaatgataaaagtgggggtggctctttaactgctttaccaattattgaaacccaagcaggagatgtttccgcatatataccaacaaacgttatttctattacagatgggcagatattcttagaaactgaactattcaatcaaggaattcgtcccgctgttaatgtaggattatccgtgtctagagttggctctgctgctcaaactaaagcaatgaaaaaggttgctggctcaattaaactagaactagctcaatacagggaaatggctgcttttgcacaatttggctcagatttagatgcatctacacaacaattactgaatagaggcgcaaaacttacggaactcttaaaacaagatcaatactctccaatgaccgttgcagagcaagttatttcagtgttcacaggtgtcaaaggttatttagatgatgttgaaattagcaagatcaagaaatttgaaaacgatattattgaaaaaattaaatcagaaaaacccgaaataattgagtcaattcaatcttcaggaaaattagaagaagaaactgaaaaacttgttattcaagttatagaggaatacaaaaaaaggtaac

SEQ ID NO: 272741 - DNA, 805 bp, Unknown
  Bacterial polypeptide expressing nucleotide sequence isolated from the Sargasso Sea
atgcaaatcaatccttcagaagtaacaaaaattttaaaagaacagattaaaaaatttggagaaaaagccgaagtctctgaagttggacaggtactttcggtcggagatggtattgcaagagtttatggcttggacaatgtgcaagcgggagagatggttgaattttctaaaggtataaaaggaatggctcttaatttagaaaatgacaatgtaggagttgttatttttggagatgatcgatcaattaaagaaggcgatgtggttaaacgaactggagctattgtagatactccagttggaaaaagtttgttaggtagagtcgtagatgctttaggaaatcctatagatggaaaaggtgacttagaaaaaaaaataaaaagaaaaagagtagaagtaaaggctcccggaataattccaagaaaatccgtaaatcaaccgatgcaaacaggacttaaagcaatagatagtttaataccaataggcagagggcaaagagagctaattattggtgatcgtcaaactggtaaaacagcggttgcaattgatacaattataaatcaaaaagatataaataaatctggggaagaaaaagataaactgtattgcatttatgtagctataggacaaaaaagatcaaccgtagcgcaaatagttaaatctttagaggatgctggagcgatggaatacacaaccatagtttctgcaacagcttctgatcctgcgcctctacaatttttggctccatataccggatgtactatgggtgagtattttcgagataatgggaatgcatgctttaattatt

SEQ ID NO: 272742 - DNA, 688 bp, Unknown
  Bacterial polypeptide expressing nucleotide sequence isolated from the Sargasso Sea
tgaagttaaaactaaagaaagttggcctatccacagagcagcacccgagtttaatgaccaatcaactgaaacagaaattttagtaactggaattaaagtagtagacctattagcaccttatgcaaaagggggtaaaattggtttgtttggtggtgcaggagttggaaaaacagtaattatcatggagttaattaataacattgcaaaagcacatggaggcttttcagtttttgctggagttggagaaagaactagagaaggaaatgatctttatcatgaaatgatagaatccggagtaattaaacctgagggacctggatcaaaagctgcactagtttatggacaaatgaacgaacctcctggagcaagatcaagagttgctcttacaggattaacagttgcagaatattttagagaccaagaaggccaggatgtactttttttcgtagacaatatttttagatttacacaagcaggctctgaagtatcagccttattaggaagaattccatcagcagttggttatcaacctactctagctactgatatgggaaatttacaagaaaggattaccacaactaataaaggatctattacatcagtacaggcaatttatgttcctgctgatgacttgactgatccagcgccagcaacatcttttgctcacttagatgcaacaactgtgtta

SEQ ID NO: 272743 - DNA, 985 bp, Unknown
  Bacterial polypeptide expressing nucleotide sequence isolated from the Sargasso Sea
gttgagcgaacaggtcaagtaatgagtgtcccagttggcgaagccatgttaggccgtgttgttgatgcattaggtgcgccaattgatggtgatggttcaattgaaacaacgtcccgtcggccaattgaacgtgtcgctgccggagtatgtgagcgtcaaccagtaacagagccattgcaaacaggtattaaaccaattgatatgatgattccaatcggccgtggtcagcgtgagttaattattggtgatagaaaaacaggtaaaactgctattgctattgatacaatattaaatcaaaaaaatgatgacgttatatgcatatatgttgcaattggtcaaaaaaaatccactgttgctcaaattgtacaaacattaaaagataatggggctttagattatacagttgttgttaatgcatctgcatcagattctgctacattgcaatacctggctccatatacagggtgtacaattggcgaagaatttttagataacggaaaacatgttttagttgtttatgatgatttaagtaagcatgctgttgcatatcgtcagttatcattattacttaaacgtccgcctggtcgtgaagcatatcctggggatgtattttatttacattcacgtttattagaaagagcattaaaatattcagatgaaaaaggggccggttcgttaactgccttaccaattattgaaacattagctggggatgtatccgcttatattccaacaaacgtaatttcaatcactgatggccaaatatatcttcaatcagatttatttaactctggaattaggccagctgttaatccaggtatttctgtatcaagagtaggtggtaatgctcaaatcaaagcgactaagcaggttgctggtagtttgcgtttagatttatctcaatattgggaaatggaagcatttgctcaatttggttctgatttagacaaagcgacgttaaaacagttagagcgtgtaagcgata

SEQ ID NO: 272744 - DNA, 713 bp, Unknown
  Bacterial polypeptide expressing nucleotide sequence isolated from the Sargasso Sea
tgcacaaatagtaaaaattttagaagacaacggttctcttgaatacacaattgttgtaagtgctactgcatcagaaccagctcctttacaatttttgtctgcatatactggctgtactatgggggaatattttcgtgataatggtatgcatgcattaataatttatgatgatctttcaaaacaagctgttgcttatcgccagatgtctcttcttctaaggagacccccgggaagagaagcatatcccggcgatgttttttatattcatagtcgacttcttgaaagagctgcaaaaatgagtgaagaacatggtggaggtagtttaacagcgctacctgtaatagaaactcaggcaggagatttatcagcatatattccaacaaatgtgatttctattactgatggccaaatctttttagagacaaatttattttttgctggaatacgacctgcaattaatgttggattatctgttagtagagtaggatcttctgctcagactaaagcaatgaaaaagattgcaggttctattaagttagaactggctcagtaccgtgaaatggcagcttttgctcagtttgcttctgatttggatgcatcaactagaaaactccttgatcgaggagctcgattgactgaattgttaaaacaaggccaatattctcctttaacagttccagaacaagttgtttcaatttatgctggagttaacg

SEQ ID NO: 272745 - DNA, 959 bp, Unknown
  Bacterial polypeptide expressing nucleotide sequence isolated from the Sargasso Sea
gttagaggtataatatggcgaataaatccttcagaagtaactaaaattttaaaagaacaaataaaaagctatggggaaaaagctgaaatctcccaagttggaaaagtattatcagttggtgatggtattgctagaatatttggacttgataatgttcaagctggcgaaatggtagaatttgaagataattctaagggcatggctttaaatcttgaaaatgataatgtgggagttgtaatttttggggatgataaaaatattaaagagggaagcacagtaaaaagaactggttcaatcgttgatgctcccgtaggcaaagaacttttaggaagagtattggacggtctgggaaatccaatagacggtaaaggcaatttaagttcaaaagtcaaaagaaacagggtagaagttaaagctccgggtataattccaagacaatctgtaagtgaaccaatgcaaactggattaaaagcaatcgactctctaatacccattggtagaggtcagagagaattgataataggagatcgccaaacaggtaaaactgcagtagctatagatgcaataataaatcaaaaatttattaacgataccgatgacgaaaagaaaaaactttattgcgtttatgttgcaattggtcaaaaacgttcaactgttgcccaaatagttaaaactttggaagatgccggtgcaatgaaatatacaactgtagtttcggctacagcctcagactctgcaccacttcagtttcttgcgccgtataccggctgcacaataggtgaatattttagagataatggaatgcatgctttgattatatatgacgatttatcaaaacaggcagttgcatacaggcagatgtcattactactaagaagaccaccgggaagagaggcttatccaggagatgttttttatcttcacagtagattacttgagagagcagcaaaattaaacga

SEQ ID NO: 272746 - DNA, 496 bp, Unknown
  Bacterial polypeptide expressing nucleotide sequence isolated from the Sargasso Sea
tatgagcaaaaagggaaaaataacacaaattattggtgcagtagtagatgttaattttgaaagtgatttaccagaaatatatactgctcttgaagccagtaactctggaaacaaattaattctagaagtcgcacagcatttaggagaaaacggtgtaaggacaattgctatggatgctactgagggattaaaaagaggtgatgaggtaatcaatactggatcaccaataagtgtgcctgttggaccagaaactttaggtagaattataaatgttataggagactcaattgatgaaaaaggtgaagttaaaacaaaagaaaaatggccaattcatagaccagcaccaaaatttacagaccaggcaacagaaactgaacaattagtgacaggcattaaagtcatagacctattggctccatatgctaaaggcggaaagattggattatttggaggagctggagtcggaaaaacagtaacaattatggaattaataaac

SEQ ID NO: 272747 - DNA, 550 bp, Unknown
  Bacterial polypeptide expressing nucleotide sequence isolated from the Sargasso Sea
tttcaagagaggattacctcaacgaaaacaggttcaattacctcaattcaagcggtttatgtaccagcagacgacttgacagacccatcaccagcaactacttttgcccaccttgatgcaacagttgtattggcaagatcaattgctgagcttggtatttaccctgctgttgacccccttgattcaaatagccgccaattagatccgggaattgtaggtcaagagcactacgataccgcaaggtctgttcaacaggttttacaaaggtataaggagttacaggacattatcgcaattcttggaatggatgagctatccgaagaagacaaactcacagtacaaagagcaagaaaaattcaaagattcttgtctcaaccattttttgttgcagaggtctttacaggatcaccagggcagtacgtgtctttgagagattccattaaggctttccaaggaatagttgctggggattatgacgacctaccagaacaggcattctatatggttggcacaattgaagaagcggttgaaaaagcaaaaagtatgtaat

SEQ ID NO: 272748 - DNA, 854 bp, Unknown
  Bacterial polypeptide expressing nucleotide sequence isolated from the Sargasso Sea
aaaaagaatatctagtgttaaatctactcagaagattacaaaggcaatgaaaatggttgcagcatcaaaattaagaagagcccaagaaaatgcagaaaaaggaagaccttattcagataagatgaacaatatcattcttaatctttcaaatagtatctcagataaagaaaattcccctaaattacttacaggctcaggcgaagacaaaattcatttatgtgttgttatgacttctgacaggggactttgcggaggttttaatacaaatataattaaaaaagcaaaagcatattttcaaaaaattctaaaagagggaaaaaatttaaaaataataactgtaggatcaaaaggttatgatcaactaaaaagaatttataaagataatattattgaaaaaatttcctttaaagaatctaaatatgctaattattttgatgcagataaagttggaaaaataattattgataaatttgaaaaaaaagaatttgatgtatgtacaattttttataaccaatttaaaaatgtaataactcaaataccacaagaacaacaaattatccctttaaaaacatctgagtctgaaggatcatcctcagaagataactatgaatttgagccagaagaagatgaaattctaagcaatttattgcctaaaaatatttctactcagatttttaaagcgatgttggaaaactcagctagtgaacaaggttcaagaatgagtgcaatggataatgcaacaagaaatgctggtgaaatggtagacaaacttactattcagtacaatagaagtcgtcaagcagcaataactaaagaactaattgaaattatatcaggagcagaaagtttataat

SEQ ID NO: 272749 - DNA, 924 bp, Unknown
  Bacterial polypeptide expressing nucleotide sequence isolated from the Sargasso Sea
actttattgtatttatgttgcgattggtcaaaaaagatcaacagttgcacaaattgttaaaactttagaagataacggagcaatggaatacacgatcgttgtatctgcaactgcatcagaacctgcgcctttacaattcttatctgcatacactggttgtacaatgggtgagtattttagagataacggtatgcatgcactaattgtttatgatgatttatcaaaacaagcagttgcataccgacaaatgtctttacttttgagaagacctccagggcgtgaagcgtacccaggagacgttttctatattcatagtcgtcttttagaaagagcagcaaaaatgagtgatgagcatggtggtggaagtctaactgccctgccgattattgaaactcaggctggtgacttatctgcttatattccaacgaatgttatatctattacagatggacaaatattcttggaaacaaaccttttttttgctggtattcgacctgcgattaacgttggtttgtcggttagtcgtgtcggatctgccgcgcaaacaaaagcaatgaaaaaaattgctggtccagtaaaactggaacttgcacagtatcgtgagatggctgcatttgctcagtttgcatcagatcttgatgcatccacaaaacaactacttgatagaggtgcgagacttgttgaaattttaaaacaaggtcagtattcaccgctaacagtatcagagcaagttgtatctatctatgccggtgttcgaggatatttagataaagtagctgtaggtgatgttgtgcgttttgaaactgaggccctaaatgaagttagaactaatcattctgacttattagacgctatcgctaatgaaaaagaattatcgcaagaaaatgatgataaattaaaatcaatcttagataatcttgtaga

SEQ ID NO: 272750 - DNA, 940 bp, Unknown
  Bacterial polypeptide expressing nucleotide sequence isolated from the Sargasso Sea
atttaatgaccaatcaacagaaactgaaatacttgtaacaggtattaaagtaattgatttacttgcaccttacgcaaaaggtggaaagattggattatttggtggagcaggagtaggaaaaacagttttaattatggaattaattaataacgtcgcaaaagctcatggtggtttttcagtttttgcaggagttggagagagaactagagaaggaaatgatctttatcatgaaatgatagagtctggagtaattaaaaaagaaggagctggttcaaaagctgctctagtttatggacagatgaatgaacctcctggagcaagagcaagagttgcacttactgggttaactgttgctgaatacttcagagaccaggaaggtcaggacgtacttttctttgtagataatatttttagatttactcaggcaggatcagaggtttcagctttgttaggaagaattccatctgctgttggatatcaacctacattagctactgacatgggtaacctgcaagaaagaattacgactacaaacaaaggatcaattacatctgtacaagcaatttatgtgcctgctgatgatttaacagaccctgctccagcgacatcgtttgctcacttagatgcaacgactgtactttcaagacaaattgcggaaattggtatttatcctgcagtagacccacttgattctacgtcaagaattttagatccaagaatagttggagatcagcattatagagtagcacgagatgttcaaagaatactacaatcatataaatcactacaagatattatagctattcttggtatggatgaattatctgaagaagataaactagttgtggcaagagctagaaaaatccagagatttttatctcaaccattcttcgttgcagaagtatttactggttcaccagggaaacttgttgatcttgac

SEQ ID NO: 272751 - DNA, 859 bp, Unknown
  Bacterial polypeptide expressing nucleotide sequence isolated from the Sargasso Sea
tcaatctacagaaactgaagttctagtaacaggaataaaagtagttgatttactggcaccttatgcaagaggtggtaagataggactatttggtggagcaggtgttggaaagacagttttaattatggaattaattaataatattgcaaaggcacacggaggatattcagtttttgctggtgtcggtgaaagaacccgcgaaggtaacgacttgtaccatgaaatgattgagtcaggaattattgacttaaaaggtaaggactcaaaagttgctcttgtttatggtcaaatgaatgaaccacctggagcaagagctagagttgccctttcaggattgactcaagcagaatattttagagatgaagaaggtcaggatgtcttattctttgtagataacatttttaggtttactcaagcaggttcggaagtatctgcactacttggacgtattccctcagcagttgggtatcaacctacacttgcaactgatatgggagcattacaagaacgaattacaactacaaaaaaaggatcaatcacttcagttcaagctatttatgttcctgctgatgatttaacggatcctgctcctgctacttcattctcacatttagatgcaacaacagttttgaatagagcaatttcagaaaaaggtatctatcctgctgttgatccacttgattctacatcaagaattttagatccacaagttgtaggagatgatcattatagagtagctagagaggttcaaagagtacttcagacatataaaagtcttcaagatattatagctatccttggaatggacgaactatctgaggaagataaagttaacagttgcaagagcaagaaaaattga

SEQ ID NO: 272752 - DNA, 853 bp, Unknown
  Bacterial polypeptide expressing nucleotide sequence isolated from the Sargasso Sea
atggaaataaatccttcagaagttacaaaaatattaaaagaacaaattaaaaattttggtgataaagcagaagtcacagaagttggtcaagttttatcagttggagacggtattgctaggatttatggtttggataatgttcaagctggtgaaatggtagagtttgcagatggttcaaaaggtatggctctaaacttagaaagtgaaaacgttggtgttgtaatttttggtgatgacagaaatgttaaagaaggggatgtagtaaaaagaacgggtaatattgttgatactccagttggaaaagaattattaggaagagtagtggatggtttaggaaatcctattgatggaaaaggaccattagataaaggaattaaaaaaagcagggttgaagtaaaagctcctggtattattccacgacaatcagtaagtgaaccaatgcaaactggtcttaaatcaattgacagtctagttccgattggaagagggcaaagggaattaattatcggtgatagacaaactggtaaaacagcagttgcagtagatgcaattattaatcaaaaaaaaatcaatgaatctggtgatgaaaaacaaaaactgtattgtatatacgttgcagttggacaaaaaagatcaacagtaagacaaattcaaaaaacattagaagaagctggagctatggagtacacaacaatcgttgctgctactgcatcggactctgctcctttacaatttttagcaccatacacaggttgtgctatgggagagtattttagagataatggaatgcatgcgttaataatttatgatgatttatctaaacaagcagttgcttatagacaaatgtcattgc

SEQ ID NO: 272753 - DNA, 649 bp, Unknown
  Bacterial polypeptide expressing nucleotide sequence isolated from the Sargasso Sea
ctgcacagtcgcttgctggaaagatcttgcaaactaagtgatgaacttggcgcaggttcactgacagcactaccgattattgaaacccaagctggagatgtatcagcatacattcccacaaacgtgatttcaattactgatggacagatttttctaagtacagaccttttcaattctggagttcgtcccgcaattaacgttggtctgtcagtgtctcgagtaggtggtgcggcccaagttaaagcagtaaagcaagtagctggtactttgcgtcttgaccttgcacagtacagggaaaaagaagcctttgcccagtttggtagtgacttagaccaggctacccaaaaacagcttcaacgtggacaacgcctggtagaaattctgaagcaaccacagtatcagccaatgccctgggtggatcaagctatttccatttttgctgcaacgaacggattcctagacgatcaaccaatcaacaagctaggcaaatttgaatctgaattcttaacatttatacaaaccaaaaaagctgatttacgtaaatcgatcgaagaaaaagaaatgattgatgaaactgcggaaacggaattgaaatccgcgttgaatgaatttgcagaagctttttctgcagaaaacagttccacttaat

SEQ ID NO: 272754 - DNA, 695 bp, Unknown
  Bacterial polypeptide expressing nucleotide sequence isolated from the Sargasso Sea
agacgttttgttttttgttgataatatatttagatttacacaagcaggttcagaggtttcggcacttttagggagaattccatcagctgtaggataccaacctactttggccacagacatgggcaatttacaagaaagaattacaactacgaacaaaggttcaattacttcagtccaagcaatttatgttcctgcggacgatttaaccgatcctgctcctgctacttcatttgcccatttagatgctactacagtactctcaagacaaattgcagaattaggaatttatccagcagtggatcctttagattcaacgtctagaattttagatcctagaatagtaggtgaagagcattaccgagtggcgagagaagtacaaaaaatattacaaacctataagtctttgcaggatataattgctattttaggtatggacgaactttccgaagaagataaattaacagtagctagagcaagaaaaattcaaagatttttgtcccaaccattttttgttgctgaagtttttacgggtacaccaggaaaacttgtagatttagaagcaacaatcaaaggctttgacgctatatgtaaaggggaatatgatcatttaccagaaactgctttttatatggtaggaacaatagaagaagctgtagaaaaggcagaaaaaatggccaaggaagcagcggcttaat

SEQ ID NO: 272755 - DNA, 604 bp, Unknown
  Bacterial polypeptide expressing nucleotide sequence isolated from the Sargasso Sea
gcaaaactaagtgatgaacatggtggaggatcactaacagcacttccaataattgaaacccaagggggtgatgtttctgcatttattccaacaaatgtaatttcaattacagatggccaaatatttttagaaacagaactttttaaccaaggtattagaccagcaattaatgttggtttgtctgtatcgagggttgggtcttcagctcaaacaaaagctatgaaaaaagtatctggttcgatgaaacttgagctagcacagtacagagaaatggctgcttttgctcaatttggatcagatttagatgcctctacgcagcagctacttaatagaggttcaaaattgactgaacttttaaaacaaaaacaatattcaccactgacggtcgcagagcaagtggtatctgttttttgtggagttaaaggttatttagatgatattaatttgaaagatattgcagagtttgagtctaaaataattgaaaagtgtaaatctgataagcctgaaataattgaatcaattcaaagttctggaaaacttgaagaagataaagaaaaactattaatagaagtaatcactcaactcaaacaaaactttaagtaat

SEQ ID NO: 272756 - DNA, 729 bp, Unknown
  Bacterial polypeptide expressing nucleotide sequence isolated from the Sargasso Sea
tgaggttaagactaaagaaagttggccaattcatagagctgcacctgaatttaatgaccaatcaacagaaactgaaatacttgtaacaggtattaaagttatcgatttgcttgcgccttatgcaaaaggtggaaagattggattatttggtggggcaggagtaggaaaaacagttttaattatggaattaattaataacgttgcaaaagctcatggtggtttttcagttttcgcgggagttggagagagaactagagaaggaaatgacctttatcatgaaatgattgagtccggagtaattaaaaaagaaggagctggttcaaaagctgctttagtttatgggcagatgaatgagcctccaggagcaagagcaagagttgcacttactggattaactgtagctgaatactttcgagatcaggaaggtcaagacgtacttttcttcgtagataatatttttagatttactcaagcaggttcagaggtttcagctttattagggagaattccatctgctgttggatatcagccgacattagctactgacatgggtaacctacaggaaagaattactactacaaacaaagggtcaatcacatctgtgcaagcaatttatgtacctgctgatgatttgacagaccctgctcctgccacttcttttgctcacttggatgcaacaactgtactctcaagacaaattgcggaaattggtatttatcctgcagtaga

SEQ ID NO: 272757 - DNA, 939 bp, Unknown
  Bacterial polypeptide expressing nucleotide sequence isolated from the Sargasso Sea
caggcaactgaatctgaaatattagaaactgggattaaagttgttgatttgttagctccttatgcaaaaggtggaaaaataggtttgtttgggggagctggtgttggtaaaacagttttgattatggaacttattaataacgtcgcaaaagctcatggtggatattctgtatttgctggagttggtgaaagaaccagagaaggtaatgacttatataatgaaatgatagagtctaacgttattattccagatggtccaggatcaaaagccgcccttgtttatggtcaaatgaatgagcctccaggtgcaagagcaagagttggactaacaggcttaacattggcagaatattttagagatgaagaaggtcaggatgttctgtttttcgtagacaatatttttagatttacacaagcaggctcagaagtgtccgcacttttagggagaattccttctgctgttggatatcagccaacgctttcaacagacatgggtgctcttcaagaaagaattacaacaaccacaaaaggatcgataacatctgttcaagcaatatatgttcctgctgatgatttaacagatcctgcacctgcaacttcttttgctcaccttgatgctacaacagtattatcaagagcaatttctgagaagggaatttacccagcagttgatccacttgattctacttcacgaatgttagacccaagaatagtcggtgatgaacactatgaaacagcaagatctgttcagtcaattctccaacaatacaaagcgttacaagatattattgctattttaggaatggatgaactatctgaagaagataaattaactgttgcccgcgcaagaaagattgaaagatttttatctcagccttttcatgtagcagaagtttttactggttcacctggaaagttagtatctttagaggacacaata

SEQ ID NO: 272758 - DNA, 866 bp, Unknown
  Bacterial polypeptide expressing nucleotide sequence isolated from the Sargasso Sea
aatgatcaatcaacagaaactgaaatacttgtcacaggaataaaggttattgatcttttagcaccctatgcaaaaggtggtaaaattggtttatttggtggagctggagttggtaaaactgttttaattatggaattgattaacaacgttgcaaaagctcacggtggattttcagtttttgcaggagtaggagaaagaactagagagggaaatgacctttaccatgaaatgatagattcaggtgttattaaaactgatggggaaggctctaaagcagcattagtttatggacaaatgaacgagcctccaggtgcaagagcgcgagttgctttaactggattaactgttgctgagtattttagagatcaagaaggtcaagatgtgctattcttcgttgataatatatttaggtttacacaagcaggatctgaggtttctgcattgcttggtagaataccttcagctgtaggatatcaaccaacattagcaactgatatgggtaacttacaggaaagaattacaacaacgaataaaggttcaattacatctgttcaggcaatttatgttcctgcagacgatttaactgaccctgcacctgcaacttcatttgctcacttagatgcaacaacggtactttctagacagattgctgaaattggaatttacccagcggtagatccattagactcaacgtctagaattttagatcctagaatagttggtgatgaacattatagagttgctagagaagtacaaaaagttctgcaaacttataaatctttacaagatattatcgcaattttaggtatggatgaattgtcagaagaggataaattagttgttgctagagctagaaaaatacaaag

SEQ ID NO: 272759 - DNA, 670 bp, Unknown
  Bacterial polypeptide expressing nucleotide sequence isolated from the Sargasso Sea
cccaggacgtgaagcttatccaggagatgtattttacttacacagtagattacttgaaagagctgcaaaattaagcgatgaacatggtggtggatcactaacagcacttccaattattgaaactcagggtggagacgtatcagcgtttattcctaccaatgtaatttcaattacagatggccaaattttcttagaaacagaattatttaatcaaggtattagaccagcaattaatgttggtttgtcggtatctagagttggatcatcagcacaaacaaaagctatgaaaaaagtttctggatcaatgaaattggaattagcccaatatagagagatggcagcatttgctcaatttggatctgatttagatgcgtctactcagcaacttttaaatagaggttccaaattaactgaacttttaaaacaaaaacaatattcaccaatgactgttgcagaacaggtaatatctgttttctgtggtgttaaaggttatcttgatgatgttgacttaaaagatgttgctgaatttgagggcaaaattattgaaaaatgtaaatcagataaaccagaaataattgagggaattcaaggttcaggaaagctagatgatgataaagaaaaactacttatagaggtaattactcaattaaaaggaacttttaaatcttaa

SEQ ID NO: 272760 - DNA, 294 bp, Unknown
  Bacterial polypeptide expressing nucleotide sequence isolated from the Sargasso Sea
tatggcaagtttagacgatctaaaaaaaagaatagctagcgtaaaatctacacaaaaaattaccaaggcaatgaaaatggttgcggctgccaaattgagaagagctcaagaaagtgctgagaaaggaagaccttattctgaaaaaatgaataatgttatttcaaatctctctaatggaatatctgataaagaaaatgctccaaaattactatcaggaacaggccatgataaagtccatttatgtgtggtaatgacctcagacagaggtctttgtggtggttttaattctaacat

SEQ ID NO: 272761 - DNA, 565 bp, Unknown
  Bacterial polypeptide expressing nucleotide sequence isolated from the Sargasso Sea
ctccgtgttcggtggtgtggtgagcgcacccgtgagggcaacgacctttacgaggaattcaaggagtccggcgtgatcaacgccgacgacctctccaagtcgaaggtggctctctgctacggccagatgaacgagccccccggcgcccgcatgcgcgtgggtctctccgctctgaccatggccgagcacttccgcgacgtgaacaagcaggacgtgctgctgttcgtggacaacattttccgcttcgtgcaggccggttccgaggtgtccgcactgctgggccgcatgccttccgctgtgggctaccagcccaccctgggtaccgacgtgggcgccctgcaggagcgtgttgcttccaccgtggaaggttcgatcacctcgatccaagccgtttacgtgcctgcggacgacctgaccgaccccgcacccgccaccacgtttgctcacctggacgccaccacggtgctgaaccgtgccctggcctccaagggcatctatccggctgtggatcccctggactccaccagcaccatgcttcagcccgccgttgtgggcgatgagcact

SEQ ID NO: 272762 - DNA, 517 bp, Unknown
  Bacterial polypeptide expressing nucleotide sequence isolated from the Sargasso Sea
aatggaaattaatccgtcagaagtaacaaaaatattaaaagaacaaattaaaaaaattggagataaagcagaagtttctgaagttggacaggttttatcagttggtgatggtattgctagaatttatggattggataatgttcaagctggagaaatggttgaattttcagatggatctaaaggaatggcacttaatttagaaagtgacaatgttggagttgttatttttggtgatgataaatctgttaaagaaggtgataatgtaaaaaggacaggcgcaattgtagatactcctgtaggtaaagaattattaggaagagttgtggatggtttagggaatccaattgatggaaaaggttcattagacaaaggagtaaaaagaagtagagtcgaagtaaaagctcctggaattattcctagaaaatcagttagtgaaccaatgcaaacaggtttaaaatctattgacagtctagttccaataggaagaggtcagcgtgaattaattattggagataga

SEQ ID NO: 272763 - DNA, 664 bp, Unknown
  Bacterial polypeptide expressing nucleotide sequence isolated from the Sargasso Sea
gataggtttgtttggtggagcaggagtgggaaaaacagttatcattatggagctgattaacaatatagcaaaggctcatggtggcttctcagttttcgcaggagtaggagagagaacacgagaagggaatgacttatatcacgagatgattgaatcgggagttataaaacctgatggcaaagggtcaaaagcagcacttgtatatggacagatgaatgaacctccaggtgcacgagctagagtaggattaactggattgacagtggcagaatattttagagataaagaaggtcaggatgttttattttttgtagataatatttttagatttactcaggctggctcagaagtatcagctttgttaggaagaataccttctgccgtgggttatcaaccaactttagctactgatatgggaaatttacaagaaagaataactacaacaggaaagggttcaattacatcagtacaagctatatatgttccggctgatgacttaacagacccagctccagcaacatcattctctcacttagacgccacgacggttctatctagacaaatcgctgaacttggaatctacccagcagtagatccattagattctacttcgagaattttagatcctagaattgttggtgaggaacattatcgagtagcaagg

SEQ ID NO: 272764 - DNA, 913 bp, Unknown
  Bacterial polypeptide expressing nucleotide sequence isolated from the Sargasso Sea
aacaatattgcacttcagcattctggtctttcagtatttgcaggggttggagaaagaaccagagagggaaacgatttctattacgaaatgcaggaatctggtgttgttaatatcgacaaactaagcgagtcaaaagttgcaatggtatatggacaaatgaacgagcctcctggcaataggctaagagtggcgctaactggcttaacaatggcagaaagttttagggatgaaggaaaagatgtgctgttatttattgataatatttaccgttacactcttgcaggggttgaggtatcagctttgcttggaaggatgccttcggctgttggatatcagcctaccctagctgaagaaatgggggcccttcaagaaagaatcacctctacaaagactggatctataacgtctatccaagcagtatatgttccagctgatgatttaaccgacccttctccagcaactacatttgctcatttagacgcaacagttgttctttcaagacagatttcagaattgggcatatatcctgctgtcgatcccttggattcaactagcaggcagcttgatccatttgttgttggcgatgagcactatgaagttgcacaaggagttcaaaaaatactacagagatataatgagcttaaagatattattgctatccttggaatggatgagctctctgaagaagataaaggtttggtagctcgagcaagaaaagctcagagattcttatcacaaccattttttgttgcagaaatttttactggcacacctggaaaatatgtttcattagatgacaccataaaagcttttaaaggtattttaaatggtgactatgatcaccttccagaacaagctttctacatggtgggaaccattgaagaggcagtggagaaggccaaagacttataat

SEQ ID NO: 272765 - DNA, 844 bp, Unknown
  Bacterial polypeptide expressing nucleotide sequence isolated from the Sargasso Sea
atgcaaattaacccatctgaaataacaaaaattttaaaagaacaaattaaaaagtttggtgaaaaagccgaaatatctgaagttggccaagttctttctgttggagatggaatcgcgagagtttatggattagataatgtgcaagctggtgaaatggttgaattttctgatggatctaaaggaatggctttaaatttggaaagcgacaatgttggagtggttatttttggagatgacaaatcaataaaagaaggtgacgttgtaaaaagaacgggagctattgttgacactccagtaggaaaaaaattacttggcagagtcgttgatgcacttggcaatccaatcgacggaaaaggtgatttagataaaaagttagaaaggaaaagagttgaggtaaaagcaccaggaataatcccgcgtcaatcagttaatcaacctatgcaaacagggcttaaggctattgatagtcttataccaataggtagaggtcaaagagaattaataataggtgatagacaaacaggaaagactgctgttgcaattgatacaattataaatcaaaaggagataaataaatctggtgatgaaaaaaataaactttactgtatttatgttgcgattggtcaaaaacgttccacagtagctcaaatagtaaaatctttggaagacgcaggagctatggagtatacaactatagtatcagcaacagcttcagatccagctccacttcaatttttggcaccttatacaggatgtactatgggagaatattttagagataatggaatgcatgccttaataatttatgatgatttatcaaagcaagcggttgcttatagacaga

SEQ ID NO: 272766 - DNA, 649 bp, Unknown
  Bacterial polypeptide expressing nucleotide sequence isolated from the Sargasso Sea
taaggttcatttatgtgtagtaatgacatcagatagaggattatgtggaggcttcaattctaatataattaaaaaagctaaaagttatttctcaaaaattttaagcgaaggaaaagagcttaaaatcataactgtaggttcaaaaggaaatgatcagttaaagagaatgtatggtgataaaattattgagaatatttctttcaaggagtcaaaaaatgctaattattttgatgctgacaaggttggcaagataataatagacaaatttgtgagtagtgaatttgatatatgcactattttttataatcaatttaaaaacgtaattactcaaattcctcaagcccaacagataatccctctaaatagtgagaatagtgaggataatacttcagaggaaagttatgaatttgaaccagatgaagatgagattttgagtaatttattgccaaaaaatatttcaacacaaatatttaaagcaatgttagagaattcagctagcgaacaaggatcaaggatgagtgcaatggataacgcgacccgaaacgcaggtgaaatggttgacaaacttactatccagtataatagaagtcgtcaggcagcaattacaaaagaactaatagaaattatatcaggagcagaaagtttataa

SEQ ID NO: 272767 - DNA, 739 bp, Unknown
  Bacterial polypeptide expressing nucleotide sequence isolated from the Sargasso Sea
agattggtcttagaggttgctcagcatttaggagaatcgagtgcaagaacaatagctatggatagtacagaaggtttaaaaagaggtgatgaagtagttgatactggaaaaccaatacaagtcccagttggtcctgaaacattaggcaggataataaatgtaattggcgaacctatagaccaaaaaggaaatgttcaaacaaaagaaaattggccaatacatagacaagcaccttcatttaatgatcagtctacagaaacagaaattttagtaactggaattaaggtaattgatttattagcaccatatgcaaaaggtggaaaaataggtttatttggtggagcaggagttggcaagacagttattataatggaattaataaataacattgcaaaagcgcacgggggcttttctgtgtttgcaggagttggagaaagaaccagagaaggaaatgatctttatcacgaaatgattgagtcgggagtaatcaaaccagatggtgatggttcaaaagctgcattagtatatggccaaatgaacgaaccgccaggtgctagagcaagagtagctttaacaggattaacagttgcagagtattttagagatcaagagggccaggacgttttattttttgtggacaatatttttcgttttacacaagcgggctctgaggtttctgcgctattaggaagaataccctctgcagtaggctatcaacctactttagcaactgatatgg

SEQ ID NO: 272768 - DNA, 649 bp, Unknown
  Bacterial polypeptide expressing nucleotide sequence isolated from the Sargasso Sea
tagttccgtaagtgctgatagaggtttgtgtggcggatttaacagcagtataaatagagaaacttttaaattagttaaatcacttgagggcaatggaaaaaaagttcagctaatgccagttgggaaaaaaagtagagatttttttaatagagtaatgaaagatcaaattattgatagctttgttgatttaaatgtttcaagtactggatacgaatctgcattaaatatttcaaataaacttcaagaattatactttgatgaaaaatttgataaatgcatattagtatttaacaaattcaaatcagctatttctcaagaagtaacacagcaacaattaataccattagatgtttcgagttctgaaaaagaagaagaaaaagaaaattcttcaaatgcaatttacgattatgaacctgatgaagaaacaattttaaaagacctacttccaaaaaatgtttccattcaagtatttaaagtactattagagagtgatgcgggagagcagggtgctagaatggcggcaatggataatgcaacccgaaacgcgggcgaaatgatagatagtttaacattaaagtataatagaacgcgacaagcgtttatcacaaaagaattaatagagattatttctggagctgaatcgatataa

SEQ ID NO: 272769 - DNA, 868 bp, Unknown
  Bacterial polypeptide expressing nucleotide sequence isolated from the Sargasso Sea
taaaactaaggaaaggtggcctatacacagagaggccccgaaatttacagatcagtctactgaaactgaaattttagagacaggaatcaaagtgatcgatcttttagcaccttattccaaaggtggaaaaataggattattcggtggagcaggtgttggaaaaacagttattatcatggagctaattaataacattgctaaggctcacggaggattttcggtatttgcaggagtaggtgaacgaacaagagaaggaaatgatttatatcacgaaatgatagagtcaggagtaattaaaccagagggaaaaggctctaaagctgctttagtttatggccaaatgaatgagcctcctggtgctagagcaagagttggattaactggattaacagttgccgaatattttagagataaagagggtcaagatgttttgtttttcgttgataacatatttagatttacacaagcaggttctgaagtttctgcattattaggaaggataccctcagctgttggttatcaaccaacattagccactgacatgggaaatttacaagagagaatcacaactacaggaaagggatctatcacttcagtgcaagctatttatgtacctgctgatgacttaacagaccccgcgccagctacgtcattttcacatttagacgcaacgactgttctttcaagacaaatagctgaactaggaatatatccagctgttgatccacttgattctacctcaagaatcttagacccaagaattttaggagaggaacattatagagtagcaagacaagttcaaaaaattttacaaacttataaatctcttcaagatataatagcaattctaggtatggatgagctttcc

SEQ ID NO: 272770 - DNA, 739 bp, Unknown
  Bacterial polypeptide expressing nucleotide sequence isolated from the Sargasso Sea
gtttatgatgatttatcaaagcaagcagtagcatacagacaaatgtctcttttattaagaagacctcctgggcgtgaagcatacccaggtgatgtattttatattcatagccgtcttcttgaaagagctgcgaaaatgagtgatgaacacggtggtggaagtctcacagcattaccaattattgaaacacaagccggtgatttatctgcatatattcccaccaatgttatatcgattacagatggacaaatttttcttgaaaccaatttattttttgcaggaattagaccagcaatcaacgttggtctttcagttagtcgtgttggctcagctgctcaaactaaagcaatgaagaaaattgctggtccagtgaagcttgagctagcacagtaccgtgagatggctgcttttgcacagtttgcatctgatttagatgcttctactaagcaacttctagatagaggggcaagacttgtggaaatcttaaaacaaggtcagtattctcctttaactgtatctgagcaagtagtatctatttatgcaggagttcgtggatatttagataaagttgatgtttcagatgttgttcgatttgaaacagaagctttgaatgaggtaaggtcaaatcacagtgatttgttagaagctattgcaaatgagaaagagttatcaaaagaaaatgatgataaattaaaatcaatcttggatagtcatgttcaaaaatttacgagtaaataat

SEQ ID NO: 272771 - DNA, 740 bp, Unknown
  Bacterial polypeptide expressing nucleotide sequence isolated from the Sargasso Sea
aatatcacaagttcttggggctgttgtggatgtagagttcgatagcgaactgcctgcaatcatgaatgccttagaagttgataataatggaacaagattgatgctagaggtcgctcagcatttaggtgaaaacgcagttcgaacaattgctatggacacaactgacggattagtaagaggtcaaacagcaacagatacaggtgccccaatttctatgcctgtaggaccagaaacacttggtcgtataatgaatgttgttggtgagcctgttgatgaaagaggtgacattggagcaacaaaaacttatcccattcatcgacctgcccctgagtttgttgatcagtctacagaaacagaagtacttgttacaggaattaaagttgttgatttattagcaccctatgctcgaggtggtaaaattggattatttggtggagcaggagttggtaaaactgttttgattatggagttaattaataatattgcaaaagcacacggtggctattcagtttttgctggagttggcgaaagaacacgtgaaggtaatgatctttatcacgaaatgattgaatcaggtattattgatcttaaaggcaaagactcgaaagttgcattagtttatggtcaaatgaatgaacccccaggagcaagagcaagagtagcattatctggactaacacaagcagaatactttagagatgaagaaggtcaagacgtactattttttgttgataatattt

SEQ ID NO: 272772 - DNA, 572 bp, Unknown
  Bacterial polypeptide expressing nucleotide sequence isolated from the Sargasso Sea
tatgccaaaaaatggaaaaatttcacaggtaatgggcgcagttgttgatgttgtctttgaagacggtcatttaccagatatctataatgctttaaaagttgatagaggagaagagggaactcttgttttagaggtagcacagcatcttggtgattcggttgttcgaacggttgcaatggatactacggatggattagttcgtgggcatgttgtagaagattctggcgaacccatttctgttcctgtaggagaaaaaaccctaggacgtttgtttgatgttttaggaaatactattgatcaaaaaggcgactgcgaaactgaaaaaagaaaccctattcaccgtcctgcaccaaagcatgaagatttagctacatcaactgaagccctagtgactggtattaaggttgttgaccttatggagccgtacaccagaggtgggaagactggtttgttcggtggtgctggtgtggggaaaacagttttgattcaagagttaatcagaaatattgccacggagcatggtggatattcagtatttgcaggagttggagaaagaactcgtgaggggaatg

SEQ ID NO: 272773 - DNA, 835 bp, Unknown
  Bacterial polypeptide expressing nucleotide sequence isolated from the Sargasso Sea
tcacttacctgaaattttgaatgcacttaatacagacaacaatggtaagacgctcgtgcttgaagtcgctcagcacctgggtgaaaacacggtgcgcacaattgcaatggatgctactgaaggcctagttaggggacaagaggttattgatacggcaggaccgatttctgtaccagttggcaacgctactttgggtcggattgttaatgttgttggtgagcctgttgatgaacaaggtcccgttaagtcagatgaataccgtgcaattcaccaaccagctccagagttcgctgaacagtctacagagtcagaagtcttggttacaggtatcaaagttatcgatctgctcgcaccctactcaaaaggtggcaaaattggtttgttcggcggcgctggtgttggcaagaccgttctgattatggagttgataaacaatattgccaaagtacactccggcttctctgtatttgcgggtgtgggtgagcgtactcgtgaaggtaatgatttgtatcacgaaatgattgagtctaatgttattaaaccagataatcttgaggaatcccaggttgctcttgtctatgggcagatgaatgagcctccaggtgctcgtgcacgcgttgcactgactggtctgactttggctgagcagttcagagaccaatctggtacagatgttttgttttttgtagacaatatttttaggttcacacaggctgggtctgaggtttctgcgctacttggtcggataccttcagccgtggggtatcagcctacacttgccactgacatgggagcaatgcaggaacgtattacttctacaaaaaatggatctatt

SEQ ID NO: 272774 - DNA, 952 bp, Unknown
  Bacterial polypeptide expressing nucleotide sequence isolated from the Sargasso Sea
gtcaagggattagtattaaacttagaagaggataatgtaggtgcagtattgatgggggattccagtaatataaaagaaggagatactgttaagagatcaggagaaattgcctcaattgatgttggtgatggagtatgtggtagggtattagatacccttggaaacccgattgatggtcaaggtccaataaaaggaaaagtatttactatgcctctagaaagaaaagctccaggcgttgtatatagacaacctgttaatgaaccattacaaacggggataaaagcaattgattctatgattccaattggaagaggccaaagagagttaattattggagatagacaaacaggtaaaactgctgtagcaatagatactatactaaatcaaaaagaattttatgataaaggggagccggtttattgtatttatgttgcttgtggacaaaaagcttcaacagtagctcaagtaacaaatatattagagaaaaacggagcactgccgtatacaactgttgtttctgctccatcttctgcaccagctcctatgcaattttttgcgccttttgctggggcagcgataggtgagtattttagggatacaggtagacctgcacttgtaatttttgatgatttatctaagcaagctgtttcttatagagaggtttctttattactaagaagaccacctggtagagaagcatatcctggagatgtattttatttacattcaagactattagagagatcagctaaaataataaatgatgataagttagcagcagacatgaatgatctacctgattcacttaaaggtatggtgaaaggtggaggatcacttacagcattaccaattattgaaacacaagaaggtgatgtttctgcatatattccaacaaaaatgttatttcaattactgatggccaaatattttcttgaatctaatttattaactc

SEQ ID NO: 272775 - DNA, 962 bp, Unknown
  Bacterial polypeptide expressing nucleotide sequence isolated from the Sargasso Sea
cttattattgggtgatagacagattggaaaaactgctgttgctgtcgatacaataatcaatcaaaaagatacggacgtaaaatgtatttacgttgctattggtcagaaatcatcaacagtagctgaagttgtagagagatttgaacaagagggagtgcttgataaagttgttatcgttaacgcaccagcttcagcagctgcagcattgcagatgtatgctccttatgctggttcagctattggtcagcactggatgtacaatggcgaacacggtctaattgttttcgacgacttatccaaacaagctattgcatatcgtcagatttcattacttctaagacgacctcctggaagagaggcatatcctggtgacgttttctatcttcactcaaggttattagaacgttgtgcaaaagtaagtgaagaacttggcggaggatcactaactggtctcccaattattgagacaaaagctggtgacgtttcagcattcattccaactaacgtgatttccattacagatggacagatttatttggaatcagaactcttttattctggtgtaagacctgctgtaaaccctggtacatcagtatcaagagttggtggtgcagcacagactaaggctatgaaaaaagtctctggtcctttaagaattaaccttgcacagttcagggagttagaggcatttgctgagttcggatctgacttagatgcagcatctcaagcacagcttgatagaggtagaagagttgttgagttgctaaaacaaccacagtatcaaccagtacctatggaagagcaagtggtttcactatacgcagtgacagagggattccttgatgtagtggatccagctgatatcccacaagctgaacaagatttgattgattttgtgaaaacaagacactctgatgttattaaattcataaaaacaactggtgaattgcctggagaaagaa

SEQ ID NO: 272776 - DNA, 535 bp, Unknown
  Bacterial polypeptide expressing nucleotide sequence isolated from the Sargasso Sea
ggatctattacatcagtgcaagcaatatatgtacctgctgatgatttgactgacccggcacccgcaacatcgtttgctcacctagatgcaacaactgtattgtcaaggcaaattgcagaacttggaatttatccagcggttgatcccttagattcaacttctagaattctagaccctagaattgttggagatgaacattatagagtagcaagagaagttcaaaaaattcttcaaacatataaatctttacaagatatcatagcaattttgggcatggacgagttatcagaagaagataaattaattgttgcaagagcgagaaaaatccaaagatttttatcacaaccattttttgtggctgaagtttttacaggatctccaggaaaattagttgatttagagtctactattaaaggcttcgatgcgatttgtaatggtgaatatgatcatttaccagaagctgctttctatatggttggtacaattgaagaagcgattgaaaaagctgagaagatggcaaaagatgttgcttaat

SEQ ID NO: 272777 - DNA, 421 bp, Unknown
  Bacterial polypeptide expressing nucleotide sequence isolated from the Sargasso Sea
atgagtaaaaatggaaaaattgttcaagtaatcggggctgtagtcgacgtgcaattcgatggcgatttacctgaaattctaacagctttagaaggcgataacagtggcaataagataatattggaagtcgcacaacatttgggtgaaaatagtgtgagaactattgcaatggatagtaccgaaggtcttaaaaggggtgatattgttcaaaatactggggcacccataagtgttccagttggcccagaaactctaggaagaattataaacgttataggacagccaattgatcaaaaaggtgaagtgaaaaccaaagaaaaatggcccatacatagagaggctcctaaatttacagatcaatcaactgaaacagaaattctagaaaccggaataaaagttattgatcttttagctccatact

SEQ ID NO: 272778 - DNA, 669 bp, Unknown
  Bacterial polypeptide expressing nucleotide sequence isolated from the Sargasso Sea
ccggacgcgaggctttccctggtgatgtattttatctgcatagtcgattgttagagcgagcatctaaattatcaaaagaacatggaggaggctcactgacagcccttccagtcattgaaacgcaagagggagatgtttcggcatacattcctacaaatgtaatttcgatcacagatggtcaaatttatttagagactaatctatttaattctggtattcgtccagcgattgatgtaggcctttcggtatctcgtgtaggtggtaatgctcagattaaggcaatgaaaaaagtcgccggtacccttcgtttagatttggctcaatacagagaattagaggctttcgcaaagtttggttcggatctagataaatctactcttgctcagctaacacgcggagagagaatggttgagattctgaagcagaaccaatacgtgcctatggctgtagaaaaacaggtggcaataatttttgctgcttctaaaggttatttagacgacatagctgcagacaaagtagatgaatttgaaagtggtctttttaactatttagatgctaatgcggctgaaaagttaaaggcaattcgtgatgagggtgatattagtgaagaaaacagtgatgctttagataaagcgatttctgattataaaaatagtttttctggatagg

SEQ ID NO: 272779 - DNA, 568 bp, Unknown
  Bacterial polypeptide expressing nucleotide sequence isolated from the Sargasso Sea
atgaataaaaacttaggaaaaattaaacaaataataggacctgtagtagatgtagagtttgaaggtgaactgccacctattctaaatgccttacatgtaaatgtaggtgataacagagtggttatagaggtagcacagcatcttggtgaaaatacactaagatctattgctatgtcagcaacagaaggtcttaaaagaggagcagaggttatagacacaggagcgccaatacaagttccagtgggtccggaaacacttgggagaataacaaatgttgttggtgaaccaatcgatgaaataggagagataaaagcaaaaaaaacatatcctattcacagacaggctccaaagtatatagagcagtcaactaatacagaaatgttagttactggaattaaagttgtagatcttttagctccttactcaaaaggaggaaagataggtttgtttggcggagctggtgtaggtaaaacagttcttataatggaacttattaataatgttgcaaagggtcatggaggatattctgtatttgcaggagttggtgaaagaactagagaaggaaacg

SEQ ID NO: 272780 - DNA, 730 bp, Unknown
  Bacterial polypeptide expressing nucleotide sequence isolated from the Sargasso Sea
atggaaataaatccttcagaagtaacaaagatattaaaagaagaaattaaaaattttggaaataaagctgaggtatctgaagtaggtcaagtattatcagttggagatggtattgctagaatatatggtcttgataatgttcaagctggagaaatggttgaattttcagatagctcaaaaggaatggcattaaatttagaaagtgacaacgttggtgttgtaatctttggcgatgataaagcaattaaagaaggagatactgctaaaagaacaggagcgattgtcgatactcccgtgggaaaagaattattgggtagagttgttgatggcttgggcaatcctattgatggcaaaggtgcccttgccaaaagtacaaaaagaagcagagtagaaattaaagcaccaggaattattccacgtaagtctgtcagtgagcctatgcaaacaggattaaaatcaattgatagcctagttccaattggaagaggacaaagagaattgattattggtgatagacaaactggtaaaactgcagttgcaattgatgcaattatcaatcaaaaaaaaattaatgaaactggagacgaaaaacaaaaattatattgtgtatatgttgcaattggtcagaaaagatcaacagtaagacaaattgaaaagactttagaagaagcaggagcaatggaatatacaacaatcgttgccgcaacagcatcagatgcagccccactca

SEQ ID NO: 272781 - DNA, 743 bp, Unknown
  Bacterial polypeptide expressing nucleotide sequence isolated from the Sargasso Sea
tatgagcaaaggaataattacacaggttattggagcagtagtagatgttaaatttgatggagaacttccagaaattttaacagcattggaatgtaaaaatggaaacaacagattagttttagaagtagcacaacacttgggtgaaactacagttagaactattgcaatggatgctactgaaggtttaaaaagaggtgatgaggtaaccaatactaacgcacctatacaagttccagtaggacctgaaactcttggaagaattattaatgtgattggagagccaatagacgaaagaggagaagttaaaactaaagaaagctggcctattcatagaggtgcacctgaattcaatgatcaatcgactgaaactgaaatacttgttactggtattaaagtaattgatttgcttgctccttatgcaaaaggaggaaaaattggtttgtttggcggtgctggtgttggaaaaactgttttgattatggagttaatcaataacgttgcaaaagcacatggtggcttttcagtttttgcaggtgtaggagaaagaacaagggaaggaaacgatctttatcatgaaatgattgagtctggtgttatcaaacaggacggaccaggatctaaagcagcattagtttatggacaaatgaatgaacccccaggcgctagagctagagtggcacttacaggattgactgtagcagaatattttagagatcaagagggacaagatgtacttttctttg

SEQ ID NO: 272782 - DNA, 703 bp, Unknown
  Bacterial polypeptide expressing nucleotide sequence isolated from the Sargasso Sea
tatagacaaatgtctctattattaagaagacctccaggaagagaggcatacccgggagatgttttttatattcatagtcgtttgcttgaaagagcagcaaaaatgagcgaagaacatggaggaggaagtttaactgctctgcctgttattgaaacacaagctggcgatttatctgcgtatattccaacaaatgtaatatcaattactgatggacaaatctttttagaaacaaatttattttttgctggcataagacctgccattaacgttggtctttctgtaagccgcgttgggtcagcagcacaaactaaagcaatgaaaaaaatagcaggatcagtaaaattagaattagcgcaatatagagagatggcagcttttgctcaatttgcatctgatttagatgcttcaactagaaaacttttagatagaggagctagattaacagaacttcttaagcagggtcaatattctcctttgacagttcctgaacaagtagtttcaatatatagtggagtgaatggatacttagatgacatttcaattaatgatgtaaatcattttgaaagtgaagctttgtctgaaataaagtctaaacattcagatattttggaatctatagaaaaagaaaaagaattatcagatgaaaattcatcaaaacttaaatcattttttgatgcatttgtaggtaaatttaaaaaatagt

SEQ ID NO: 272783 - DNA, 953 bp, Unknown
  Bacterial polypeptide expressing nucleotide sequence isolated from the Sargasso Sea
tgcacctgaatttaatgatcaatcgactgaaacagaaatactagttacaggtattaaggtaatcgatttactcgctccttatgcaaaaggtggaaaaattggattatttggtggagctggagtcggtaaaacagttttaattatggaattaattaataacgttgcaaaagcacatggtggtttttccgtttttgcaggagttggagaaagaacaagagaaggcaatgatttgtatcatgaaatgatggagtcaggtgtaataaaaccagaaggtcctggttcgaaagcagctttggtatatggtcaaatgaatgaacctccaggtgcaagagcaagagtagccttaacaggtttgaccgttgcagaatattttagagatcaagaaggtcaagatgttttgttctttgttgataatatctttagattcactcaagcaggttcagaagtttcagcacttttgggaagaattccttcagcggttggatatcagccaactttggcgactgatatgggaaatttgcaagagagaataacaactactaataaggggtctattacttccgttcaagcaatttatgttcctgcggacgacttaacagatccagcgccagccacatcttttgctcacttagatgctacaacagttctttcaagacaaattgctgagataggtatttatccagctgtagatcctctagactctacatctagaattcttgatcccagaatagttggtgacgaacattacagagtagctcgtgaggtacaaaaaattttacaaacttacaaatctcttcaagatattattgcaattctaggaatggatgaattatcagaggaagataaattagtggttgcaagagcaagaaagatccaaagatttttatctcaacctttctttgttgcagaagtttttacaggttctcctggaaaactagtagatttagagtcta

SEQ ID NO: 272784 - DNA, 877 bp, Unknown
  Bacterial polypeptide expressing nucleotide sequence isolated from the Sargasso Sea
atgccaagtttagatgatttaaaaaaaagaattaaaagtgttaagtcaacacaaaaaataactaaagctatgaaaatggttgctgcagcgaaattgagaaaggcccaagaaagcgctgaaaaaggcaggccatatagtgaaaaaatgttaaatattattttaaatctttcaaaaacaattgaaaaaaatagtgacgcacctaaacttatttctggtagtggaaaagataatacgtatttatgtgtggttatgactgctgatagaggattatgcggtggctttaatacaaatatttgcaaattagcaaagaaaaaatttaaaaattttttaaaagatgggaaacaaattaaaattattacagtaggcactaaaggatatgatcaaattaaaagagaatatggaaaatttataattaaacaaataagtttgaaagataaaaagaaaattacctttaaagacgcagacgagataggcgcaaatattattacattatttgaaaataaagaatttgataagtgtatattgttttataataattttaaaaatgttataactcagataccacaatcgcaacaaattattcctgttgaacttaaattagattcaaaaactaatgaaaaccaaaatatattttatgaatttgaacctgatgaaactgagatattagaagaacttcttccgaaaaatatttctactcaaatttttaaagcttttttagaaaatgctgctagtgagcaaggttcacgtatgacagctatggataatgccacaagaaacgcaggagatttagttgataaattgacaattaattataataggagcagacaggcatctattacaaaagaattaattgagattatttcaggagcagaaagtt

SEQ ID NO: 272785 - DNA, 635 bp, Unknown
  Bacterial polypeptide expressing nucleotide sequence isolated from the Sargasso Sea
gatttctgctgacagaggtttgtgtggaggattcaacaataatatttctaaagaagtaagaagaagagttaaagaactagaaaatggtggtaaaattgtaaaactaattttagttggaagaaaaattggatcagttctaaaacgtgaaatgggtgatagaataataggctcttttacaggaattcaaggtgacaatttaacgtttactaaagtttctccagtttcattgcaaatattatctctttttgaagaaaataatgtagatgaagtcgaaatgctctataatcgttttcaatctgtaatttctcaagtagttacaaaaaaacaacttattcctgcagaagtaagtgacaaaaaaattgaagaagaagatcaacaaactacatatgagtatgaacctgaggaagaaataattctgaatgacttgcttcctaggaatttatcaacacaaatttatagtgcgttgctagaaagttcagcaggtgaattagcagctagaatgacagcaatggataatgctacaagaaatgctggtgaactaattgatagattaaccttagagtataatagaacaagacaggcttttataacaaaagaattaatcgaaataatatctggtgcagaagcagtatgat

SEQ ID NO: 272786 - DNA, 689 bp, Unknown
  Bacterial polypeptide expressing nucleotide sequence isolated from the Sargasso Sea
actcttacgtcgtccaccaggtcgtgaagcatatccaggagatgttttctattgccatagtcgtttgcttgagagggctgcaaaactttctgatgctatgggtgcaggatcaatgacatccttgcctattattgaaacgcaggctggtgatgtttctgcttatatcccaactaacgtcatatcaattactgatggtcagattttcttgagctcagatttattcaactctggattaagacctgcaattaacgttggtatatcggttagtcgtgtaggcggagctgcgcaaacaaaagctattaagaaaattgccggtacgttaaaacttgaactggctcaatttgatgaacttgcggcattctctcaatttgcttcagatcttgatgaggctactcaaaagcaactaggtagaggtaaaaggctaagagaacttctcaagcagcctcaatttgatcctctaaatttagctgaacaagtagctattgtttatgcaggagttaaaggattgattgatgaggttcccgaggaggaagtggttaagtttgctcgtgaattgcgtgattatttaaaaacaaacaaggctgatttccttaaaaatgttctttccgaaaaagtattaagtgaagcatctgaatcaatgcttaaagacgctattagcgaggttaagtcctccatgcttgcggcttaaa

SEQ ID NO: 272787 - DNA, 658 bp, Unknown
  Bacterial polypeptide expressing nucleotide sequence isolated from the Sargasso Sea
ttctaaaattagccttttaattattaattcctcagaccgaggtttgtgtggtggttttaactcaaatctttttagaaacgcaaaaaattggattagtgaacagcaaggaaagggtaaatctgttaaaattataactgttggaaaaaaagcctcaagcttttatagaaaaacagatttagatgtaattgcaaattttgatgatttaaattctaatgacaaacaacttcaagtttcagaagaaattaaaaataaaattatggagctctttgaaaataatgaaatagacgaggtttcaattttatttaataagtttgtctctgtgattgcacaagagccaacatatcagtcattaattcctttaagcaatgatgaagctgacgaagaagtgaccgatactagtaacgctgtttttgaatttgaacctgataaaaatgaactactagagtatttggttccaagaaattttttaactcaaatttatagaagtgttcttgaaagttctgcatcagagcatgcagcaagaatgacttccatggacaatgcaacaagaaatgctggagatatgattgatgggttgacattaacttacaatcgaacaagacaagcattcattacaaaagaacttatcgaaattatttcgggagcagaagctgtttag

SEQ ID NO: 272788 - DNA, 574 bp, Unknown
  Bacterial polypeptide expressing nucleotide sequence isolated from the Sargasso Sea
tttaacagcacttccaattattgaaacacaaggtggtgacgtatcagcgtttattccaactaacgtgatttcaattactgatggtcaaattttcttggaaactgaactttttaaccaaggaatcagaccggcaattaacgttggactatcggtttctagagttggttcttcagcacaaacaaaagcgatgaaaaaagtttctggatcaatgaaattggaattagcccaatacagagagatggctgcttttgctcaatttggttctgatttagatgcttcaacacagcaacttttaaatagaggttcaaaattaactgaacttcttaaacaaaaacaatattcaccaatgacagtagctgaacaagtaatttcagttttttgtggagtaaagggatatttggatgatattgaattaaaagatattgctgagtttgaaaacaaaatcattgaaaaaagtaggtctgataaacctgaaataattgactcaattcaaagcacaggtaaacttgaagatgataaagaaaaattactaattgaagtaattacccagttaaaggaaaactttaaatcttaa

SEQ ID NO: 272789 - DNA, 418 bp, Unknown
  Bacterial polypeptide expressing nucleotide sequence isolated from the Sargasso Sea
gatgagtggttccctcaccctccgcgttctttcccccgacaagaacgtttttgatggcagcgctgatgaggtgattttgcccagcaccactgggcagctgggcattcttcccggccacatttccctcctcaccgccatcgatgtgggtgttcttcgggtgcgtgcagacggtggctggaattccatcgccctgatgggaggcttcgctgaggttgatgccgacgaagtgacggttctggtaaacaacgcagaactcggcagcacgattgatcccagcgtcgctgaaagcgaactccaggctgcttctacagccgttaccggcatggaaggccaacctgcatcacctgagaaggtgaaagcacaacagcagttgagtctggccaaggcccgggttcaagccagcaaatccagcgactga

SEQ ID NO: 272790 - DNA, 739 bp, Unknown
  Bacterial polypeptide expressing nucleotide sequence isolated from the Sargasso Sea
atgtcaaaaaatataggtaaagtttcaaaagtaattggagctgttgttgatgttgaattctcatcaaaagaaagtacactgcctgagatatatgactcacttgagattaaaagagaagatggtactatcttagttcttgaggttcaatctcacataggtgaaaatattgttagaacaatatcaatggattcaactgatggactcagcagaggtacagaagctgtagcaacaggtaacccaatacaaatgccaattggtaaagaagtttatggaagactttttaatgttgttggcgacccaattgatggtcttgaagtattgcctaaaattaatgatgacgggatgtctatccataggcaagctcctgactttgatcaactatcaacatctactgaagttttgtttacaggaataaaagttattgatcttattgagccatatgctaaaggtggtaagattggattatttggtggagctggagtaggtaaaacagtactaattcaggaactaataaataacatcgcaaagggtcatggaggtctttctgtatttgcaggagttggtgagcgaactagagaaggtaatgacctattgagagagatgatagaatcaggaattataaattatggtgatgattttaaaaagtctatggaagcaggtgaatgggatttaagtaaagttgataaaaaggcattactagagtcaaaagctacctttgtgtttgggcgaaatgaatgag

SEQ ID NO: 272791 - DNA, 727 bp, Unknown
  Bacterial polypeptide expressing nucleotide sequence isolated from the Sargasso Sea
tgctggcgtgggtgaaagaactagagaaggaaatgacctttatcatgaaatgatagagtcgggtgtaattaagccagagggtacaggatcaaaagctgctctagtttacggtcagatgaatgaaccaccaggggcaagagctagagtggcgttatcaggattaacagttgctgaatattttagagaccaagaaggtcaagatgtactttttttcgtagataacatatttagatttactcaagctggctcagaggtttcagcgttacttggaagaattccatctgctgtaggataccaaccaacattagctacagatatgggaaatctacaggaaagaattacgactacaaataaaggctctataacatcagttcaagctatatatgtgccggcagacgatttaacagatccagcacctgctacatctttttcacacttagatgccacaacagtgttatctagacaaatcgcagaaattggaatttatccagctgtagaccctttagactcaacttctagaattttagatccaagaatagttggagacgagcattatagagttgctagagaagttcaaaaagtattgcaaacttataagtctttacaggatattattgccattttaggtatggacgaattatcagaagaagataaactgactgtagctagagctagaaaaattcaaaggtttttatcacaaccattttttgttgcagaagtttttact

SEQ ID NO: 272792 - DNA, 268 bp, Unknown
  Bacterial polypeptide expressing nucleotide sequence isolated from the Sargasso Sea
atggctaacaatttaactggaaaaatatcacaagttctcggagctgttgttgatgtagagttcgatggtgaacttcctgcaatcatgaacgctctagaagttgataacaacggaacaagattaatgctagaggttgctcagcatttaggtgaaaacgctgttcgtacaattgctatggatacaacagatggactagttagaggtcaaacagctactgatacaggtgcccctatttcaatgcctgtaggcccagaaactcttaggtaga

SEQ ID NO: 272793 - DNA, 750 bp, Unknown
  Bacterial polypeptide expressing nucleotide sequence isolated from the Sargasso Sea
tatggaaattaaaactgatcaattaacaaaattacttcgtgagcaaattgataaattcgaaggctcctttaatgtatctgaagttggtgaggtgattgaaattggagatggcgttgcccgtatatcgggccttgaaaatgtgatgagctcagagcttgtagaacttccaaatgatatttttggtatggctcttaatcttgaggaagacaatgttggaatagtattatttggagattctcgtttagttaaagaaggtgatttagcaaaacgaacagggaaagtggtagaagtacccgttggggattcaatgctcagcagagtggtgaatccactaggacaagctattgatggacgaggagaaattgacacctctgaaactttaccaattgagagaaaagccctaggtgtgatggcgcgtagtccagttaaacaaccacttcaaactggaattaaggctattgacagcatgatacccataggtcgaggtcaacgcgaattgataattggtgaccgacaaaccgggaagacagctgttgcaattgatacaattataaatcaaaaagatacacataataccgatagtcctgtttattgtatttacgttgctattgggcaaaaagcatcaaccgttgcagcattagttaaagaacttgaaaataatggagctatggattatactactgttgttgcagcgaatgcttctgacccagctcccatgcaatacattgcgccttatgctggtgctgcaat

SEQ ID NO: 272794 - DNA, 390 bp, Unknown
  Bacterial polypeptide expressing nucleotide sequence isolated from the Sargasso Sea
tatggctaataatttaactggaaaaatatcacaagttctcggggctgttgtggatgtggagttcgatggtgaacttcctgcaattatgaatgctctagaacttgataatgatggaacaagactaatgcttgaggttgctcagcatttaggtgaaaatgcagttcgaacaattgcaatggatacaactgatggactagtaagaggtcaagcagtaacagacacaggagcccccatttctatgcctgtaggccccgaaacacttggccgaatcatgaatgtaattggagagcctgttgatgaaagaggcgatattggaactacaaaaacttaccctattcaccgacctgcccccgagttcgttgaacagtctacaagaacagaggtcttggt

SEQ ID NO: 272795 - DNA, 568 bp, Unknown
  Bacterial polypeptide expressing nucleotide sequence isolated from the Sargasso Sea
atggaaataaatccttcagaagttacgaaaatattaaaagaacaaattaaaaattttggtgataaagcagaagttacggaagttggtcaagttttatcagttggagatggtattgctaggatttatggtttggataatgttcaagctggtgaaatggtagagtttgcagatggctcaaaaggtatggctttaaacttagaaagtgaaaacgttggtgttgtaatttttggtgatgacagaaatgttaaagaaggtgatgtagtaaaaagaactggtaatattgttgatactccagttggaaaagaattattaggaagagtagtggatggtttaggaaatcctattgatggaaaaggaccattagataaaggaattaaaaaaagcagggttgaagtaaaagctcctggtattattccacgacaatcagttagtgaaccaatgcaaactggccttaaatcaattgatagtttggttccgattggaagagggcaaagggaattaattattggtgatagacaaactggtaaaacagcagttgcagtagatgcaattattaatcaaaaaaaaa

SEQ ID NO: 272796 - DNA, 895 bp, Unknown
  Bacterial polypeptide expressing nucleotide sequence isolated from the Sargasso Sea
gttgggacgagtagtggatggtctggcaatccactcgacggcaaaggttctattcaatcaaaagatagaagtgtggcagatgttaaggcgccaggaattatccctcggaaatctgttcacgaaccaatggctactggactgaaatcagttgatgccatgatcccaattggcaggggtcagcgagagcttattattggtgatcggcaaactggtaaaactgccgtggctttggacacaatacttaatcaaaagtcctataatgatgctgctggagatgacgatagtaagaagttgtactgcgtatatgtggccgttggccagaaaagatctaccgtggctcagctcgtcaaaaagttggaagaaagtggagcaattgagtattcgatcgttgttgcggccactgcatctgatcccgcgccaatgcagtttcttgccccgtatgcagcgacatcaatggcggagttttttagagataatggaaagcatgctctaataatatacgatgatttatcaaaacaagcggttgcgtatcgtcagatgtcgttgctattacgtcgaccacctggccgtgaagcttatcctggtgacgtgttctatctacactctagattgttggaaagatctgcaaaactgagtgatgatcacggaaacggttcgctaaccgctcttccaataattgaaactcaaggtggtgatgtatctgcatttatcccaacaaacgtgatttcaattactgacggccaaatattcttggaaacagagctcttctatcaaggtatacgaccagcagttaacactggcctttcagtttcccgcgtgggctcatctgctcaaacagactctatgaaatctgtagctgggccggtcaaactttcgttggcgcaatacagagaga

SEQ ID NO: 272797 - DNA, 686 bp, Unknown
  Bacterial polypeptide expressing nucleotide sequence isolated from the Sargasso Sea
aatgaatgactcacttagagcagaggaaattacaaatattattagagagagaatctcaaattttgaaaccagattaaaagttgatgaagtaggaacagttcttactgttggagatggtgttgctagagtttttggtttgaaaaatgtagaggccggtgaacttgttgagtttgcatctggtactaaaggaatggttctaaatttagaaagcaataatgtgggtgttgccattttaggggatgatcctaaaattaaagaaggatcttctgttaaaagaacagagaaaatcgttcaagttccagtcggagatgctttattaggacgagtggttaatgctatcggtgagcctatagatggtttaggtgaaattcaaactgaagaatctcgtatcgtagaattaaaagcacctggtattatagcaagaaaatctgttcatgagcccttgcaaacaggacttaaggctattgattcaatgattcccattggtcgtggacaaagagagttaattataggtgatagaaaaaccggtaaaaccgctgttgccattgatacgattattaatcaaaaaggcaagaattgtgtatgtatctatgttgcgataggacaaaaacaatcaactgtacgtttagtacatcaaaaacttaaagaagctggtgctttagattatacaataattgtttctgcta

SEQ ID NO: 272798 - DNA, 859 bp, Unknown
  Bacterial polypeptide expressing nucleotide sequence isolated from the Sargasso Sea
attatgggggacaggcagactggaaaaactgcagtcgccattgacgcaatcattaaccagaaaggaacagggattaaatgtatatatgtggcgattggtcaaaaagcatcttcaattgcaggagtagtaagaaagcttgaagaagaaggtgccatggaacatacgatagttgtcgccgccgccgccgccgattcacctgcaatgcaatacatagctccatactcaggaacatcaatgggcgaatactttttggataatggcgaagacgcgttaataatttttgatgatttaactaagcaagcttgggcatatcgtcaggtctcactactattgagaagacccccaggaagagaagcctatccaggggatgttttttacttgcattcgcgtctgcttgagagggcatcaagggtgagtgaggagcatgtggagtctgtctcgggcggaaaaataaaaggtaaaactggctcattgacagcgctgccaattattgaaactcaagctggagacgtttctgcatttgtaccgacaaatgttatttcaattacagacggacaaattttcttagagactgatctatttaatgctggcatcaggcctgcgataaacgcagggctatcagtatctcgtgttggtggttcagctcagacgaagataataaaaaaattaggtggtggtattcgtttggctttagcacaataccgagagttggcagcatttgctcaatttgcatctgacttagatgaggcgacaagaaagcagcttgaaaggggtcaacgtgccactgaactgatgaaacaaaaacaatactcaccactttcagtatcagagatggccttatcattattcgcagtcaatg

SEQ ID NO: 272799 - DNA, 853 bp, Unknown
  Bacterial polypeptide expressing nucleotide sequence isolated from the Sargasso Sea
tttgtatcatgaaatgattgaatcaggagtaataaaaactgacggaaaaggatcaaaagcagcacttgtttatggacagatgaatgaacctccaggagcaagagcaagagttgctttaactggattgacggttgccgaatattttagagataaagaaggtcaagacgttttattcttcgtagacaatatatttagattcactcaagccggttcggaagtatcagctctattaggaagaattccttccgccgttggatatcaaccaacacttgctacagatatgggtaatttgcaagaaagaattacttctacagacaaaggttctattacctctgttcaggccatttatgttcctgctgatgacttaacagacccagcgcccgctacatctttctcacacttagatgcaacaacagtattatcaagacaaatcgcagaaataggaatttatcctgctgtagatccgttagactcaacttcaagaatattagatccaagagtagttggagaagagcattatagagtagctagagatgtgcaaaaaattttacaagcatataaatctcttcaagatattatcgctattctaggaatggatgaactctccgaagaagataaattaactgttgctagagcaagaaaaatacaaagatttttatcacaacctttttttgttgcagaagtttttacaggctctcccggtaagcttgtagatttagatgcaactataaaaggcttcgattctatttgcaaaggagaatacgatcatttgccagaggcagccttttatatggtcggtggcatagaggaagtagtagaaaaagctaataaattgaaaaaagaaagtaaataa

SEQ ID NO: 272800 - DNA, 745 bp, Unknown
  Bacterial polypeptide expressing nucleotide sequence isolated from the Sargasso Sea
aatggaaataaatccttcagaagtaacaaaaatattaaaagaacaaattaaaaaatttggtgacaaggcagaagtaactgaagtcggacaggttttatcggttggtgatggtatcgctagaatatatggcttagataacgttcaagctggagaaatggttgaattttctgatggttcaaaaggtatggcattaaacttagaaagtgacaatgttggtgttgtaatttttggagacgatagagctgtaaaagaaggtgatacagtaaaaagaacaggggcaattgtagatacacctgtgggaaaagaattattaggaagagtagttgatggattaggaaatccaatagatggtaaaggtgcactagacaaaggaataaaaagaagcagagttgaagttaaagcaccgggtataattccaagaaaatctgtaagtgaaccaatgcaatcaggactgaaatcagtagatagtttagttccaattggaagaggtcaaagagaattaattataggtgatagacaaacaggaaaaactgcagttgcaattgatactataattaatcagaaaaaaataaatgagtctaacgatgaaaaacaaaaactatattgtatttatgttgcaattggtcaaaaaagatcaactgtaagacaaatagaaaaatctttggaagaggctggagctatggaatatacaactatagttgcggcaacagcatcagatgctgcgccacttcaatttttagctcct

SEQ ID NO: 272801 - DNA, 469 bp, Unknown
  Bacterial polypeptide expressing nucleotide sequence isolated from the Sargasso Sea
tgaattatttaatcaaggcattagacctgcagtaaatgttggcctatctgtctctcgagtaggttccgcagctcaaacaaaagcaatgaaaaaagttgctggttctattaaattagaattagcccaatatagagaaatggctgcatttgctcaatttggatcagatcttgacgcatctacacagcaattgcttaatagaggatctaaactaactgaattattaaaacaggatcaatattctccaatgacagtagctgagcaagttatatcagtatttactggagttaaaggttacttagatgacgttgatttaactaaaataaaaaatttcgaaaaagacataattgaaaagatcaaatctgataaaccagaaataatagagtctatagaaaaatctgggaaacttgaggaaaatattgataaggcgctttcatcattaattgacgattataaaaaaggaagcaaataa

SEQ ID NO: 272802 - DNA, 386 bp, Unknown
  Bacterial polypeptide expressing nucleotide sequence isolated from the Sargasso Sea
aatgccaagcttagatgacttaaaaaaaagaataaaaagtgtcaaatcaacacaaaaaataactaaggctatgaaaatggtagcagctgcaaaacttagaaaagcacaagaaaatgcagaaaaaggaagaccatacagtcaaaaaatgcaaaacataatattgaacttaacaaaatcaattaacgacccacaaaatgctccaaaattattagtaggaactggaaaagatgacacttatctatgtgtagttttgacagctgatagaggattgtgcggcggatttaattctaatatctgcaaattagccaaggctaaatttaaagatattttaaaagaaggaaaaaaattaaaaataattactgttggatctaaaggactagatcaaa

SEQ ID NO: 272803 - DNA, 847 bp, Unknown
  Bacterial polypeptide expressing nucleotide sequence isolated from the Sargasso Sea
gaaagaggtgtggtaaagactaaagagagctggccaattcatagggctgcacctgaatttaatgaccaatcaacagaaactgaaatacttgtaacaggtattaaagtaattgatttacttgcaccttacgcaaaaggtggaaagattggattatttggtggagcaggagtaggaaaaacagttttaattatggaattaattaataacgtcgcaaaagctcatggtggtttttcagtttttgcaggagttggagagagaactagagaaggaaatgatctttatcatgaaatgatagagtctggagtaattaaaaaagaaggagctggttcaaaagctgctctagtttatggacagatgaatgaacctcctggagcaagagcaagagttgcacttactgggttaactgttgctgaatacttcagagaccaggaaggtcaggacgtacttttctttgtagataatatttttagatttactcaggcaggatcagaggtttcagctttgttaggaagaattccatctgctgttggatatcaacctacattagctactgacatgggtaacctgcaagaaagaattacgactacaaacaaaggatcaattacatctgtacaagcaatttatgtgcctgctgatgatttaacagaccctgctccagcgacatcgtttgctcacttagatgcaacgactgtactttcaagacaaattgcggaaattggtatttatcctgcagtagacccacttgattctacgtcaagaattttagatccaagaatagttggagatcagcattatagagtagcacgagatgttcaaagaatactacaatcatataaatcactacaag

SEQ ID NO: 272804 - DNA, 715 bp, Unknown
  Bacterial polypeptide expressing nucleotide sequence isolated from the Sargasso Sea
aatgtcaaaaaatataggtaaagtttcaaaagtaattggagctgttgttgatgttgaattctcatcaaaagaaagtacactgcctgagatatatgactcacttgagattaaaagagaagatggtactatcttagttcttgaggttcaatctcacataggtgaaaatatcgttagaacaatatcaatggattcaactgatggactcagcagagggacagaagttgtagcaacaggtaacccaatacaaatgccaattggtaaagaagtttatggaagactttttaatgttgttggcgatccaattgatggtcttgaagtattgcctaaaattaatgatgacgggatgtctatccatagacaagctcctgactttgatcagctatctacatctactgaagttttatttacaggaataaaagttattgatcttattgagccatatgccaaaggtggtaagattggattatttggtggagctggagtaggtaaaacagtactaattcaggaactaataaataacatcgcaaagggtcatggaggtctttctgtatttgcaggagttggtgagcgaaccagagaaggtaatgacctattgagagagatgatagaatcaggaattataaattatggtgatgaatttataaagtctatggaagcaggagaatgggatttaagtaaagttgataaaaaggcattattagagtcaaaagcaact

SEQ ID NO: 272805 - DNA, 721 bp, Unknown
  Bacterial polypeptide expressing nucleotide sequence isolated from the Sargasso Sea
gtattttagagatgaacaaaaacaagacgttttgctcttcgttgataatatatatagatatattcttgctggtatggaagtttctgctttactaggtcgaatgccttcagctgttggttaccaaccaactctatcaactgaaatgggagatcttgaagaaagaataactactactgtaaatggttcaattacttcttttcaagcagtttatgttcctgcagatgactacacagatcctggaattgttacaacatttggtcacttagatgcaaatgtttctttagatagatctctcgcagctcaatttttatttccagcagtagatcctctagcttctaattctagaataatggaaccagcaattgttggagaagatcattacaatgcagcaagaggagtccaacaagttctacaaagatataaagatctccaagacgttatagctattttaggaatagatgaattgtcagaagaagatcaaataatagttgcaagagcaagaaaaatacaaagatttctaactcaacccttctttgtaggagaagtttttacaggaattccaggaaaatatgtacctgtagctgacaccgtaagaggatttttagaaattattgatggaaaacatgacgatctgccagaacaagcgttttatatggttggaggtatagaagaagctgtagctaaagctgaagaaatgaataagcaaatagaaagtaaatag

SEQ ID NO: 272806 - DNA, 721 bp, Unknown
  Bacterial polypeptide expressing nucleotide sequence isolated from the Sargasso Sea
gatgatttatcaaaaacaagctgtagcatacagacaaatgtcacttttattaagaagacctccaggaagagaggcttaccctggagatgttttctacctacacagtagacttttagaaagatcagcaaaattaagtgatgctaatggaggcggttcattaactgcattaccaattattgagacacaagctggtgacgtttctgcttatattccaacgaatgtaatttctattacagatgggcagatatttctagaaacagaattatttaatcaaggaattagaccagcggtaaatgttggtttgtctgtatcacgagtaggatctgctgctcaaactaaagcaatgaaaaaagtagctggctcaatcaaactagaacttgctcaatatagagaaatggcagcatttgctcaatttggatcagatttagatgcttcaactcaacaattattaaaccgaggagcaaaattaacagagttgttgaaacaagaccaatactccccaatgacagttgcagaacaggtagtttcagtttttgccggagtaaaagggtatctggatgacattgatttagaaaatattaaagtttttgaaaaggatataattgaaaaaattaaaaatgataaaccagaaatcattgaagcaatccaatcttctggaaaattagaagaagatacagaaaatcaattaaaacaagttatagagaaatataagaaaaagtaa

SEQ ID NO: 272807 - DNA, 358 bp, Unknown
  Bacterial polypeptide expressing nucleotide sequence isolated from the Sargasso Sea
atggtttccatccgtcccgacgagatcagcgccatcctcaaacaacagattgaggactacgacaagtcggtttccgttagcaacgtcggctccgtcctgacggtgggcgacggcatcgcccgcgtctacggcctgcagcaggccatggccggtgagctcctcgagttcgaggatggcaccgaaggcatcgctctgaatctggaagacgacaacgtcggcgcggtgctgatgggcgagggcctgggcattcaggaaggcagcacggtgaaggccaccggcaagatcgcctccgttcccgttggcgaggccatgctcggtcgcgtcgtcaactccctgggccgcgccatcgacggcaagg

SEQ ID NO: 272808 - DNA, 837 bp, Unknown
  Bacterial polypeptide expressing nucleotide sequence isolated from the Sargasso Sea
aagagagtaagatgtattgcaatggatactactgatggaattaaaagaggtgcaaaggttcttgatactggtaatcctattagtgtgcctgtaggaaaatctgccctaggtaggatgatgaatgttgttggagaaccaattgatggaaaaggtgcaatagagtcaaacgagttaagcccaattcacaagcctgccccatctttccaagatcaaagtaccaaaactgaagtctttgctacaggtattaaagttattgaccttttagctccatttttaaaaggtggaaagattggattatttggtggtgctggagttggaaaaacagttttattgatggagcttataaataatgttgctaaagaatcaggtggatattccttctttgctggagttggagaaaggacaagagaaggtaacgacttatatatggaaatgaaggaatctggtgttttagctaatacaggtcttgtatttggacaaatgaatgagcctccaggtgcaagagcaagggttgctcttactggattgactcaagctgagtattttcgagataaagaaggacaagatgttttattatttgtagataatatctttagatttactcaagcagggtcagaagtttctgctctattaggaagaattccttcagctgttggatatcaacctacattggctactgatttaggtgccttgcaagaaagaattacttcaaccgttaagggctctattacttctgtccaagcaatttatgttcctgctgatgatcttacagaccctgctccagcaaccacttttgctcatttagatggaacaattgttctatctagggcactagct

SEQ ID NO: 272809 - DNA, 199 bp, Unknown
  Bacterial polypeptide expressing nucleotide sequence isolated from the Sargasso Sea
ttatctaaacaagcagttgcttatagacaaatgtctttattattaagaagacctcctggtagagaagcatatcctggagatgtattttatttacacagtagattacttgaacgtgccgctaaactaaacgataaaagcggtggtggatctcttacagctttacctataattgaaactcaagcaggtgatgtctctgctt

SEQ ID NO: 272810 - DNA, 564 bp, Unknown
  Bacterial polypeptide expressing nucleotide sequence isolated from the Sargasso Sea
aatggaaataaatccttcagaagttacaaaaatattaaaagaacaaattaaaaattttggtgataaagcagaagtcacagaagttggtcaagttttatcagttggagacggtattgctaggatttatggtttggataatgttcaagctggcgaaatggtagagtttgcagatggttcaaaaggtatggctctaaacttagaaagtgaaaacgttggtgtcgtaatttttggtgatgacagaaatgttaaagaaggggatgtagtaaaaagaactggtaatattgttgatactccagttggaaaagaattattaggaagagtagtagatggtttaggaaatcctatcgatggaaaaggagtattagataaaggaattaaaaaaagcagggttgaggtaaaagctcctggtattattccaagacaatcagtaagtgaaccaatgcaaactggtcttaaatcaattgatagtctagttccgattggaagagggcaaagggaattaattattggtgatagacaaactggcaaaacagcagttgcagtagatgcaattattaatcaaaa

SEQ ID NO: 272811 - DNA, 860 bp, Unknown
  Bacterial polypeptide expressing nucleotide sequence isolated from the Sargasso Sea
ggacgcaacagagggtcttaaaagaggtgatgaagttatagatactggagcacctataagcgtgccagttggccctgaaacactaggaagaattataaatgttgttggtgagtctatagatgaaaaaggtgatgttaaaacaaaagaaaaatggccaatacacagggcagccccaaaatttacagatcaagctactgaaactgaacaattagttacaggcataaaagttatcgatcttctagcaccatatgctaaaggtggaaaaattggattattcggtggagccggagttggaaaaactgtaacgatcatggaattaattaataacattgcaaaagcgcacggtggtttttcagtctttgcaggtgttggtgaaagaactagagaaggaaatgatttgtatcatgaaatgatagagtcgggagtaattaaaactgaaggcaaaggatcaaaagcagcacttgtttatggacagatgaatgagcctccaggagcaagagcaagagtcgccctaactggattgacagttgcagagtactttagagataaagaaggtcaggacgttttgttcttcgtagataatatatttaggttcactcaagcaggatcagaagtatcagctctgttaggaagaattccctcagcagtgggttatcaaccaacgctagctacagatatgggtaatttgcaggaaagaattacttctacggacaaaggctcaattacttctgtacaagctatctacgttcccgctgatgacttgaccgatccagcaccggcaacatctttttcacacttggatgctacaacagtattatcaagacaaatcgccgaaataggaatttatacctgctgttgat

SEQ ID NO: 272812 - DNA, 881 bp, Unknown
  Bacterial polypeptide expressing nucleotide sequence isolated from the Sargasso Sea
accgctccagtagaagtcgtagctcctggtgtgattgcaagacagtcagttgatcaaccggttcaaattggcttaaaagcagttgatacaatggtgcctattggtcgtggtcaaagagagctaattattggtgatagacaaaccggcaagactgctgttgcggttgatgcaatcatcaatcagaaaggaactggtatcaaatgtatatatgttgctattggccaaaaacaatcaacagtagttaatgttgttaaaaagcttgaggaatatggagcgctagaacatacaattattgtttcagcatcagcatctgatcctgcacctatgcaatatctttctgcctactcaggttgttcaatgggtgaatattttagggataaaggtgaagacgcattgattgtctatgatgacctctctaaacaagctgttgcgtataggcaggtatctttgcttttaaagagacctccgggaagagaggcctacccaggagatgttttttatcttcattcaagattgctagaaagagctgctagggtgaacgcagattatgtggaaaaaattaccaacggaaacgtgaaaggaaaaactggatctttaaccgcacttccgattatcgagacacaggcaggagatgtgtcagcctttgttccaaccaacgttatatcaattactgatggtcaaattttcttagaaactgacctctttaattcaggtattaggccagctattaacccgggtatttctgtttcaagggtgggtggagcagctcaaaccaagattatgaaaaaacttagcggaggcgtaagaactgcattagctcaatatagagaactcgcagctttttctcagtttgcttctgatctagatgatgcaaccaaagc

SEQ ID NO: 272813 - DNA, 617 bp, Unknown
  Bacterial polypeptide expressing nucleotide sequence isolated from the Sargasso Sea
tatggctaacaatttaactggaaaaatatcacaagtacttggagcagttgtagatgtagaatttgatggagaacttcctgctatcatgaacgcacttgaagtagataataatggtaatcgactaatgttagaagttgcacaacatttaggagaaaacgctgtccgtacaattgccatggacgttacagatggtttggtcagaggccaaacagcaacagacacaggtgcccctatttcaatgcctgtaggccctgaaacgttaggacgtataatgaatgtagtaggagagcctgttgatgaaagaggtgaaattggaacaaaaaaaacatatcctattcatagatctgcgcctgaatttgttgatcaatctactgaaacagaagttttagttaccggtattaaggtagttgatcttttagcaccatatgcaagaggtggtaaaattggactttttggtggagcaggtgttggtaaaacagttttaattatggagttgattaataatattgcaaaagcacatggtggttattctgtttttgcaggagtaggagaaaggactcgcgaaggaaatgatctttatcatgaaatgattgagtctggtattattgacttaaaag

SEQ ID NO: 272814 - DNA, 592 bp, Unknown
  Bacterial polypeptide expressing nucleotide sequence isolated from the Sargasso Sea
gcggttggttatcagccaaatctcgcagaagagatgggcgtacttcaagaaaggatcacctctacgaaaacagggtcaataacatcaattcaagcggtttatgtaccagcagatgacctgacagacccttcaccagccacaacatttgcccatctggacgcaacggttgtattggcaagatcaattgcagagcttggtatttatccagcggtcgatccgcttgactcaaacagtcgtcaactagaccctggtattgtaggccaggagcactatgataccgcaaggtcagtgcaacaagtactgcaacgctacaaagagttacaagacatcattgcaatactcggtatggacgaactttctgaagaagacaagctcaccgtacagagagcaagaaagatccaaagattcttatcgcaaccattctttgttgcggaggtctttacagggtcaccaggtcagtatgtgtcacttagagattcgatcaaggcattccaaggaattgttgctggcgagtatgatgatctcccagagcaagcattttacatggttggcaccattgaagaagcggtcgaaaaagcaaaaagcatgtaat

SEQ ID NO: 272815 - DNA, 625 bp, Unknown
  Bacterial polypeptide expressing nucleotide sequence isolated from the Sargasso Sea
gttagaaagagcagcaaaactttctgatgctatgggagggggttctatgacagctcttccaattattgaaactcaggcaggggacgtttcggcttacatcccaactaatgttatttcaattacagatggacaaattttcttgagtgcagatttatttaactcaggattaagaccagctattaatgttggtatttctgttagccgtgttggaggagccgctcagacaaaagcaattaaaaaaattgctggaactttaaaattagaactcgcacagtttgatgaactagctgctttttcccaatttgcatctgatcttgatgaagcaactcagcaacaacttgaacgaggcaaaagacttagagagctattaaagcaacctcaattctctccactgaaccttgcagaacaagttgcagttgtttatgcaggagttaaaggccttattgatgaggttccagttgaagatgttactaaatttgcaactgaacttagggaatacctgaagttaaataaagcggaatttatagaagagattcttaaagaaaagaaattaaatgatggattagaagcgacattaaaagaggtgataaatgaagttaaatcatcaatgcttgccacagtttaa

SEQ ID NO: 272816 - DNA, 697 bp, Unknown
  Bacterial polypeptide expressing nucleotide sequence isolated from the Sargasso Sea
aatggccaacgaaaaagaaatacgaacaaagattgggagcgttaaaaacacccaaaaaatcaccaaggccatggaaatggttgcggcgagtaaaatgcgccgaacacaggagaccatgaaaaaagcattaccctatgcagacaaaattagagcagtgatcggccatatctataacgcaaaccctgactataagcacccatttcttgaaaagagagatgtcaaaactgcaggctatattgtggtcagctcggacagaggtctttgcggaggattaaatgtaaatatgtttaggggcctcatagctgagctcaaagagaataaaaacaaccaagttgaatcaaaactttgtcttgtaggcgcaaaggcggttcaattttttaggtctgtagacgttgatgttgtagcggcagcatcccatcttggcgaagaaccacaagttgaagatttggttggctcaattaaaaccatgttagatgaatacatcgatgggaagattgaccagctttttattgttcacaatgattttgtaaacacgatgacacaaaaaccagaaatcaaaacacttctccctatagatcctgaagacagagaagaaatgcaagaacactgggactatatttatgagccagactcaaaagagcttttggactatatattgatgagatatatcgagtcacaagtctatcgagcggtagtt

SEQ ID NO: 272817 - DNA, 864 bp, Unknown
  Bacterial polypeptide expressing nucleotide sequence isolated from the Sargasso Sea
cccctggtatcattacacgtaagtcagtttgtgaaccagtacaaactggtattactgcaattgactcaatgattccaattggtcgtggacagcgtgagctaattattggtgaccgtcaaacaggtaaaacgtctgtagcaattgatacaattctaaaccaaaaaggtgaagatgttatctgtgtttacgttgctattggtcaaaaagcttcatcagtagcggcagtttgtacttctattgaagaaagaggtgcgagcccttacacaatcgttgtagcagctaacgctgatgatcctgcaacacttcagtacattgccccttacacaggtgcagcacttgctgagtacttcatgtacaacggtaaagcaacattagttatttacgatgacttaactaagcaagcttctgcttaccgtcaaatgtcactactacttcgtcgtccaccaggtcgtgaagcatatcctggtgacgtattctaccttcactcgcgtctactagagcgtgcagctaaactaagcgatgagcttggtggtggtagtatgacagcacttcctattattgagacacaagctggtgatgtagcagcatacatcccaacaaacgttattagtattacggatggtcagattttcctatcaggtgatctattcaacgccggtatccgtccagcaattaacgtaggtatctcagtatcacgtgtaggttctgctgctcagattaaggcaatgaagcaagtagctggtaagcttaagcttgaattagctcaatttgctgagcttgaagctttctcacaattcgcttcagatcttgaccaagcaactcaaaacgagcttgcacgtggtcaaagactaagagaaatttaaa

SEQ ID NO: 272818 - DNA, 595 bp, Unknown
  Bacterial polypeptide expressing nucleotide sequence isolated from the Sargasso Sea
gcagtgggttatcagcctacgcttgctgaagaaatgggagttcttcaagaaagaattacatcaaccaagacgggttcaatcacatcagtgcaggcaatatacgttcctgcagatgatttaacagatccatcaccggcaacgacgttcgctcacctcgatgcaacagtagtgctttcaagacaaattgcgtctctgggtatctatccggcagttgatccgcttgactcaacgagcagacagcttgacccagccattgtgggtcaagaacactacgatgttgcaaaaggtgttcaacaagttcttcaaagatatttagagttaaaagatattatcgccattttgggtatggacgagctttcagatgaagataaacagacagttaacagagcaagaagaattgagaaatatttatctcaacctttctttgtagcagaagtatttaccaactcgcctgggaaattcgtctccatcaaagatactgtgagaggttttaaaggaatcttggaaggagagtacgatgatcttcctgagcaagcattcttgatggctggaaaaatcgaagaagtggtagagaacgcagaaaaacttaaatgag

SEQ ID NO: 272819 - DNA, 535 bp, Unknown
  Bacterial polypeptide expressing nucleotide sequence isolated from the Sargasso Sea
gcttacataccaactaatgttatatcaataacggatggtcaaatatttttgggcacagaattattcaatcaaggaataagaccagcagttaatgttggtctttctgtctcgagagttggttcagccgctcaaaccaaagctatgaaaaaagtagctggatcgattaaacttgaattagcccagtatcgtgaaatggcagcattcgctcaattcggttccgacctagatgcctcaacgcaaaaacttttaaacagaggatcaaaactcacagagttgttaaagcaaaatcagtacagccctatgactgtagcagagcaagtaattactatatacgcaggagtaaaaggttatttggacagtattgatacaagtcaaattggttcttttgaaaaaggccttttagagttggtaaaaagtgaaaagccagaaatattagaatcgattcaaaaaagtggaaaaatagaagaagatatagataaaattttatcagaaattatcactaattataaaaaaacaaactttgagaaaaaataat

SEQ ID NO: 272820 - DNA, 613 bp, Unknown
  Bacterial polypeptide expressing nucleotide sequence isolated from the Sargasso Sea
tgaaagagcagcaaaactaaatgatgataaaggaggaggctctctaacggcgttaccaataattgaaacacaggctggagatgtgtcagcttacattccaacaaatgttatttctattactgatggacaaatttttctagaaacagagctatttaatcaaggtataagaccagctgttaatgttggattatcagtctctagagtaggatcagctgcgcaaaccaaggctatgaaaaaagtagcgggctcaataaaattagagttggctcaatatagggaaatggcagcatttgctcaatttggttctgatttagatgcatcaacacaaaagttattaaatagaggctcaaaattaactgaacttttgaaacaagatcaatattctccaatgccagtagctcaacaagttatcgcagtattttctggtgtaaaaggttttttagatgatgttgaattacctaacattaaaaatattgaaaaacaaatttatgagaaagttaaatcttctaatccagagattattgataatatcaacaacactgggaagctggatgaaaatatagaaaaaaacttaatttcagttatcgaaaaatttaaaaaagaaaacaagtaa

SEQ ID NO: 272821 - DNA, 488 bp, Unknown
  Bacterial polypeptide expressing nucleotide sequence isolated from the Sargasso Sea
ggccgacgacctgacagacccgtcaccggcaacgacttttgctcaccttgatgcaacgctcgtactgtctcgtaacattgccgaactgggtatctaccctgctgttgatccgcttgattccacgtcgcgaattcttgatccgctcgtcatcggccaggagcactatgactgtgcacgtggcgtacaggcagtactgcagcgttacaaggagctccaggacatcattgcgattctcggtatggacgagctttcggaagacgacaaacagattgttaaccgcgcgcgcaagattcagaaattcctgtcacagccgttcgctgttgcagaggtcttcacgaatacgccgggtaaatatgtaccgctggcagagacgattcgcggctttaacggcatcgtcgcgggtgattacgaccacattccggaacaggcgttctcctactgtggcggcatcgacgaagctgtcgagaatgcaaagaagtaccaatagg

SEQ ID NO: 272822 - DNA, 325 bp, Unknown
  Bacterial polypeptide expressing nucleotide sequence isolated from the Sargasso Sea
atgcgtaaaaatggaaaaataactcaaataataggagctgtagttgatgttaattttgaaaatgaattaccagaaatctatacagctttagaaacaaataattctggaaacaaactaattttagaagttgcacagcatttaggcgaaaatgatgtgagaactatagcaatggatgcaacagagggattaaaaagaggtgatgaagtagtaaataccggttctcctattagtgtgccagtaggacctgagactttaggaagaattataaatgttgttggggagtcaatagatgaaaaaggtgatgtgaaaactaaggaaaaatggc

SEQ ID NO: 272823 - DNA, 661 bp, Unknown
  Bacterial polypeptide expressing nucleotide sequence isolated from the Sargasso Sea
attggaaatatcagacttcatgggcaggtatttttaacatcttggattttattaggagcgttattagtttttatttctttaggaactaaaaaaatggaaaatgatcctaaaggccttcaaaacttgcttgagttcctctgggattacattagagatcttgctaggactcaaataggtgaaaaagtatatagagattggatgccattcataggtactttatttttattcgtctttgttagtaattggggaggagctttaattccttggagattgattaagttgccaagtggagaattaggagcacctactgcagatattaatacaactatagccttagctttattggtttcactctcttatttctatgcaggtttaagtaataagggttggaggtacttcgaatactatgttcatccaactcctattatgcttcctttcaaaattctagaggactttacgaaacctttatcactctctttcaggctatttggaaatattttggctgatgaacttgttgttggtgttctagtctttttagttccgctaattctcccaatacctgttatgttcttaggattatttactagtgcaattcaggcattgatttttgcaactctcgctgcttactacattggagaagctgttgaagaacatcattagc

SEQ ID NO: 272824 - DNA, 788 bp, Unknown
  Bacterial polypeptide expressing nucleotide sequence isolated from the Sargasso Sea
ggtttatggtcaaatgaatgaaccaccaggagctagagcaagagtaggccttacaggattgacattagctgaacaatttagagatcaatctggaacagatgttctgttttttgttgataacattttcagatttacacaagcaggttcagaagtttctgctctattagggcgtattccatctgctgttggttatcaaccaacattagctactgacatgggtgctttacaagaaaggattacttctacaaaagcaggctcaatcacttcagttcaagctatatacgttcctgctgatgatctaacagatccagctcctgcaacctcttttgctcatcttgacgcaactactgttttaagtagggctatttctgaattagggatatatcctgcagttgatcctttagattctaatagtagacttatggatccattaattgtaggtgaagaacattatcaggtagctagggatgtacaaggaatactccaaaggtataaatctttacaagatatcattgcaatattgggaatggatgaattgtctgaagaagataaattaactgttgctagagctagaaaaattcaaaggtttctttcacaaccttttgatgtagcaaaagtttttacaggatctgacggagttcaagtaccattagacgttactattgacagttttaaaagggtcgttgctggcgaatttgatcatttacctgaagctgctttttacatggttgggggtattgatgaggttattgaaaaagctggaaaactagaaacaaaggtagcttaaa

SEQ ID NO: 272825 - DNA, 301 bp, Unknown
  Bacterial polypeptide expressing nucleotide sequence isolated from the Sargasso Sea
acatataaatctttacaggatattattgcaattctaggtatggatgaattatcggaagaagataaattaacagtagcaagagcaagaaaaatacaaagatttttatcacaacccttttttgttgctgaggtatttactggatcaccaggaaaacttgtagatttagagtcaacaataaaaggttttgatgcaatatgtaaaggtgaatatgatcatcttccagaggctgcattttacatggtaggtacaattgaggaagcaattgaaaaagctgaaaaaatgaaaaaagacgccgcataat

SEQ ID NO: 272826 - DNA, 793 bp, Unknown
  Bacterial polypeptide expressing nucleotide sequence isolated from the Sargasso Sea
gccctctgctacggccagatgaacgagccccccggcgcccggatgcgcgtgggtctctccgctctgaccatggcagagcacttccgcgacgtgaacaagcaagacgtgctgctgttcgtggacaacatcttccgcttcgtgcaggccggttccgaggtgtccgcactgctgggccgcatgccttccgctgtgggttaccagcccaccctgggcaccgacgtgggtgcactgcaagagcgtgttgcttcgaccgttgaaggttcgatcacttcgatccaggccgtttacgtgcctgctgacgacctgaccgaccctgcaccggccaccacttttgctcaccttgacgccaccacggtgctgaaccgtgccctggcatccaagggcatctaccccgctgtggatcctcttgattccaccagcaccatgctgcagccggctgtggtgggtgacgagcattaccgcaccgcccgcgccgtgcagtccaccctgcagcgctacaaggaactgcaagacatcatcgcgattctgggtctcgacgaactgtcggaagacgaccgtcgcatcgtggatcgtgcccgcaaggtggagaagttcctctcccagcctttcttcgtggctgaaatcttcaccggcatgcccggcaagtacgtgaagctggaggagaccatcactggtttcaaccagattctttccggtgagctggacagcctccccgaagccgccttctacctggtgggcaacatcgaggaagtgaaagccaaggccgagaagatcgccgccgaaaccaagtgat

SEQ ID NO: 272827 - DNA, 310 bp, Unknown
  Bacterial polypeptide expressing nucleotide sequence isolated from the Sargasso Sea
tcaaggagttctacaaagatacaaagagctcaaagacatcatcgctattttgggcatggatgagctttcagacgacgacaaaaacacagtctcaagagcacgaaaagttgagaaattcttatcacaacctttctttgtggctgaagtattcacgggctcacccggaaaatatgtttccattaaagacactatccaaggttttaaagaaattttggatggggtgcatgatgatgtccctgagcaagctttttacatggttggttcgatggatgaagtattagagaaagccaagacaatcaaaagtgattaa

SEQ ID NO: 272828 - DNA, 750 bp, Unknown
  Bacterial polypeptide expressing nucleotide sequence isolated from the Sargasso Sea
aaaattaacgaatctaatgatgagaaaaagaaactttattgtatttatgttgctataggacaaaaaagatcaacagttgcgcaaattcttaaaacattacaagatgctggagcgatggattatactataatcgtgtcagctaccgcatctgatcctgctcccttacagttcttagcgccttataccggctgtacctttggagaattttttagagataacggaatgcatgcattgattatttatgatgatttatctaagcaggcagttgcttataggcaaatgtcacttttattaagaagaccgcctggcagagaagcatacccgggagatgttttttacttacacagcagactacttgaacgagcagctaagcttaacgatgataatggaggcggatctcttacagcacttccaattatagaaacgcaggcaggcgatgtatcggcttatataccaactaatgttatatcaattacggatggccaaatatttttaggtacggaattatttaaccaaggaataagacccgcggttaatgtaggtctttctgtttcaagagttggatcagccgctcaaacaaaggctatgaaaaaagtagctggctcgatcaaacttgagctggcccagtatcgtgaaatggcagcatttgctcaatttggttctgatctagatgcctcaacgcaaaaacttttaaatagaggatcaaaacttacagagctgttaaaacaaaatcagtacagtcctatgaca

SEQ ID NO: 272829 - DNA, 608 bp, Unknown
  Bacterial polypeptide expressing nucleotide sequence isolated from the Sargasso Sea
tatgagcaaaaatggaaaaataactcaaatcattggggcggtagttgatgtaaattttgaaaatgaattaccagagatttatacagcactagaaacaaataattctggaaataaattaattttggaagttgcacaacatttaggtgaaaatgatgtgagaactatagcaatggatgctactgaaggactaaaaagaggagatgaggtagtaaatactggatccccgattagcgttccagttggaccagagactttaggaaggattataaatgttgtaggagagtccatagatgaaaaaggcgatgtgaaaacgaaggaaaaatggccaatacatagaccagcacctaaatttacagatcaagcaactgaaacagaacaactagttacgggtattaaggttatagatttactagcaccttatgctaaaggtggaaaaattggattatttggaggagctggtgtcggcaaaacagtaactattatggaattaattaacaacatcgcaaaagcccatggtggcttttcagtttttgcaggtgttggagaaagaaccagagagggtaacgatctttaccatgaaatgatagagtcaggtgtaattaaaactg

SEQ ID NO: 272830 - DNA, 786 bp, Unknown
  Bacterial polypeptide expressing nucleotide sequence isolated from the Sargasso Sea
atttgatggggaactaccagagatattaacagcattagagtgtgataatagtggtaacagactagttttagaagttgcccagcatttaggagaatcaagcgtaagaacaattgctatggacgcaacagaaggtttaaaaagaggcgatgaagtaatagacacaggagctccaatcaaagttcctgttggtccagaaactctaggaagaattataaatgtaattggcgaacctattgatgaaaaaggtgaagttaaaacaaaagaaaattggcccattcatagatcggcgccagaatttagtgaccaatctacagaaacagaaattttagttacaggaattaaggtagtagacttattagcgccatacgcaaagggtggaaaaattggtttatttggtggtgcaggagtaggaaaaacagttcttattatggaattaatcaataatgttgcaaaagcgcatggaggcttctcggtttttgcaggagttggtgaaagaactagagaaggaaacgatctttatcacgaaatgatagagtctggagtaattaaatcagaaggctcaggatcaaaagctgcattagtttatggtcaaatgaatgaaccacctggggcaagagctagagtggcattatcaggattaacagttgctgaatattttagagatcaagaaggtcaagacgtacttttttttgtagataatatttttagatttactcaagctggttctgaggtatcagcattattaggaagaatcccgtctgctgtaggataccaaccaacattagc

SEQ ID NO: 272831 - DNA, 829 bp, Unknown
  Bacterial polypeptide expressing nucleotide sequence isolated from the Sargasso Sea
atggtagcaactccatcaacttcttcacaaacaaaaggcgtagtacgtcaggtaattggtccagttctagatgtagaatttccagcggggaaattgcccaaaatattaaatgctttaagaattgaagctaaaaatccagctgggcaagacatagcgctcactgcagaagtccaacagctcctaggtgaccatagagttagagcagtggcaatgagcggcacagacggccttgtaagaggtatggaggcaatcgacacaggagcgccaatatctgtacctgtaggagaagcaactttaggaagaatatttaatgttttaggagaaccagtagatgaacaaggtccagtaaatactaaagatactgctccaattcatagagctgcaccaaagttaactgacctagaaactaagccaaaagtttttgaaactggtattaaagttatcgaccttttggctccttacagacaaggagggaaagttggattattcggaggtgctggtgttggaaagacagttcttattcaagaattaattaataacatcgcaaaggagcatggtggagtttccgtttttggcggtgtaggagaaagaactagagaagggaacgatttatatgaagaatttaaagaatctggagttatcaatgcagatgatctaactcaatcaaaagttgccttgtgttttggacagatgaatgagccacctggtgcaagaatgagagtaggcttatcagcacttacaatggccgaacattttagagatgtgaataagcaagacgtcctactttttgttgataacatttttagattcgttcaagctggtttctgaa

SEQ ID NO: 272832 - DNA, 623 bp, Unknown
  Bacterial polypeptide expressing nucleotide sequence isolated from the Sargasso Sea
tgacagaggattatgtggtggttttaatacaaatatttgtaaacttgcaaaaacaagctttaagaaaattcttaatgagcaaaaaaatttaaaaataataacagttggttctaaaggtttcgatcagattaaaagagagtacggcaagcatgtaattaaaaaatatagttttaaagaaaaaaaacaaataacctttaaggaagcagatacagtaggcaatgaaattataagattatttaatcaaaatgaatttgataaatgtattttgttttttaacaactttaaaaatgtcataactcaaattccccaagctcaacaaattatacccgtagataaaaaatcttctgtatcaaaagaagaaaattttttaccttatgaatttgaacccgatgaagatgaaatactcgaagatttgttgcctaaaaatatctctactcaagttttcaaagcttttcttgaaaacgcagcaagtgagcagggttctagaatgactgctatggataacgcgacaagaaacgcaggagatctagtggacaagttaactataaattacaatagaagcagacaagcttcaataacaaaagaattgattgaaattatttcaggggcagaaagcttataat

SEQ ID NO: 272833 - DNA, 901 bp, Unknown
  Bacterial polypeptide expressing nucleotide sequence isolated from the Sargasso Sea
gatggtatagctagagtttatggactagataatgttcaggctggagagatggtagaatttccaggtggtatttctggtatggctttaaatcttgagtctgataatgtaggagttgttatttttggagatgaccgaggcattaaagaaggagatactgttaagagaacaggtagtattgtagatgctcccgtaggtagagagttattaggaagagtagttgatgctttaggtaaccctatagatggcaaaggtgaaattaatgcaaaagagagaagcatagtagatgtcagagctcctggtattataccaaggaaatctgttcatgagcctgttcaaacggggctgaaagctatagactctctagtgcctgtaggaagaggacaaagagaattaataattggagatagacagactggcaaaactgctgttgcaattgatacaatattaaatcagaaagctattaatgacgctgacgatgaaagtaaaaaattatattgtgtatatgtggcgattggtcagaaacgttctactgttgctcaaattgttaaagaattagatgaaagaggtgcacttgaatatactgtagttgtagctgcaacagcttctgagcctgcccctttacaatatttagctccttatactggctctgctattggagagtggtttagagataataaaatgcattccttaattatatatgatgacttatctaaacaagcagtagcttacaggcagatgtctttattgttaagaagacctcctggaagagaagcttatcctggagatgtattttacttgcactcacgtttgttggaacgttctgctaagttaaatgaggaaaatggtgccggctctatgacagcattacctataattgagactcagggggagatgtatctgc

SEQ ID NO: 272834 - DNA, 448 bp, Unknown
  Bacterial polypeptide expressing nucleotide sequence isolated from the Sargasso Sea
atggcaagtttagacgatctaaaaaaaagaatagctagtgttaaatctacacagaaaataactaaggcgatgaaaatggtagctgcagcaaaacttcgaagagctcaagagagtgcagaaagaggtaggccttactcagaaaaaatgaataatatgattttaaatttgtctggtggaatatctgataaagagaacgctccaaaacttttatcagggacaggtaatgataaggtccacttatgtattgtaatgacatcagatagaggattatgtggaggtttcaattctaacattattaaaaaagctaaaagttattttttaaaaattttaaatgaaggaaaagaacttaaaattataactgtaggatcgaaaggaaatgatcagctaaagagaatgtatggtgataaaattattgaaaatgtttctttaaagagttcaaaaaatgcaa

SEQ ID NO: 272835 - DNA, 466 bp, Unknown
  Bacterial polypeptide expressing nucleotide sequence isolated from the Sargasso Sea
tttacccaaggtatcagaccggcaataaatgttggattgtccgtatcaagagttggatcttcagctcaaacaaaagctatgaaaaaagtatcaggctccatgaaacttgaattagcccagtacagagaaatggctgcttttgcacaatttggatcagatttagacgcttcaacgcaacaacttttaaacagaggatcaaagttgactgaacttttaaaacaaaaacaatattctcctttgacagttgcggaacaagtaatatccgttttttgtggagtcaaaggttacctagatgacattgatttgaaagatattgcaaagtttgaaattaaaataatcgaaaagtgtaaatctgataaacctgaaataatcgactcaattcaaagttctggaaaactcgaagaagataaagaaaaacttttagtagaagtaattactgagcttaaacaaaattttaaatcataat

SEQ ID NO: 272836 - DNA, 687 bp, Unknown
  Bacterial polypeptide expressing nucleotide sequence isolated from the Sargasso Sea
aatggaaataaatccttcagaagttacaaagatattaaaagaacagataaaaaactttggagaaaaagcagaagtatcagaggttggacaagtactatcagtaggtgatggtattgcaaggatatacggattgaacaatgttcaagctggagaaatggtagaattttctgatggatctaaaggaatggctctaaacttggaaagtgacaatgttggtgttgtaatatttggagatgataaagctgtaaaagaaggagacatagtaaaaagaaccggagcaattgttgatactcctgttggaaaagaattattaggaagagtagttgatggattggggaatcctatagatggtaaaggagctttagataaaggaataaaaagaagtagagtagaaattaaagcaccaggaatcattccaagaaaatcagtaagtgaaccaatgcaaacaggattgaaatcaattgacagtctagttcctattggaagaggtcaaagggaattgattattggagatagacaaactggaaaaacggctgttgcaattgatgcaatcattaatcaaaaaaaaataaatgaatcaggcgatgaaaaacaaaaattatattgtgtatatgtcgcgataggtcagaaaagatcaacagtaagacaaatagaaaaaacattacaagaagctggagcgatggaata

SEQ ID NO: 272837 - DNA, 805 bp, Unknown
  Bacterial polypeptide expressing nucleotide sequence isolated from the Sargasso Sea
gacaaaagaaaaatggcctatacacagaccatcacccaagtttacagatcaatctactgaaaccgaaattctagttacaggcataaaagtaattgatttactagctccgtacgctaaaggaggaaaaattggtttgttcggaggtgcaggagttggaaagactgtaacaataatggaattaattaataatattgcaaaagcccatgggggattttcagtatttgctggtgtaggagagagaacaagagaaggtaatgacctttaccacgagatgattgaatccggagtaattaagaaagatggaaagggatctaaagctgcattagtttatggtcaaatgaatgagcctcctggtgcgagagcaagggtagcgttaacaggtttaactgtagcagaatattttagagatcaagaaggtcaagacgttttattttttgtcgacaatatatttagatttacacaagccggctccgaggtgtctgctttattaggaagaattccatcagcagtaggatatcagccaactttagccactgatatgggaaatttacaagagagaattacatctacagggaaaggttcaattacatcggttcaagctatatatgtgcctgcagacgatcttacagacccagctccggcaacctctttttcacatttagacgcaacgacggtattatcaagacagatagcagagcttggtatttatccagcagttgatccgcttgactctacctctaggatattagacccaagagtggtaggggatgaacattatagagtagctagagaagttcaacgaata

SEQ ID NO: 272838 - DNA, 682 bp, Unknown
  Bacterial polypeptide expressing nucleotide sequence isolated from the Sargasso Sea
atgagcagcggaatagttacacaaattattggagcggttatcgatgtcgaattcgacaaagataatattccaaaggtatatgaagcccttatggttgatgaaagtgggacaacactagaggtacaacaacaacttggtgatggtgttgtaagaactattgcaatgggagcaacagaaggtctaaaaagaggcttatctgcatcaagaactaacgcacctatttctgtacctgttggtccagaaactcttggaagaattgttgatgttcttggaaaccccattgatgaaaaagggccaattggtgaaaaatcgaaaatgcctattcatagaaaacctcctacttatactgatcaatccgcatcaagtgaagttttggaaactggtataaaagttattgacctaatgtgtccttttgcaaaaggaggaaaaattggattatttggcggagcaggtgttggtaaaacagtaaatatgatggagcttatcaataatattgctttacaacactcgggtctttcagtattcgcaggtgttggagaaagaacaagggaagggaacgatttctactacgaaatgcaggaatcaggagttgttaatattgacaatctgggtgagtcgaaggtggctatggtttatggacagatgaatgagccacccggcaacagactaagggttgctttaa

SEQ ID NO: 272839 - DNA, 898 bp, Unknown
  Bacterial polypeptide expressing nucleotide sequence isolated from the Sargasso Sea
taaagagggagatacagtcaagcgcactaactcaatcgtagatgtaccggtaggaaaagaattacttggtagagtagttgatggtttaggtgtaccaatagatggaaaaggcagcttatctaaaaaatctttaagaaaaagagttgaggtaaaagccccgggtatcattccacgtcaatcagtcaacgaaccaatgcaaacaggtcttaaagcaatagacagtctaattccgataggaaggggccaaagagaactcataattggagatagacaaacagggaagaccgcggtagctgttgatacaataataaatcagaaagcaataaatgactctaatgatgaaaagaaaaaactttactgcgtatatgttgctattggtcagaaaagatcaactgtagctcaaatagttaagacattagaagatgctggtgcaatgaaatacactaccgtagtgtctgccactgcctctgactctgcgccattacaatttctagctccttacactggatgtacaataggagaatattttagagataatggaatgcatgctttaataatttatgatgatctttcaaaacaagctgttgcgtatcgtcaaatgtcattattgttaagaaggccaccaggaagagaagcataccctggagacgttttttatttacatagtagacttttagagagagcagcaaaattaaatgaaaaaaatggaggtggctctttaacagctttaccgataatagaaacccaagcaggagatgtttccgcttatatacctacaaatgttatatcaataactgatggacaaatatttttagaaactgaactatttaaccaggggattagacccgctgttaacgttggcctctccgtatctagagtaggttctgctgcgcaaact

SEQ ID NO: 272840 - DNA, 770 bp, Unknown
  Bacterial polypeptide expressing nucleotide sequence isolated from the Sargasso Sea
aatggtagcaactccatcaacttcttcacaaacaaaaggcgtagtacgtcaggtaattggtcctgttctagatgtagaatttcctgctgggaaattgcccaaaatattaaatgctttgagaattgaagctaaaaatccagctggacaagacatagccctcactgcagaagtccaacagctcctaggtgatcatagagtaagggcagtggcaatgagtggcacagacggccttgtaagaggcatggaggcaattgatactggagcaccaatatctgtacctgtaggagaagcgactttaggcagaatttttaatgttttaggagaaccagttgatgaacaaggtccagtcaatactaaagatactgctccaattcatagagctgccccaaagttaactgacctagaaacaaagccaaaagtttttgaaactggaataaaagttattgaccttcttgctccttatagacagggaggtaaggtcggattatttggaggtgctggagttggcaagacagttctaattcaagagttaattaataatattgctaaagaacatggtggggtttctgtttttggaggtgtaggagaaagaaccagagaaggtaatgatttatacgaagaatttaaagagtcaggagttatcaatgcagatgatttaactcaatcaaaagttgccctatgctttggtcaaatgaatgagccaccaggagcaagaatgagagtaggcttgtcggcccttacaatggctgaacattttagagatgttaata

SEQ ID NO: 272841 - DNA, 904 bp, Unknown
  Bacterial polypeptide expressing nucleotide sequence isolated from the Sargasso Sea
gatgttaccggtaatgtgattgatggaaaaggtgcagtatctgctgataaggagtatccaattcatcgatcagcccctaagcatgaagacttatcaacttcaactgaaatgttagttactggtattaaagttgttgatatgatggagccgtatacaaaaggaggaaaaacaggcctatttggcggtgcgggagttggaaaaactgttttaattcaggagctgattagaaatattgctacagagcatggtggctactcggtatttgctggtgtaggagaaagaactagagaaggaaatgatttatataatgagatgacagaatcaggtgttatcgaaaaaactactatggtatttggtcaaatgaatgaacctccaggtgcaagattaagagtagctcttagcggtcttacaatggcagagtattttagagatgatgaaggtagagatgtattactatttattgataatatattcagatttacacaggcaggatcagaggtttctgcattattaggcaggatgccttctgctgttggttatcaacctactcttggtactgaaatgggtgatttacaagaaagaattacatctacaaaaaatggatctattacatcagtgcaagctgtatatgttccggcagatgatctaactgacccggctcctgcaacagctttcgcacatttggatgcaacttcagttttagaaagaaaaatagccgaacttggtatttatcctgcagttgatccactggcatccacttctagaattctagaccctcgcgtgataggtgataatcattataatacggctcgcgaggttcagaatattcttcaaaaatataaggatttacaagatatcattgcgatactaggtatggatgagttatcagatgatgataaacttt

SEQ ID NO: 272842 - DNA, 553 bp, Unknown
  Bacterial polypeptide expressing nucleotide sequence isolated from the Sargasso Sea
atgaataaaggaataatcacacaagtaattggagcagtggtagacgtcaaatttgacggtgagctcccagaaatacttacagcattagaatgtaaaaacggggatagcagattagttctagaagttgctcaacatttaggcgaaactacagttcgtacgatagcaatggatgctactgaaggattaaaaagaggtgatgaggtaattaatacaaaggcacctatacaagttcctgttggacctgaaacgctcggaagaattattaatgttattggagaaccgatcgacgaaagaggtaaggttcaaactaaagagaattggccaattcacagagctgcccctgaatttaatgaccaatcaactgaaactgaaatacttgtaactggtataaaagtaattgatttactagcaccctacgctaaaggagggaaaattggattatttggtggtgctggtgttggaaaaacagttttaatcatggaattaattaataacgttgcaaaagcacatggtggattttcagtttttgcaggtgtaggagaaagaaccagag

SEQ ID NO: 272843 - DNA, 904 bp, Unknown
  Bacterial polypeptide expressing nucleotide sequence isolated from the Sargasso Sea
atattaaatgctttaagaattgaagcaaaaaatcctgcaggacaagaaatagcgctcactgcagaggttcaacaactccttggcgaccatagagtcagagcagtagcaatgagtggcacagacggccttgtaagaggcatggaggcaatcgacacaggcgcgccaatatcagtacctgtaggagaagcaactttaggaagaatatttaatgttttaggtgaaccagtagacgaacaagggccagtaaatactaaagatacagcaccaattcatagagctgccccaaaattaactgacctagaaaccaagccaaaagtttttgaaacaggaataaaagttatagatcttttagctccatatagacaaggagggaaagtcggattatttggaggagctggcgttgggaagacagttcttattcaagagttaattaataatattgcaaaggaacatggtggtgtttctgtttttggaggtgtaggagaaagaaccagggaagggaatgatttatatgaagaatttaaagaatctggcgttatcaatgcagatgatttaactcaatcaaaagttgccttatgttttggacagatgaatgagccacctggtgcaagaatgagagtaggtttgtctgcacttacaatggctgaacattttagagatgtaaataaacaagacgttttactttttgttgataacatttttagatttgttcaagctggctctgaagtatcggctttacttggaagaatgccttcggcggttggataccaaccaactcttggaactgatgttggtgaattgcaagagagaattacatctacattagaaggatcaataacatcaattcaggctgtttacgtgcctgctgatgacctaactgaccctgctccagcaacaaccttgc

SEQ ID NO: 272844 - DNA, 673 bp, Unknown
  Bacterial polypeptide expressing nucleotide sequence isolated from the Sargasso Sea
tatggcaagtttagacgacctaaaaaaaagaatagctagtgtaaagtctacacaaaaaattactaaagctatgaaaatggttgcagcagctaaattaagaagagctcaagaaagcgctgagaagggaagaccttattctgaaaaaatgaataatgttattttaaatttatcaaatggtatatctgataaagaaaatgcaccaaagttattgtcaggcactggtcaggaaaaaactcatctttgtgtggtgatgacttctgatagaggtttatgtggtggatttaattctaacattattaaaaaagctaaaaattattttgcaaagattttaaatgaaggtaaggaacttaaaattattacagtaggctcaaagggaaatgatcagctaaaaagagtttatggtgacaaaataattgaaaatatttcttttaaagagtctaaaaatgcaaattattttgatgctgataaagttgggaaaatggtaattgaaaaattcgaagcaggtgaatttgatgtttgtacaattttttataaccaatttaaaaatgtaattacccaaattcctcaagcacagcaaattatccctttaaataatgagggagaagaaagtagctcagaagaaagttacgaatttgaaccagatgaagatgaaattttaagcaatttattgcca

SEQ ID NO: 272845 - DNA, 859 bp, Unknown
  Bacterial polypeptide expressing nucleotide sequence isolated from the Sargasso Sea
ttgacagcattagaatgcaataactcaggcaacagacttgttttagaggttgctcaacatttaggtgagtctagtgttagaactatagcaatggacgctactgaaggattaaaaagaggggatgaggtaactgatacaggcgcaccaattaaaataccagttggtccagaaactttaggaagaattataaatgtaattggagaaccaattgatgaaaaaggtgaaattaaaccaactgataactggccgatacatagatctgcacctgaattcaatgatcaatcaacagaaactgaagtattagtaacaggtatcaaagttattgatcttttagctccttatgcaaaaggaggaaaaatcggtctctttggtggagctggagttggtaaaacagttttaattatggaacttatcaataacgtagcaaaggcacatggaggtttttcggtttttgctggagttggagaaagaacaagagaaggtaatgatctttatcatgaaatgatagagtctggtgttataaaaccaaatgaatcaggctcaaaagctgcgttggtttatggtcaaatgaacgaacctcccggagctagagctagagttgcacttactggtttaactgttgcagaatattttagagataaagaaggtcaagatgtacttttcttcgttgataatattttcagatttacccaagcaggttctgaggtttcagctttacttggtaggattccttcagcagtaggataccaaccaacgttagcaactgatatgggtaatttgcaagaaagaataactacaacaaacaaaggttcaattacttcggttcaagcgatatatgttcctgcagatgacctaactg

SEQ ID NO: 272846 - DNA, 568 bp, Unknown
  Bacterial polypeptide expressing nucleotide sequence isolated from the Sargasso Sea
atgaaaattcgagcagaagaaatcagtaacatcatccagcagcaaatcgaaaatttcgagaagcagaccaccaaaaccgaagtaggaaccgtcttggaagtcggagatggaatcgcacgagtctacggacttgataatattgttgccggcgaacttgtggaattccccaataaccttcaaggcatggccctcaatctggaagaggataatgtcggtgtcgtgctttttggtgatgaccgaaacatcaaggaaggagatgaagccagaagaaccgagcgtatcgcagaagttcctgtaggtgatgccatgctcggtcgggttgtggaccctcttggacaaccgattgatggcaagggccccattgagacctcagaaagccgaagagtcgaagtcattgccccgggtattgttacacggaagtcggtacatgaacctcttcagacaggtctcaaggcaatcgactcgatggtcccgattggacgcgggcagcgagagttgattattggcgaccgccaaacagggaagaccgccatcgcgatggatactatcatcaaccaaaaagggggtg

SEQ ID NO: 272847 - DNA, 742 bp, Unknown
  Bacterial polypeptide expressing nucleotide sequence isolated from the Sargasso Sea
aatggaaattaaagcagcagaaatatcgtctgtaattaaagaccaaatagctaattttgaaactaaagcagatgttgctgaggttggaacggtgttaagtgttggagatggtattgcgcgtgtgtatggtctcgatcaagtacaagctggagagatggtagaattcccaggcggcattaaaggtatggccctcaaccttgaaatggataacgttggtgtttcaatctttggtgatgatactggaattaaagaaggtgatacagttaaacgtacaggagaaattgttgacgttcctgttggtaaagaattattaggtcgtgtagttgatggtttaggaaatcctattgatggtaaaggtcctattcaatcttctgagaaaagaagaattgaattgaaagcaccaggaattataccacgtcaaagtgtatctgaacctatgcagacaggtattaaagcacttgatgcccttgttccagttggaaggggacaacgtgaattaataattggtgatagacaaacaggtaaaactgctgttgctattgatacaatcttaaatcaaaaatcggtaaatcaatcaaacaatgaaaaagaaaaattatactgtatctatgttgcgattggtcagaaaagatcaacagttgcccaaattgtaaaaacactagaagacaatggtgctatggaatatacaattgttgtatccgcaactgcatcagaacctgctccgttgcaatttttatctgct

SEQ ID NO: 272848 - DNA, 799 bp, Unknown
  Bacterial polypeptide expressing nucleotide sequence isolated from the Sargasso Sea
gacctggtctaaagcagctttagtttatggacaaatgaatgaaccccctggcgcaagagctagagtggcacttacaggattaacggttgcagaatattttagagatcaagaaggacaagatgttctttttttcgttgataatatatttaggtttactcaagcgggttctgaggtatcagcattattaggaagaataccttctgctgtaggatatcagccaacattagcaactgatatgggaaatttacaagagagaataaccacaactaataaaggttctattacatcagtacaggcaatttatgtgcctgctgatgacttaacggatcctgcaccagcaacctcatttgctcatttagacgcaacaactgtactctcaagacaaatagctgaaataggtatttatcctgcagttgacccattagactcaacttcgagaattcttgatcctagaattgttggtgatgagcattatcgagtagctcgtgaagtacaaaaaatattacaaacatataaatcgttgcaagatattatagctattttaggtatggatgaattatcagaggaagataaactagtcgtagcaagagctagaaaaattcaaaggtttttatctcaacctttctttgtggctgaggtgtttacaggatcaccaggaaaacttgttgacttagagtcaacaattaagggcttcgatgcaatttgcaaaggtgaatatgatcatcttccagaagcggcattttatatggttggaaccattgaagaagctatcgaaaaagctgaaaaaatgtataaagat

SEQ ID NO: 272849 - DNA, 815 bp, Unknown
  Bacterial polypeptide expressing nucleotide sequence isolated from the Sargasso Sea
tggtccagaaactcttggtagaataatgaatgttgtaggagaaccagttgatgaaagaggtgatattggaacaactaaatcttatccaattcatagaccagcgccagaatttgttgatcaatctacagaaactgaagttctagttacaggaattaaagttgttgatctactagcaccttatgcaagaggtggtaagattggattatttggtggagctggagttggtaagacagttttaattatggaattaattaataatattgcaaaggcacatggaggatattcagtttttgccggtgttggagaaagaactcgtgaaggtaatgatttgtaccacgaaatgattgagtcaggaattatagatctgaaaggtaaggactcaaaagttgcacttgtttacggccaaatgaatgagccaccaggagcaagagctagagtcgccctatcaggtttaactcaagcagaatattttagagatgaagaaggtcaggatgttttattttttgtagataatatttttagatttactcaagcaggttcagaagtatctgcactacttggacgtataccatcagcagttgggtatcaaccaacacttgcaactgatatgggagcattacaagaaagaattacaacaacaaaaaaaggatcaatcacttctgttcaagctatttatgttccagcagatgatttaacagatcctgcacctgctacttcgttttcacatttagatgcaacaacggttctaaacagagcaatttcagaaaaaggaatttatcctgctgttgatccacttgactcgacttcacgaattt

SEQ ID NO: 272850 - DNA, 388 bp, Unknown
  Bacterial polypeptide expressing nucleotide sequence isolated from the Sargasso Sea
atggcaagtttagacgacctaaaaaaaagaatagctagtgtaaagtctacacaaaaaatcactaaagctatgaaaatggttgcagcagcaaaattaagaagagctcaagaaagtgctgagaagggaaggccttattccgaaaaaatgaataatgttattttgaatttatcaaatggtatatccgataaagaaaatgcaccaaagttattgtcaggtactggtcaggaaaaaactcatctttgtgtagtgatgacttctgatagaggtttatgtggtggatttaattctaatattattaaaaaagctaaaagttattttgtaaaaatattagatgaaggtaaagaactaaaaattattacagtaggctcaaaaggaaagaccaataaaa

SEQ ID NO: 272851 - DNA, 503 bp, Unknown
  Bacterial polypeptide expressing nucleotide sequence isolated from the Sargasso Sea
caattacagacggacaatttttctggaaacagaactatttaaccaaggtataagacctgcaattaacgtaggtttatcagtatctagagttggttcatcagctcaaacaaaagcaatgaaaaaagtttctggttcaatgaaactagagttagcacaatacagagaaatggcagcttttgctcaatttggatctgatttggatgcatctactcagcaacttttgaatagaggttctaagttaactgaacttttaaaacaaaaacaatattcacccatgactgttgcagaacaagttatttcagtattttgtggagtaaaaggttatctggatgatattgatttaaaagacgttgctgaatttgagagcaagattattgaaaaatgtaaatcagataagcctgaaattatagagtcaattttaagttcaggaaaacttgaggaagataaagaaaaattacttgttgaggtaatcactcaattaaaaggaaattttaaatcttaat

SEQ ID NO: 272852 - DNA, 862 bp, Unknown
  Bacterial polypeptide expressing nucleotide sequence isolated from the Sargasso Sea
aacgatctctatcacgaaatgatagaatcaggagtaattaaacctgaaggtgatggatcaaaagctgcgttggtttatggtcaaatgaatgagcctccaggagcaagagctagagttgctttgtcaggcttaactgtagctgaatattttagagatcaagaaggtcaggacgtgcttttttttgtagataatatatttagatttacccaagcaggatctgaggtatctgcattgttaggtagaattccttctgcagtgggataccaaccaacgttagctactgatatgggtaaccttcaagaaagaattacaactaccaacaagggttctattacttcagttcaagctatatatgtgccggcagatgatttgacagatcctgctccggcaacatcattttcacacttggatgcaactacggtattatctagacaaatagcagaaattggaatttatccagctgtggatccattagactctacatctagaattttagaccctaggattgtaggtgatgaacattatagagttgctagagaagtacaaaaagttttacaaacatataaatctttacaagatattattgcaattttaggtatggatgaattatcagaagaagataaattaattgtagcgagagcaagaaaaattcaaagatttttatctcaaccattttttgttgcagaagtttttacaggatctccaggaaagttagttgatttagagtccacaattaaaggattcgattcaatttgcaaaggagaatatgatcatttgcccgaagcagcattttatatggttggaacaatagaagaagctgttgaaaaagcagaaaaaatggcgaaggaagcagccgcttaat

SEQ ID NO: 272853 - DNA, 515 bp, Unknown
  Bacterial polypeptide expressing nucleotide sequence isolated from the Sargasso Sea
ctacaaatgtatttcaattaccgacggtcagatttttttggaaacgaaactatttaaccagggaatacgaccagctgttaatgttggcttgtcagtttcaagggttggttcggcagctcagacaaaagccatgaaaaaggttgcaggttcaataaaattagaattagctcaatatagagaaatggctgccttcgcacaatttggttcggatcttgatgcggcaacgcaaaagcttttgaatagaggctcaaaactaacggagttattaaaacaaaatcaatattctcctatgacagttggagaacaagtaatagcggttttttctggtgtaaaaggttttttggacgatgtcgagttatctaaaattaaagattttgaaaaaaatctttatgaattaattaaatcatcaaatccagaaataatagatacaataaatagtacaggaaaactagatgaagaaatcgaaaaaaagttaaagtcagctatagaaaaatttaagcaaactaataaataag

SEQ ID NO: 272854 - DNA, 487 bp, Unknown
  Bacterial polypeptide expressing nucleotide sequence isolated from the Sargasso Sea
atgccaagtttagacgatttaaaaaaaagaatttcaagtgttaaatcaacacagaaaataacgaaagctatgaaaatggtagcatctgcgaaattgagaaaagcacaagaaaatgcagagaaaggcagaccattctctgagaagatgaataatataattttaaatttaagcaatgctattgctgacaaagatagtgcctccaagcttttgattggaactggaaaaaataatgtacatttgtgtgttgtgattaccgccgatcgaggtctttgtggaggatttaataccaatatatgtagaaaagccaaaagttattttgagaatattttaaaagaaggaaaaacacttaaaatttttacagtcggttcaaaaggtcatgaccaattaaaaagagcgtatggccaatacataatagagaaaataaactataaaaatgttaaaaaacttacatataaagaagcagaagatgttgctaaaaaaataataa

SEQ ID NO: 272855 - DNA, 871 bp, Unknown
  Bacterial polypeptide expressing nucleotide sequence isolated from the Sargasso Sea
gtgcacgagcccgtgcagaccggcctgaaggccatcgattcgctaatccccgtcggccgtggccaacgggaactgatcatcggtgaccgccagacaggcaagacggcggtgatcatcgacaccatcctcaaccagaaagccgtaaacgaaggcgacaatgaatcggaaaagctttattgcgtctatgtggccgtcggtcagaagcgctccaccgttgcgcagctggtcaagacgctcgaagacaatgatgcgatgaagtactccatcgtcgtcgccgcaactgcgtccgagccggcgccgctgcagttcctggcgccctacacgggctgcaccatgggcgaatacttccgcgacaacagcatgcacgcctgcatcttctatgatgatttgtcgaaacaggccgtggcctatcgtcagatgtccttgctgctacgccgcccgccggggcgtgaagcctacccgggtgacgtcttttatctgcactcccgcctgctcgagcgcgcggccaagatgggggacaatgcaggcaacgggtcactgaccgccctgcccgtcatcgaaacccaagccggtgacgtgtcggcgtacattccgaccaacgtgatttccatcaccgacggtcagattttcctggagacagaacttttttacaaaggcatccgcccagccgtgaacgttggcttatcggtaagccgggtcggctctgccgcccaggtgaaagctatgaagcaggtggctggctccatcaaactggaattggcccagtaccgcgaaatggcggccttcgcccagtttgcctccgacctagacgcctccacgcagcggttgctggcccgtggcgcgcgtctgaccgagctcctgaagcagccgc

SEQ ID NO: 272856 - DNA, 816 bp, Unknown
  Bacterial polypeptide expressing nucleotide sequence isolated from the Sargasso Sea
tatgagcaaaggaataatcacacaagttattggtgcagtagtagatgtaaaatttgatggagaactacccgaaatcttaacagctttagagtgtaaaaatggtgacaatagacttgttttagaagttgcacagcatttaggagagtccactgcaagaactattgcaatggatgcaacagagggacttaaaagaggcgatgaggtagtaaatacaaaagcaccgattaaagttccagtaggaccagaaactttaggaagaataataaatgttgttggagagccaatagatgaaagaggagaagttaagacaaaagaaaattggccaattcatagggcagcaccagaattcaatgaccaatcaactgaaacagaaattctagttacaggtattaaagttattgacttgctggcaccttatgccaaaggtggaaaaattggtttatttggtggagctggagttggaaagacagttttaattatggaacttataaacaatgtagctaaagctcatggaggattttctgtctttgcaggagttggtgaaagaactagagaaggtaatgatctttaccatgaaatgatggagtcaggtgtaattaaatctgatggtcctggatcaaaggctgctttggtctatggtcaaatgaatgaacctcctggagctagagcaagagttgctctcacagggttgacagtagcagaatattttagagatcaagaaggacaagatgttctgttctttgtagataatatattcagatttactccagcaggttcagaggtttcagcgcttttgggtagaataccctctgccgt

SEQ ID NO: 272857 - DNA, 556 bp, Unknown
  Bacterial polypeptide expressing nucleotide sequence isolated from the Sargasso Sea
atcgaaacacaagggaggagatgtatcagcatttattccaactaatgttatttcaatcactgatggtcaaattttccttgaaacagaactatttaatcaaggtataagacctgcaattaacgtaggtttatcagtatctagggttggatcatctgctcaaacaaaagcgatgaaaaaagtttctggttcaatgaaattagaacttgcacaatatagagaaatggctgcttttgctcaatttggatctgatcttgatgcatctacacagcaacttttgaacagaggttcaaaattaactgaacttttaaaacaaaaacaatattcaccaatgactgttgcagaacaggttatatcagtattctgtggagtaaaaggttatctcgatgacattgacttaaaagatgttgctgagttcgagagcaagattattgaaaaatgtaaatcggataagcctgaaattatagagtcaattttaagttcaggaaaacttgaggaagacaaagaaaaattacttgtagaggtaattactcaattaaaaggaaattttaaatcttaa

SEQ ID NO: 272858 - DNA, 586 bp, Unknown
  Bacterial polypeptide expressing nucleotide sequence isolated from the Sargasso Sea
tcgttagggactaaaaaaatggaaaacgatcctaaaggattgcaaaatttacttgagtttctgtgggactatattagagatcttgcaagaactcaaattggtgaaaaagtatatagagattggatgccttttataggaactctatttttatttgtatttgtaagtaattggggaggagctcttataccttggagattaataaagttaccaagtggagaattaggtgctccaacagcagatattaatacaacgattgcgttggctttgttagtttctctatcctatttttatgctggtctaagtaataagggctggagatatttcgagtattacgttcatccaacaccgataatgctcccttttaaaattttagaggactttactaaacctttatctttatcttttaggctttttggaaatattcttgcagatgaacttgttgttggtgttttggtttttctagttcctttagttttaccaattccagtaatgtttttagggttattcacaagtgcaatacaagccttaatctttgctacattggccgcttactacataggggaagcagtagaggaacatcattagc

SEQ ID NO: 272859 - DNA, 745 bp, Unknown
  Bacterial polypeptide expressing nucleotide sequence isolated from the Sargasso Sea
aatgagccaactaaatccatcagaaatttccagcgtattaaaggaaaaaatttcaggcctagacctttcagcagaaagaaaaaatgaaggcattatagtgagtgtttcagacggcattatccgaattcatggaatgggtgatgtaatgtacggggaacttatagagtttgagaacggtgtcctggggttggcccttaaccttgagcaagattctgttggtgctgtggtgcttggcgattatttgggaattatcgagggtcaaaaagctgtatgtacaggaaagattttagaggttccggtcggcgaagagttattaggaagagttgtagatgccttaggtaatcccattgatggcaagggcgaaatcaaaacaaaatcatcagcacctgttgaggttgttgcaccaggtgttattgcaagacagtcagttgatcagccagttcaaattgggttaaaggctgttgatgcaatggtgccaattggccgaggtcaaagagagctaattattggcgacaggcaaacaggcaagactgctgttgcggtggatgcaattattaaccaaaaaggcacagggattaaatgtatctatgttgcgatagggcaaaaacaatcaactgtagtgaatgttgttaaaaagctagaggagcatggagccctagagcacacaattattgtctcagcatcagcgtctgatccagccccaatgcaatatctttcagcatactcaggatgctcaatgggcgaa

SEQ ID NO: 272860 - DNA, 400 bp, Unknown
  Bacterial polypeptide expressing nucleotide sequence isolated from the Sargasso Sea
tatggctgaaaaaggaaaaatttcgcaggtaatgggtgcggttgttgatgttgtttttgagcaaggtcatttgcctgatatttataatgccctaacagttgatcgaggtgaagaagggcaattggtccttgaagttgcacagcatttaggtgattcagctgtacgtacagttgcaatggattctacggatggacttgttaggggtattgatgtagtagacagcggtattccaatttcagtgccagttggccctgagactttaggtagactttttgatgtattaggaagtactatcgataataagggtgatgtcaaaacggaaaaagtaaatcccatccatcgtcctgctccaggcatgaagatcttgctacttctactgaaattctcgttactggaataa

SEQ ID NO: 272861 - DNA, 755 bp, Unknown
  Bacterial polypeptide expressing nucleotide sequence isolated from the Sargasso Sea
gatgatcgagtttcctggcgatacatttggtttggcccttaacttggaacaagactcagtcggagcagtggtattaggtgactacacccatatttcagagggagcacaagtaaaaacaaccaacagaattcttgaagtgccagttggcgaaggtttgcttggcagggttgtcgactccttgggaacaccactcgatggaaaaggagctgtttcctcagaccaaacagcaccaatagaaaaagttgcaccaggcgtcatctcaagacagtcagtcgaccaaccggttcaaacaggccttaagtcgattgatgcaatggtaccaatcggaagaggtcagcgagagcttatcattggcgatagacagacaggaaaaacagcggttgctgttgacaccataatcaaccaaaaaggcacagggataaaatgtatctatgttgcagtgggtcagaaaaactcttctgttgcgaatgtggttaagaaactagaggaagaaggagcattagagcatacaatcattgtcaatgctgcagcatccgactcagctgccatgcagtatattgctccatattcaggctgtgccatgggcgagtacttccgagacaaaggagaagacgccctaattatttttgatgacttaaccaagcaagcctgggcatatagacaggtatcgcttctattaaaaagacctccaggaagagaagcttatcctggcgacgtattttatcttcattcaaggttgcttgagagagcggcaa

SEQ ID NO: 272862 - DNA, 299 bp, Unknown
  Bacterial polypeptide expressing nucleotide sequence isolated from the Sargasso Sea
caaatctctccaggacattattgccattcttggtatggacgaactttccgaagcagataaattgacagtggcaagagcaagaaaaatacaaagatttttatcacaacctttctttgtagcagaagtatttacaggaactcctggaaaattagttaatttagattcgacaatcaaaggttttgatgcaatctgcaaaggcgattatgatcatttacctgaagcagcattctatatggttggaacaatagaagaagctgtagccaaagcagaaaagatggcaaaagaagcggcagcttaga

SEQ ID NO: 272863 - DNA, 706 bp, Unknown
  Bacterial polypeptide expressing nucleotide sequence isolated from the Sargasso Sea
atggaaataaatccttcagaagttacaaaaatattaaaagaacagataaataaatttggagataaagccgaagtatcggaagttggacaggtactttcagtaggagatggtattgctagaatatatggcttggataatgttcaggctggggagatggtagaattctcagatggttctaaaggcatggctttaaacttagaaagcgataacgttggtgttgtaattttcggagatgacaaagcagttaaagaaggagacactgtaaaaagaactggtgcaattgtagatactccagtaggcaaagagttattagggagagttgttgatgggttaggaaacccaatagatggaaaaggtgcattagataaaggtgttaaaaaaagcagagttgaagtaaaggctccgggaattataccacgtagatcagtaagtgagccaatgcaaactgggcttaaatctattgatagtctggttccaattggaagaggtcaaagagaattaattattggagacagacaaacgggtaaaacagcagttgccattgatgcaattataaatcaaaaaaaaataaacgagtctaatgatgaaaagcaaaaattatactgtgtttacgtagcaataggacaaaaaagatcaacggttagacaaattgaaaaaactctagaagaagccggagcaatggaatatacaactattgtgcagctac

SEQ ID NO: 272864 - DNA, 377 bp, Unknown
  Bacterial polypeptide expressing nucleotide sequence isolated from the Sargasso Sea
atcaagaatattagaccccaggattgtaggtgacgagcattatcgtgtcgctagagaagttcaaaaagttctacaaacttataaatctttacaagatattattgcaatattgggtatggacgaactttcagaggaagataaacttattgtagcaagagctagaaaaatacaaagatttttatcccaaccattttttgtagctgaagtctttacaggctcaccaggaaaacttgtagatttagaatctaccatcaaaggttttgatgctatatgcaaaggtgaatatgacaatttgcctgaggcggcattttatatggttggaacaatagaagaagcaatagagaaggctgaaaaattagctaaggatgcagcttaat

SEQ ID NO: 272865 - DNA, 566 bp, Unknown
  Bacterial polypeptide expressing nucleotide sequence isolated from the Sargasso Sea
tatggcaagtttagacgaccttaaaaaaagaatagctagtgtaaagtctacacaaaaaattacaaaagctatgaagatggtagcagcagcaaaacttagaagagcccaggaaagtgctgagaagggaagaccttattcagaaaaaatgaataatataattctgaatctttcaaatggaatttcagataaagaaaatgccccaaaattattgtctggatcaggtaataataaaattcatctttgtgttgttatgacttctgacagaggtctgtgtggaggatttaattcaaatataattaaaaaagccaagagttatttcactaaactttcgaaagatggaaaagatttaaagataattactgtaggttcaaaaggtaacgatcaacttaaaagaatttatggcgataaaataattgcaaatatttcatttaaagagtctaaacatgctaattattttgatgctgaaaaagttagtaaaatgataattgaaaaaattgaagctgaaggagttgatgtttgtactattttttacaatcaatttaaaaatgtaattactcaaattcctc

SEQ ID NO: 272866 - DNA, 379 bp, Unknown
  Bacterial polypeptide expressing nucleotide sequence isolated from the Sargasso Sea
ggtttctggatctatgaaattggaattagcacaatatatagagatggctgcttttgctcaatttgggtcagatttagatgcttcaacacaacaacttttaaacagaggttcaaaattaactgaacttcttaaacaaaaacaattttcaccaatgacagtagctgaacaagttatttctgttttttgtggagtaaagggatatttggacgatattgaattaaaagatatcgctgagtttgagaataaaatcattgaaaaatgtaaaactgataaacctgaaataatagattcgattcaaagttcaggtaaaattgaagatgataaagaaaaactacttgttgaagtaattattcaattaaaggaaaaccttaaatcttaa

SEQ ID NO: 272867 - DNA, 601 bp, Unknown
  Bacterial polypeptide expressing nucleotide sequence isolated from the Sargasso Sea
atggcaaaaaaaacaccaaatattacaggaaaaattagtcaagttattggcgccgtagttgatgttgaattcaatggtgatcttccaccaatattaaacgctttagaaattgataatgaaggtaacaaattaatattagaagttgctcaacatttaggtgaaaatgaagtaagaacaatagctatggatacaactgatggtttagttaggggtatggaagttaaagatactggagctcctattactgtaccagttggtcctgaaacacttggaagaattcttaatgtaattggagagcctgttgatgatggcaaaccagttaaatctaaacaaacattacctattcatagagatgcgcctgaatatatagatcaatctactgaagcagaaattttagaaactggaattaaagttgttgatcttttggcaccttatgcaaaaggtggtaaaattggtttatttggtggtgcaggtgtaggtaaaactgttttgattatggaattaattaataacgtggcaaaagctcatggaggttactctgtgtttgctggtgttggagagagaacaagagaaggtaatgatttgtaccatgaaatggtag

SEQ ID NO: 272868 - DNA, 268 bp, Unknown
  Bacterial polypeptide expressing nucleotide sequence isolated from the Sargasso Sea
aaccaagtaagttcagtatatgaatatgaaccttcagaggaagttatactggaagaattgttaaataagaatatagcaacacaattatttagtgctcagatggaaagcacagcaagtgaacttgctgctagaatgactgctatggataatgctacaagaaatgcaggtgaccttatagataggttaacattacaatacaacagaaccagacaagcttttatcacaaaagaattgatcgaaataatatctggagcagaagctctttaaa

SEQ ID NO: 272869 - DNA, 205 bp, Unknown
  Bacterial polypeptide expressing nucleotide sequence isolated from the Sargasso Sea
cacgtcatggcaggtgagttgttggaatttgaggatggtaccgaaggtatagctttaaatcttgaagatgataatgttggagccgttttaatgggagaggcacttggtgtccaagaaggaagtaacgttaagtccacaggtaaaatcgcatctgttccagttggtgaagcaatgcaggggagagttgttaatcctctcggacaac

SEQ ID NO: 272870 - DNA, 526 bp, Unknown
  Bacterial polypeptide expressing nucleotide sequence isolated from the Sargasso Sea
ggcgatggcatcgctcgagtctatggtttatccggagtgatggccggtgagatggtcgaattccctggaggaattatcggcctcgctttcaacctggaagaggactcggttggcgtcattatcctgggcgattatttatccattaatcagggtgacgaagtcaaaagtcttggcaaactgctctccgttccagtcggcgatgcgacaatgggccgtgtggtcgatccgcttggtaatccgctcgatggcaaagggccgataaatgtaacggaaacgcgtccggtcgagatcattgctccgggtgtctcggagcgtcaacctgtgtgcgagccaatgcaaaccgggatcaaggccgtcgatgcaatgacaccgatcggtcggggacaacgagaactgattattggcgaccgcaaaacgggaaaaacagcaatcgcggtggatgccatcctcaaccaaaaaaataccggcgtgaagtgcttctatgtggcagtgggccaaaaagattcctctgtcgcgcaggtgattg

SEQ ID NO: 272871 - DNA, 838 bp, Unknown
  Bacterial polypeptide expressing nucleotide sequence isolated from the Sargasso Sea
atggaaattaaagcagcagagatatcatctgttattaaagatcaaatcgctaattttgagaccaaagcagatgttgcagaggttggaacagttttaagtgttggcgatggtatcgctcgtgtatatggtttagataaagttcaggcaggtgaaatggttgagttccctggtggtattaaaggtatggcgcttaatttagaaatggataacgtcggtgtatctatctttggtgatgatactggcattaaagaaggtgatacagttaagagaacaggagaaattgttgatgttcctgtaggaaaagaattgttaggtcgagttgttgacggtttaggaaatccaattgatggtaaaggccctattcaatcatctgaaaaaagaagaatagaattaaaggcaccaggcatcattccacgtcaaagtgtatcagaaccaatgcagactggaataaaagcacttgatgctttagtacctgttggtagaggtcaacgtgaacttattattggtgatagacaaactggtaagacagcagtagctattgatactatacttaaccaaaaatctgttaatcaatctaataatgaaaaagaaaaactttattgtatctatgttgcaattggacaaaaaagatcaacagtcgcgcagatagttaaaacattagaagataatggtgcaatggagtacacaattgttgtttctgctactgcttctgaacctgctcctcttcaattcttatccgcttatacgggttgtactatgggtgaatatttcagagataacggaatgcatgcacttatagtatatgatgatttatctaaacagagctgttgcttataga

SEQ ID NO: 272872 - DNA, 694 bp, Unknown
  Bacterial polypeptide expressing nucleotide sequence isolated from the Sargasso Sea
aatgtctcttttattaagaagacctcctggaagagaagcttatccaggagatgttttttatttacatagtagattgcttgaaagagcagctaaattgagtgaagatcatggaggaggatctttaactgctcttcctataattgaaacacaaggaggtgatgtttcagcatttatacccacaaatgtaatttcaattactgatggtcaaatattcttagaaacagaattatttaatcagggcataagaccagcaattaacgtaggattatctgtatctagggttggatcttcagcacaaacaaaagcaatgaaaaaagtttctggatctatgaagcttgaactggcacaatatagagagatggcagcatttgcacagtttggatcagacctagatgcttctacacaaaaacttttaaatagaggctctaaattaactgaattattaaaacaaaaacaatattcgcccatgacagtggcagaacaagtaatttctgtattttgtggagttaaaggatttttagatgatatagaacaaaaaaatattgctgagtttgaaaataaaattatagaaaaatgtaaatctgaaaaaccagaaattatagaatcaataattagttcaggtaaacttgaagaagatacagaaaaatctttaatagagattattgatgaactaaaaaaaagttataaaaaataa

SEQ ID NO: 272873 - DNA, 506 bp, Unknown
  Bacterial polypeptide expressing nucleotide sequence isolated from the Sargasso Sea
aatgaatccttcagaagttactaaattactcaaagaccagataaaaaattttggggaaaaagccgaagtctctgaaattggaaaagttttgtcagttggtgacggaatagcgcgagtatacggtttggacaatgttcaagctggagaaatggttgaatttgaagatggttctaaaggtatggcattaaacttagaaaatgataacgttggagttgttatttttggtgatgacagaaaaatcaaagaaggcgatacaattaaaagaaccaatgcaatcgttgatgttccagttggaaaagaactattaggaagagttgttgatggtttaggaaatcctatagatggaaaaggagttatatcttcaaaagtaagaaaaagagttgaagtaaaagctccaggaattattccaagacaatctgttagtgaaccaatgcagacagggttaaaatcaatcgactcacttattcctgttggaagaggtcaaagagaattaattattggagata

SEQ ID NO: 272874 - DNA, 808 bp, Unknown
  Bacterial polypeptide expressing nucleotide sequence isolated from the Sargasso Sea
atgagaaaaggacaaataacacagatcattggggcggtagtagacgtaaaatttgagggagaactaccagaaattttaactgcattagagtgcgataacggtggaaatagattagttttagaagttgctcaacacttaggggagtcaagtgtcagaacaattgcgatggatgcaacagaaggtcttaaaagaggagacgaggtaacagacacagctgctccaattaaagttccagtggggccagagactcttggaagaattataaatgtgattggtgagcctattgatgaaagaggagaagttaaaagttcagataactggccaattcatagagctgcaccagaatttaatgatcaatcaacagaaactgaaatacttgttacaggaataaaagttattgatcttttagcaccctatgcaaaaggtggtaaaattggtttatttggtggagccggagttggtaaaactgttttaattatggaattgattaacaacgttgcaaaagctcatggtggattttctgtttttgcaggagtgggagaaagaactagagagggtaatgacctctaccatgaaatgatagactcaggtgttattaaaactgatggggaaggttctaaagcagcattagtttatggacaaatgaatgaacctccaggcgcaagagcgcgagttgctttaactggattaactgttgcagagtattttagagatcaagaaggtcaggatgtgttattcttcgttgataatatatttagatttacacaagcaggatctgaggtctctgcattacttggtagaatacctt

SEQ ID NO: 272875 - DNA, 646 bp, Unknown
  Bacterial polypeptide expressing nucleotide sequence isolated from the Sargasso Sea
acgtattctattttgcattctcgcttattagaacgatctgcgaaactgaatgaagataatggatcgggatcattaacggcgtgcccgataattgagactcagggaggagatgtgtcggcatttattcctactaatgtgatatcaatcacagatggtcaaatatttttggaaacagaattgttttaccaaggtatacgtcctgccgttaatacaggactctctgtatccagagttgggtcatcagctcaaactaagtcgatgaaatcagtagctggatcaattaaacttgagttagcgcagtatagagagatggcagcattcgctcagtttggatcagatttagacgcaagcacgcaagcactcttaaatagaggagcgagactaacagaattattaaagcagcctcaatactctcccctaactaatgcagagcaagttattgtaatctatgctggaacaaagggttatttagataaaactcctgtcaacgaggtcacaagcttcgagaaaaatcttgtgagttatttgagatcagaaggaaaagctgtggtagatgaactgactagtcacgaccaaaaaatagatggtgagattgaaagtaaaattaaatcacttttagataattttttaaacacacagatttagt

SEQ ID NO: 272876 - DNA, 598 bp, Unknown
  Bacterial polypeptide expressing nucleotide sequence isolated from the Sargasso Sea
tgataatggaggtggttcattaacagcactacctattattgaaacacaagcaggtgacgtatctgcttatattccaacgaatgtaatttcaattactgatggtcagatatttttagaaacagaactttttaatcaaggaataagaccagcggtaaatgttggtctatctgtttccagagttggttcagcagctcaaactaaagctatgaaaaaagttgcaggttcaataaaattagaattagcacaataccgtgaaatggcagcttttgctcaatttggatctgatttagatgcctcaactcaaaaattattgaatagaggctctaaacttaccgagttattaaaacaagaccaatacagtcctatgacagtagcggaacaggtggtatcagtttattctggtgtaaaaggttatttagatactattgaaaataataaaattcgatcattcgaaaaaggtttattagacttaattaaaaatgaaaaacccgagatattagagtcaattcaaaaaagcggaaagattgaagaggacactgaaaaacttttaacagagattataacaagttataaaaagtcaaattttgataaaaaataa

SEQ ID NO: 272877 - DNA, 778 bp, Unknown
  Bacterial polypeptide expressing nucleotide sequence isolated from the Sargasso Sea
aaactgctttagtttttggtcaatgaacgaacctccaggcgctagactgcgcgttggtttaagtgctttaaccatggcagagtattttagggatgatgaaggaagagacgtattattgtttgttgataatatttttagatttacacaagctggatcagaagtttcagctcttcttggaagaatgccatcagctgtaggataccaaccaacattatctactgaaatgggagatttacaagaaagaattacttcaacaaaaaaaggttctattacatctgttcaagctatttatgtgccagctgatgatttaacagacccagcaccagcaactgcatttgcacatttagatgctacttctgttttagaaagaaaaattgctgaacttggtatttatccagcgattgatcctttgacttcaacgtcaagaatcttagatccaagagttattggtgatagacactacaatgtagctaggtcagttcaagcaactcttcagcaatacaaagatttacaagatattattgcaattctaggaatggatgaattatctgatgaagataagatggtagtttcaagagctagaaaaatgcaaaaatttatgtcacaaccattctttgtagctgaacaatttactggaattgaaggtagatacgttaaattagaagactctattgctggttttgaagcaatattaaatggtgaagttgacgatttacctgaaaatgctttttcatatgtaggttcaattgatgaagccattgagaaaggtaaaaagtga

SEQ ID NO: 272878 - DNA, 742 bp, Unknown
  Bacterial polypeptide expressing nucleotide sequence isolated from the Sargasso Sea
gcttcaacactcaggtctttctgtttttgctggtgttggcgaaagaacaagagaaggaaatgatttttactatgaaatgcaagaatcaggagttgtaaacattgataatctcggcgaatcaaaagttgcgatggtttacggacaaatgaatgagccaccaggcaacaggttgagggttgctttaaccggattaactatggctgaaagctttagagatgaggggaaagatgttttattatttattgataatatttatcgttataccttagcaggtgttgaggtgtctgctcttttaggcaggatgccatctgctgttggatatcagccaacattggctgaggaaatgggggctcttcaagaaagaattacatcaaccaagacaggatctattacatcaatacaagcagtgtatgtcccagcagatgatttaacagacccttcacctgcaacaacatttgctcacttggatgctactgttgttctttcaaggcagatttctgagttaggaatatatccagctgttgatcctcttgattcaacaagtaggcagcttgatccttttgtggtcggggacgatcattatgaagttgctcaaggagttcaaaagatcttacaaagatataatgagcttaaagatataattgcaattctcggaatggatgagctttctgaagaagataaggggcttgtagctagagcaagaaaagctcaaagatttttgtcacagccgttctttgttgct

SEQ ID NO: 272879 - DNA, 849 bp, Unknown
  Bacterial polypeptide expressing nucleotide sequence isolated from the Sargasso Sea
gaattaataaataacattgcaaaagctcacggtggcttttctgtatttgctggtgttggagaaagaactagagaaggaaatgatctctatcatgaaatgatagagtctggagttattaagacaaacggaaaaggttcgaaagctgcattagtttatggacagatgaatgaacctccaggagctagagcccgtgtagctctaacagggcttactgttgcagaatattttagagataaagaaggtcaggatgtacttttcttcgttgataatatttttagattcactcaagccggatctgaagtttcagctttacttggcagaataccctctgcagtcggttatcaaccaacactagctactgatatgggtaacttacaagaaagaattacatctaccgacaaaggatcaattacatctgtgcaagccatttatgtgccagctgacgatctaacagatcctgcaccagctacttcattttcacacttagacgctactacagttttatcaagacaaattgcagaaataggaatttatccagctgtggatccccttgactctacatcaagaatacttgatccaagaatagttggtgaagaacattatagagttgcaagagatgtgcaaagaatattacaggcatataagtctctacaggatattattgcaattttagggatggacgaactttcagaagaagataaattaacagttgctagagcaagaaaaatacaaagatttttatcacaacctttctttgttgctgaagtgtttacaggctctccaggaaaattagttgatttagactcaacaataaaaggatttgatgcaatttgtaaaggagaatatgat

SEQ ID NO: 272880 - DNA, 930 bp, Unknown
  Bacterial polypeptide expressing nucleotide sequence isolated from the Sargasso Sea
ttggaggttgcccaacatcttgggagaaaatgatgtaagaacaatagcaatggatgcaactgagggattaaaaagaggagatgaggtgattaacactggatctccaatcagtgtaccagtgggaccagaaactttaggcagaattatcaatgtagtaggagagtctatcgatgaaaaaggtgatgtaaaaactaaagaaaaatggcctatacacagatcagctccaaaatttacagaccaagcaactgaaacagagcaattagttacaggaattaaagttgttgatttattagctccatatgcaaaaggtggaaaaattggattatttggtggagcaggtgtcggtaaaacagttaccataatggagttgattaataatattgcaaaagcgcatggaggattttctgtttttgccggtgtaggggaaagaactcgagaaggaaatgatttgtatcatgaaatgatagagtcaggagtaattaagactgagggaaaaggctcaaaagcagcattagtttatggccaaatgaatgagcctcccggagcaagagccagagtagctttaacaggattaacagttgcagaatattttagagataaagaggggcaagacgttcttttctttattgataatatttttagatttactcaagctggctcagaagtatccgctttacttggtagaattccatctgcagtaggttatcaaccaactttagctacggatatgggaaatcttcaggaaagaattacttctacagacaaaggatctattacatctgttcaagcaatttatgtgcctgcggatgatttaacagatccagctccagcaacttcattttctcacttagatgcaactactgtattatcaagacagattgcagaaattggaatttatcctgcggtagatcctctagattcaacttcaag

SEQ ID NO: 272881 - DNA, 499 bp, Unknown
  Bacterial polypeptide expressing nucleotide sequence isolated from the Sargasso Sea
atgacggataatattggtaaaatcaaacaaattttaggagcagtagttgatgtttcatttgttgagaaacttccacaaatcctagatgcgctagttgtaaaacatgaaaataaagatctagtattagaggtggctcaacatcttggagaaaacacagtaagaacaattgcaatggattcgacggatggactagtgagaggacaggatgttttagatacaggcaatccgatttctgttcctgtgggaccagagacattaggtagaatacttaatgttattggggaacctgtggatgaaagaggccaacttaaaacaaagttaaggtcccctatacataaaagtgcacctgagttcatagatcaatcaacagaaactgaagttctcgtgactggtataaaagttgtagatctcttagcgccatatgcaaaaggagtgaaaaatcggtctttttggtggtgccggcgtgggcaagactgtattaataatggaacttattaac

SEQ ID NO: 272882 - DNA, 148 bp, Unknown
  Bacterial polypeptide expressing nucleotide sequence isolated from the Sargasso Sea
atggaacttattaacaatattgcaaaaggtcatggaggatattctgtttttgctggtgttggtgaaagaacaagagaaggaaatgatctttatcacgaaatgattgaatcaggcgttataaaacttgatagtgatgaatcaaaagctg

SEQ ID NO: 272883 - DNA, 835 bp, Unknown
  Bacterial polypeptide expressing nucleotide sequence isolated from the Sargasso Sea
agcattagagtgcaataacagtggcaacagattagttttagaagttgcacaacatttaggagagtcaagtgtaagaacaattgctatggatgctacagaaggtttaaaaagagggaatgaagtaatggatactggagccccaattaaggttcctgttggaccagaaacgctaggaagaattataaatgtaattggcgaacctattgatgaaaaaggtaaagttgaaactaaagaaaattggccgatacatagatcagctccagaatttaatgatcaatcaactgagacagaaattttagtaaccggtattaaagtagttgatttgttagcgccatatgcaaagggtggtaaaattggtttatttggtggtgcgggagtaggtaaaacagttcttattatggaattaattaacaacgttgcgaaagcgcacggaggattttcagtttttgcaggagttggtgaaagaactagagaaggaaatgatctttatcacgaaatgatagaatcaggagtgattaaaccagaaggatctggttcaaaagctgcattagtttatggccagatgaatgaaccaccaggagcaagagctagagttgcattatcaggattaactgttgctgaatattttagagatcaagaaggtcaagatgtactatttttcgtagataatatttttagatttacccaagcgggatctgaagtatctgcattattaggaagaattccttctgctgtaggttatcaaccaacactagctacagacatgggaaatcttcaagaaagaattactacaacaaataagggatcaattacgtctgttcaagcgatatatgta

SEQ ID NO: 272884 - DNA, 841 bp, Unknown
  Bacterial polypeptide expressing nucleotide sequence isolated from the Sargasso Sea
cggagcggtagtagacgttgagtttccaaaagaagcgataccgagcgtatatgacgcactcacccttaaagacggagaactggtttttgaggttcagcagcaactaggtgacggcattgtcagaaccattgcaatgggagcaagcgagggcttaaaaagaggccttgaggttgaaaatactggggccccaattagcgtgcctgtaggacaagaaactctaggaagggttctagatgttttgggcaacccgatagatgagaaaggccctgttggcgccaaagcaaatagaccaattcacgcaaaagcacccacatttgaagaacagtctacagaagcggatgtattagaaacaggaattaaagttatcgatcttctctgcccatttgcaaaaggaggaaaggttggtttgtttggcggtgcaggcgtcggaaaaacagtaactgttatggaattgattagaaacattgcagcagagcacgacggcttttcggtttttgctggagttggagaaagaacaagagaggggaatgacttctatcatgaaatgatggagtcaaacgtcctggataaggttgcacttgtttacggtcaaatgaacgagcctccgggcaacaggctcagggttgctttgaccggactgacaattgctgaaaactttagggacgagggaagagatgtcttgatgtttatcgataacatttacagatacactcttgcaggcacagaagtatctgcacttcttggaagaatgccatctgcagttggatatcagcccaacctagcagaagaaatgggcgttcttcaagagaggatcacctcaacgaaaacagggtcaatcacc

SEQ ID NO: 272885 - DNA, 511 bp, Unknown
  Bacterial polypeptide expressing nucleotide sequence isolated from the Sargasso Sea
atgaaaattcgagcagaagaaatcagtaacatcatccagcagcaaatcgaaaatttcgagaagcagaccaccaaaaccgaagtaggaaccgtattggaagtaggtgatggaatcgcacgagtctacggacttgataatattgttgccggcgaacttgtggaattccccaataaccttcaaggcatggccctcaatctggaagaggataatgtcggtgtcgtgctttttggtgatgaccgaaacatcaaggaaggagacgaagctcgaaggacagagcgcatcgcagaagttcctgtcggtgatgccatgctcggtcgggttgtggaccctcttggacaaccgattgatggcaagggccccattgagacctcagaaagccgaagagtcgaagtcattgctccgggtattgtcactcggaagtcggtgcatgaacctcttcagacgggtctcaaggcaatcgactcgatggtcccgattggacgcgggcaacgtgagttgatcattggcgacc

SEQ ID NO: 272886 - DNA, 946 bp, Unknown
  Bacterial polypeptide expressing nucleotide sequence isolated from the Sargasso Sea
taataggttagttctagaggttgctcagcatttaggtgaaacaacagttagaacaattgcaatggatgctactgaaggattaaagagaggtgatgaagtaataaatactaatgctcctatccaagtacctgttggacccgaaactcttggaagaattattaatgtaattggagaacctatagatgaaagaggcaaggtcaaaacaaaagagagctggccaatacatagagcagctcccgaatttaatgatcagtctactgaaacagaaattcttgtaacagggattaaagttattgacctactagcgccctatgcaaaaggtggaaaaattggattattcggtggagctggagtaggtaaaacagttttaattatggaattaattaataacgttgcaaaagcacatggaggattttcagtttttgctggagtaggcgaaagaactagagaaggaaacgacctttatcatgagatgatggattctggagtaataaaaaaagatggtcctggatctaaagctgcattagtttatgggcagatgaatgagcctccaggagcaagagcaagagttgcacttacaggtctaacagttgctgagtattttagagaccaagaaggacaagatgttcttttctttgttgataacatttttaggtttactcaagcgggctcggaggtttctgctcttttaggaagaattccatctgcagttggttatcaaccaacattagctacagatatgggaaatttacaggaaagaattaccacaacaaacaagggttcaattacatcagttcaagcaatttatgtaccagctgatgatttaactgatccagctccagcaacttcatttgcgcacttggatgcaacaactgtactttctagacaaattgctgaaataggcatttatccagcagttgatccactagactctacatcgagaatt

SEQ ID NO: 272887 - DNA, 529 bp, Unknown
  Bacterial polypeptide expressing nucleotide sequence isolated from the Sargasso Sea
aatggcaaaaaatgtaggaaaaattacgcaagttatcggtgctgtcgtcgatgtacaatttgacgaaaaattaccggagattctgaatgcattagaaactgataataacggcattaacgttattttagaggtggcgcagcatttaggtgaaaatacagtcagaacaattgcgatggatagtacggagggcttagtaagaggaaatcaagtggtcgacactgaaggtccaataagcgttcctgtgggcaatccaacacttggccggattttaaatgtggttggaacaccagttgatgaaaagggagaggtcaaatccactgaatctaggccgatacatcgagatgcgccagagttctccgaacaggccacagaaacagaaattttggtgaccggaataaaagtagtagaccttttggccccttactcaaagggaggcaagattggtctttttggaggggctggagttggaaagacggttctaattatggaattgattaataatattgccaaagtccactcaggtttttca

SEQ ID NO: 272888 - DNA, 763 bp, Unknown
  Bacterial polypeptide expressing nucleotide sequence isolated from the Sargasso Sea
atgccgagtttagatgatttaaaaaaaaggattaaaagtgtcaaatctactcagaaaattacaaaagcaatgaaaatggttgccgcagcaaaacttaggaaagcacaagagaatgcggaaaaaggtcggccttatagccaaaaaatgcaaaacataattttaaatctgacaaaatctataagtgaccctgataatgctcctaaacttttagttggaactggaaaagataaatcatatttatgtgttgttttaacagctgacagaggactgtgtggaggcttcaatacaaatatttgtaaattagctaaaacaaattttaaaaaaattttaaacgaacaaaaagatctcaaaatcattacagttggatctaaaggtttggatcaaattaaaagagattttggaaaatatgtgattaaaaaatttagttttaaggataagaaaaatataacctttgcagaggcagagattattggaactgaaattattaaactatttaaagataatcaatttgataaatgcttactattttataataattttaaaaatgtaattactcagattcctcaagttcaacagattatacctgcgcaaaacgaagactctaaagacgaaaatgaaagtaatttttcatatgagtttgaaccggatgaggatgaaatattggaagaattgcttccaaaaaatatttcaactcaagtatttaaagcttttctggaaaatgcagcaagtgagcaagggtcaaggatgactgcaatggacaatg

SEQ ID NO: 272889 - DNA, 757 bp, Unknown
  Bacterial polypeptide expressing nucleotide sequence isolated from the Sargasso Sea
atgaaaaaaggaaaaattacacaaattataggtgcagttgtagatgttaaatttgaaggggatcttccagaaatattaacagcactagaatgtaaaaatggaaacaacagattagttttagaggttgctcaacatctaggagagtcaagcgttagaactattgctatggatgcaacagaaggcttaaaaagaggtgatgaagtaactgatacaggtgctcctataaaagttccagtaggacctgaaactttaggaaggattgtaaatgtaataggagagccaattgatgaaaaaggagaaattaaaaccaaggaaaattggccaattcatagagctgcaccggagtttaatgaccaatcaaccgagacagaaattttagtgactggaattaaggtggtcgatctattagctccatatgcaaagggtggtaaaataggactgttcggaggtgcaggagtgggaaaaacagttatcatcatggaacttataaataacattgcaaaagcacacggtggattttcagtttttgcaggtgtcggagaaagaactagagaaggaaacgatctttatcatgaaatgatagagtcaggtgtaattaaacctgaaggacctggatcaaaagcagcattagtttatggacaaatgaacgaacctcctggagctagagctagagtagcattatcaggattaacagttgctgaatattttagagatcaagaaggtcaagatgtactttttttcgtagataatattttta

SEQ ID NO: 272890 - DNA, 584 bp, Unknown
  Bacterial polypeptide expressing nucleotide sequence isolated from the Sargasso Sea
tatggcaagtttagacgatttaaaaaaaagaatttcaagtgttaaatctacacaaaaaattactaaggcaatgaaaatggttgctgcgtctaaattaagaagggctcaagaaagtgcggaaaaaggaagaccgtattcagataagatgaataatattattcttaatctttcaaatagtatttcagataaagaaaattctcctaaattactttcaggttctggtgaggataaagttcatttatgtatcgtaatgacttctgatagaggcttatgtggtggatttaatacaaatataattaaaaaagctaaagtgtactttcaaaaaatcttagatgaaggaaaaaacttaaaaattattactgttggatcaaaaggttatgatcaattaaaaagaacgtataaagataatataattgaaaaaatttctttcaaagaatcgaaacatgctaattattttgatgcagacaaggtaggaaaaataattattgatagatttgaaaaaaaagaatttgatgtatgcacaattttttataaccaatttaaaaatgtaataactcaaataccacaagaacaacaaattattc

SEQ ID NO: 272891 - DNA, 880 bp, Unknown
  Bacterial polypeptide expressing nucleotide sequence isolated from the Sargasso Sea
atggcaatgggtcagacagaaggtctacaaaggggcgcaaaagtctcaaatacaggagacgcggtcaaagtgcccgttggagaaaaaaccttaggaaggattttgaatgtcttgggtgaacccattgacggaaaaggcgatgtcggagctgaagaacaaatgcctattcacagagctccaccaagctacgaagatcaggcggaatcatctgagattttagaaacaggaatcaaagtaattgatctaatgtgtccgtttgctaaaggaggtaaagtcggattgttcggaggcgccggagtaggaaaaacagtcaatatgatggagctaatcagaaacattgcttacgaaactagcggatattctgtttttgctggtgtcggcgagaggacaagagaaggaaatgatttttatttagaaatgaccgaatcacaagtattggataaggttgctttggtttatggacaaatgaacgaacctcctggatgcagaatgagggtagctttatcaggattaaccattgctgagaaattcagagatgaaggtaaagatgtactcttgtttgttgataacatttacagatacacattggctggtgtggagtgttcatcgcttcttggaagaatgccatccgcagtaggttatcagccaacgcttgctgaagaaatgggagttcttcaagaaagaattacatcaaccaagacgggttcaatcacatcagtgcaggcaatatatgttcccgcagatgatttaacagatccatcaccggcaacgacgttcgctcacctcgatgcaacagtagtactttcaagacaaattgcgtctcttggtatctatccggcagttgatccgcttgactctaccagcagacagctgatccagc

SEQ ID NO: 272892 - DNA, 741 bp, Unknown
  Bacterial polypeptide expressing nucleotide sequence isolated from the Sargasso Sea
tgcttgcttcattagcatcatcagcttcttctggagaggggattattaagcttcttactggcacaggcaatgatcaaaattatattgttgttcccgtaagcgcagatagaggtttatgtggtggttttaatagtagcattaatagagagacatttaaacttgtgaagtctctagagggtgatgggaaaaatgttcaaattatgcctgttggaaaaaagagtagagatttttttaaccgagtaatgaaagatcaaattactgaaagtttcgttgatttgaatatttcaaatactggttatgaatcagcactacaagtatctaacaaactgcaagaattatattttgaaggaaaatttgataagtgcattttagtttttaataaatttaagtcagcaatttcacaagaagtgacgcaacaacaacttattccacttgatgtatcagagtcttctaatgaagataatattaatgatagtgcggctaaagcaatttatgattatgaacctgatgaagaaactattttaaaagatctacttcccaaaaatgtttctattcagatttttaaagtcttattagaaagtgatgctggagaacatggagcaaggatggctgcaatggataatgcaacacgaaatgctggtgagatgattgatagtttaacattaaaatataacagaacgcgacaagcgtttataactaaagaattaattgaaattatttctggagctgaatcaatttaaa

SEQ ID NO: 272893 - DNA, 662 bp, Unknown
  Bacterial polypeptide expressing nucleotide sequence isolated from the Sargasso Sea
tcgtgaagcatatcccggagatgtattctatttgcatagtagattattagaacgtgcagctaaattaaatgaaaaagaaggaggtgggtcattaacagctttaccaattattgagacgcaagcaggtgacgtatctgcttatattccaacaaatgttatttcaataaccgatggacaaatatttttggaaactgaattatttaatcaaggaattcggccagcagtcaatgttggtctttcagtttcacgtgtgggttctgctgcacaaactaaagcaatgaaaaaagttgctggttcgataaaattagaactagcccaatatagagaaatggctgcgttcgcacaatttggttcagatctagatgcttctactcaaaaattacttaatcgaggtgctaaattaacagaacttttaaaacaggatcaatattctccaatgaccgtagcagaacaagttatttcagtatttacaggagttaaaggttatctcgatgatgttgatttaaataaaattaaaaaatttgaaaaagatatagttgacaaaattaaatcagaaaaacccgaaattatagaggcagtacagtcatctggaaaacttgaggaaaatattgaaaaattgctctcacaaataattgaagaatataaaaaaggtaaaaaataat

SEQ ID NO: 272894 - DNA, 657 bp, Unknown
  Bacterial polypeptide expressing nucleotide sequence isolated from the Sargasso Sea
gcacctcggtgaaaatactgttcgaactattgctatggacgcaacggagggtcttcaaagaggccaagaggttcaagacaatggtgatcctatttctgtgccagtcggaccagaaacattaggtcgaattatgaacatcatcggtgaacccattgacgaacgaggtcctattgaatcaaaaaaatctcttcctattcacagagcagctcctgattttgttgatcaatcaaccgaaaccgaagttcttgttacgggtattaaagttatagatcttttagcaccttactcaaagggtggaaaaattggtcttttcggtggtgctggtgttggaaaaactgttttaattatggaattaattaacaacgtagctaaagctcatggtggatactctgtttttgctggagtgggagaaagaactcgtgaagggaacgatctttaccatgaaatgattgagtcaggtgttatcaaccttgagggtgatacttctaaagtgtctctagtttatggtcaaatgaatgaacctccaggagctagagcaagagttgctttatcaggtttaacacaagccgaatattttagagatgaggaaaatcaagacgtattattctttgttgacaacatcttccggtttacacaagctggatcagaggtttcggc

SEQ ID NO: 272895 - DNA, 757 bp, Unknown
  Bacterial polypeptide expressing nucleotide sequence isolated from the Sargasso Sea
atggaaataaatccttcagaagtaactaagattttaaaagaacaaattaaacaatttggagacaaagctgaagtttctgaagttgggcaagtattatctgtaggcgatggtattgcaagaatttacggtctagataatgttcaagctggagaaatggttgagttttcagatggatcaaaaggtatggcactaaacctagaaagcgaaaatgtgggtgttgtaatttttggtgatgatagagccgttaaagaaggtgatacagttaaaagaacaggagctattgttgatactccagttggaaaagaacttctaggaagagtcgttgacggtttaggaaatccgatagatggtaaaggtgctctagataaaggtattaagaaaagcagagttgaggtaaaagcgcctggaattattccaagaaaatctgttagtgaacctatgcaaacaggtttaaaatcaatcgacagtttggttccaattggaaggggtcagagagaactaataattggagacagacaaactggaaaaactgcagttgcaattgatgcaattatcaatcaaaaaaaaattaatgagtctggcgatgaaaaacaaaaactttattgtatttacgttgccattggtcaaaaaagatcaactgtaagacaaattgaaaagactttagaggaagctggagcaatggagtatacaactattgttgctgcaaccgcttctgatgctgcccctcttcaatttctggcaccatacacaggatgtg

SEQ ID NO: 272896 - DNA, 730 bp, Unknown
  Bacterial polypeptide expressing nucleotide sequence isolated from the Sargasso Sea
atggcaagtttagacgatttaaaaaaaagaatatctagcgttaagtctacacaaaagataacaaaagcaatgaaaatggttgctgcagctaagttgagaagagcacaagaaagtgctgaaagaggaagaccttactctgagaagatgaataatatcattttaaatttgtctagtggtgtttcagacaaggaaaacgcaccaaagttattatctggtacaggtgatgataaggttcatctttgtgttgtattgacagccgatagaggtctttgtggtggttttaattcaaatattattaaaaaagcaaaatcttattttcaaaaaatttctgatacaggaaaaacattaaaaattattacagttggctcaaaaggatatgatcaactaaaaagactataccaggataaaataattgaaaatatttcatttaaagagtcaaaaaacgcaaattattttgatgctgacaaagtcggaaaaataattatagaaaaatttgagaataatgagtttgatgtatgtacaatattttataatcaatttaaaaacgtaattactcaaatcgctcaagagcagcaaataattcctttaaaaactgaagaaaaagataacaaatcatcggaggagaactatgagtttgaaccagatgaagatgaaattttaggaaatttacttccaaaaaatatttcaactcaaatttttaaagcgatgttagaaaattcagctagcgaac

SEQ ID NO: 272897 - DNA, 794 bp, Unknown
  Bacterial polypeptide expressing nucleotide sequence isolated from the Sargasso Sea
tgctttggtctatggtcaaatgaatgaaccgcctggcgcaagagcccgtgtagcacttactggattaactgtggcagaatattttagagataaagaaggtcaagacgtactttttttcgttgataatatttttagatttacgcaagcaggatctgaagtgtcagctttgttagggaggataccttccgctgtgggttatcaaccaacattggcgactgacatgggaaatttacaagaacgaattacttctacagacaaaggctctataacatcggttcaagcaatatatgtacccgcagatgatctaactgatcctgctccagcgacatcgttttctcatttagatgctactactgtattatcaagacagatagcggagataggtatttatcctgcagtcgatcccctggactcgacatctagaatacttgatccaagaatagttggagaggaacactatagagttgctagggatgttcaaagaatattacaagcatacaaatctttacaggatataattgcaattcttggaatggacgaactgtcagaagaggataagttaactgtagctagggctagaaagatacaaagatttttatctcaaccattctttgttgctgaggtcttcactggttcaccaggtaaattagtggatttagagtcaacaattaagggattcgattctatttgtaaaggtgaatatgatcatttacccgaagcagctttttatatggtaggtggtatagaagaagttgtagagaaggcaaataaattagataaagaaactaaataat

SEQ ID NO: 272898 - DNA, 649 bp, Unknown
  Bacterial polypeptide expressing nucleotide sequence isolated from the Sargasso Sea
atgccaagtttggatgatcttaaaaaaagaattaaaagtgttaaatccacacagaaaataactaaagctatgaaaatggtagctgcagctaaactaagaaaagcacaagagaatgctgagaaaggccgaccttacagtcaaaaaatgcaaaatataattcttaatttaactaaatctatgagtgatccacaaaatgcacctaaacttcttgttggaacaggaaaagatagtacttatctatgtgttgttttaacagccgatcgaggattatgtgggggttttaactctaatatttgtaaactcgcaaagacaaattttaaaaaaattcttaatgaaggaaaagaactaaaaataattactgtaggaacaaaaggattggaccagattagaagggagtacggaaaaaatataattaaaaaatttagttttaaaaataaaaaacaaattacgtttaatgaagctgaaataataggggcagaaatcatagatttatttaagaaaaatgaatttgataaatgcattttgttttataataattttaaaaatgtaattacacagatccctcaagcgcaacaaattattcctgctgaaaataactcatataaacaaaaagaagaaaatccaacctcttatgaattgaacccgagga

SEQ ID NO: 272899 - DNA, 589 bp, Unknown
  Bacterial polypeptide expressing nucleotide sequence isolated from the Sargasso Sea
aatgagtactaaaataaacccatcagaaatctcaagcatcataaaaaagaaaattgaagattataagggtgcgacttctgaatcaaatgtaggagaagttctttctacagcagatggcattgttcaaatttttggattagaggatgcaatgtatggagagctattagattttggagagggtacctatggattggcgcttaaccttgagaatgattctgttggggcagttgttttaggtgacgctggacatatcaaggagggtcaaaaagtaaaaacaaccggaagaattttagaagttcctgttggggaagggctaaaaggacgtgttattgacgcactaggcagaccaattgatggaaaaggggaagttaagtcagaaacaaatgcacctattgaagttgtagcgccaggtgttattgacagacagggtgttgatcagccagtgcaaacaggaatcaaatctatagatgtaatggtaccaattggccgtggtcaaagagaacttattattggagatcgccaaacagggaaaactgctattgctgtagatgcaattattaaacagaaagattcagacataacatgcgta

SEQ ID NO: 272900 - DNA, 664 bp, Unknown
  Bacterial polypeptide expressing nucleotide sequence isolated from the Sargasso Sea
atgagtcaactaaacccatccgagatatccagtgttcttaaagagaaaattgctggactagatttaagtgcagaaagaaagaatgaaggggtaatagtgagcgtttctgacggcattgttagaattcatggcatgggcgaagtcatgtatggagagctcattgaatttgaaaatggcgtgttcgggttagcccttaaccttgaacaagattctgtgggtgcggtggtgttgggagactaccttgatttgattgaaggccaaaaagcaacatgtactggcaaaattcttgaagttccagttggtaatgagcttctaggtagggtggttgatgcgcttggaaatccaatcgatgggggtggtgaaattaatgcatcacttacagctccagtggaggttgttgcacctggagtaatagcaagacaatctgttgatcaaccagttcagactggtctaaaagctattgatgctatggtgccgataggtagaggacaaagagagcttattatcggcgacagacaaaccggcaaaacagctgttgcaatagacacaattattaatcaaaaaggcaccggtattaaatgtatctatgttgctattggtcagaaacaatccactattgcaaatgtagtaagaaagcttgaagagtatgatgcgcttgcgcaca

SEQ ID NO: 272901 - DNA, 667 bp, Unknown
  Bacterial polypeptide expressing nucleotide sequence isolated from the Sargasso Sea
caatcgactgaaactgaaatacttgttactggtattaaagtaattgatttgcttgctccttatgcaaaaggaggaaaaattggtttgttcggcggttgctgggttggaaaaactgttttgattatggagttaatcaataacgttgcaaaagcacacggtggcttttcagtttttgctggggtaggagaaagaacaagggaaggaaacgatctttatcatgaaatgattgagtctggtgttatcaaacaggacggaccaggatctaaagcagcattagtttatggacaaatgaatgaacccccaggtgctagagctagagtggctcttactggattgactgtggcagaatattttagagatcaagagggacaagatgtacttttctttgttgataatatttttagatttactcaagcaggctcagaagtttcggcacttttgggtagaattccatctgcagttggttatcaaccaacattagcaactgatatgggtaatcttcaagaaagaattaccactactaacaaaggatcaattacttcagtacaagcaatttatgtacctgcagatgatttaactgatcctgctccggctacatcttttgctcatctggatgcaacaacagtgctttcaagacaaatagctgagattggaatatatcctgctg

SEQ ID NO: 272902 - DNA, 451 bp, Unknown
  Bacterial polypeptide expressing nucleotide sequence isolated from the Sargasso Sea
agatgctacaacagttttgaatagagcgatttctgaaaaaggaatttatcctgcggtagatccattagattctaattcaagaattcttgatccacaagtagtgggagacgatcattatagagttgcaagagaagttcaaaaaatacttcaaacttataaaagccttcaagatataatagcaattttgggaatggatgaattatcagaggaagacaaattaacagtggcaagggcaagaaaaatagaaaaatttttgagccaaccattttttgttgcagaagtttttacaggttctccaggaaagtatgtagagctagaagagactatcaaaagctttgatggagttgttaagggtgaatacgatcatttaccagaagctgcattttatatggttggtggcattgatgaagctattgaaaaagctaaaaaactagaagctgaggccgcataa

SEQ ID NO: 272903 - DNA, 831 bp, Unknown
  Bacterial polypeptide expressing nucleotide sequence isolated from the Sargasso Sea
ctgcatcggactctgctcctctacaattcttagcaccatatacaggttgtactatgggtgagtattttagagataatggaatgcacgcattaataatttacgatgatttgtctaaacaagcagttgcttatagacaaatgtcattgctattgagaagacctcctgggcgtgaggcctatcctggagatgtattttatcttcatagtagattacttgaaagagcagctaaattaagtgacgaacatggtggtggatcacttacagcgctgccaataattgaaacacaaggtggagacgtatccgcgttcattccaactaacgttatttcaattacagacggacaaattttccttgaaacagaactatttaaccaaggtataagacctgcaattaacgtaggtttatcagtatctagggttggttcatcagctcaaacaaaagcgatgaaaaaagtttctggttcaatgaaattagagctagcccaatacagagaaatggcagcttttgctcaattcggatctgatttagatgcatctactcagcaacttttgaatagaggctctaaactaactgaacttttaaaacaaaaacaatattcaccgatgactgttgcagaacaagttatttcagtattttgtggagttaaaggttatctggacgatattgatttaaaagatgttgctgaatttgagagcaagattattgaaaaatgcaaatcagataagcctgaaattatcgagtcaattttaacttcaggaaaacttgaggaagataaagaaaaattacttgttgaggtaatcactcaattaaaaggaaattttaaatcttaat

SEQ ID NO: 272904 - DNA, 766 bp, Unknown
  Bacterial polypeptide expressing nucleotide sequence isolated from the Sargasso Sea
tatggaaaacactggtaaaataactcaaataattggagcagtagtagatgtaaatttcaaaggcaatttaccagaaatttatactgcgctagaagctaataactctggcaataaattaattttagaagttgctcagcatcttggagaaaacgatgttagaactatagcaatggatgcgacagaaggtttaaaaagaggagataatgttgttaacactggttcaccgataagtgtgccagtaggaccagaaactctaggtagaataataaatgtagttggagattcaattgatgaaaaaggagaggtaaagaccaaagaaaaatggccaatacacagaccagccccaaaatttactgatcaagctacagaaacagagcaattagttactggaataaaagttattgatttgttggcgccatacgctaaaggaggaaaaatcggattatttggtggagctggagtaggtaaaacagttacaataatggagctaattaataatatagctaaagctcacggaggcttttcagtttttgcaggtgtaggtgaaagaacgagagaaggtaacgatctttaccacgaaatgattgagtctggggtaattaaaactgagggcaaaggatcaaaggctgcattagtatacggtcagatgaatgaacctccaggtgcaagagctcgtgttgctctaaccggattaacagttgctgaatattttagagataaagaaggacaagacgttctctttttcgttgataatatttttagattt

SEQ ID NO: 272905 - DNA, 829 bp, Unknown
  Bacterial polypeptide expressing nucleotide sequence isolated from the Sargasso Sea
gcaagaggtcgtggtggaagttaaagctccaggtattatgcctcgtaagggtgtccacgagccaatgcaaactggactaaaagcgattgacagtttgatccccgtaggccgcggtcaacgtgagctaattattggtgataggcaaactggtaaaactgccatcgcgatagatgcttttattaaccaaaaatcagttaatgacgctgctggcgacgatgattccaaaaagctgttttgcatttatgtagcagttgggcaaaagcggtctactgttgcacaaatagttaaaacgctagaagactatggagcgatggaatactccatagtgatcgcatcaactgcttctgaacctgcaccaatgcagtttttagctccctacgcgggctgcaccatgggagagtatttcagagataacggcatgcacgccctcatagtttacgatgacttatcaaagcaagcagtcgcatacaggcaaatgtctctgcttcttagaaggccgccaggacgggaagcataccctggcgacgtattttacattcattcgcgattgttagaacgagcagctaaaatgaatgatgagaatggcgctggctcacttactgcgttgccggtgattgaaacacaggcaggggatgtttcggcatacattccgaccaatgttatttccataactgatggccaaattttccttgaaacggagcttttttatagaggaataaggcctgcggtgaatgttggactatcagtgagccgggttggttcagcagcgcagatcaaagctatgaaacaagtggcgggtaggatcaaattagagctagcccagtaccgc

SEQ ID NO: 272906 - DNA, 706 bp, Unknown
  Bacterial polypeptide expressing nucleotide sequence isolated from the Sargasso Sea
atgacagctcttaaaacagaacagaacattggtcgtattacacaaattattggaccagttattgacgcagttttcccaccaaacaaaatgccaaacatttacaactcagttgtaattgaagggaaaaatgaagttggtgatccaattaaatgtgtagcagaagtacaacaacttcttggagacaacgtagtacgtgcagtatcaatgagtgcaactgacggtttaatgcgtggtatgacagtagtagatactggatcagcacttgcagtaccagtaggtaaaaacactcttgggcgtatttttaatgttctcggtgagccagtagacgaacttggaaatgtagagactcctgaaggaactctcccaatccaccgtccagcacctgcattcgtagaccttgatacaaacctttcaatttttgaaactggaattaaggtagtagaccttcttgctccttaccgtcgtggtggaaaaattggtctttttggaggagctggtgttggtaagacagttcttattatggaactcattaacaatattgctaaagcacacggtggagtatcagtattcgctggtgtaggtgagcgtactcgtgaagggaacgacctttaccaagaaatgtgtgaatcaaaagtaattgacacaggaaacctttcaaactcgaaagtagcacttgtttacggacaaatgaacgaacctccaggag

SEQ ID NO: 272907 - DNA, 902 bp, Unknown
  Bacterial polypeptide expressing nucleotide sequence isolated from the Sargasso Sea
gggagcgagcgagggcttgaagagaggccttgaggttgaaaatacaggcgctccaatcagtgtcccggtaggacaggaaaccctcggaagggttttggatgtccttggcaatccaatcgatgaaaaaggaccggttggcgctaaatcaaacaggccgattcacgcaaaagcaccctcgtttgaggagcagtcaactgaagctgacgtattagaaacaggaattaaagtcattgaccttctttgcccgtttgcaaaaggcggcaaggtgggcttgtttggcggtgctggtgtcggtaaaacagttactgtcatggagctaattagaaacatcgccgcagaacatgacggcttttcggtttttgctggagtgggagaacgaacaagagaggggaatgacttttaccatgaaatgatggagtcaaacgtcctcgataaagtagcacttgtatacggacaaatgaatgagcccccaggaaacagactcagagtagcactgactgggctaacgattgctgagaactttagggacgagggaagagatgtattgatgtttatcgacaacatctacagatacacgcttgcaggcacagaggtatcagcattgcttggaaggatgccatctgcggttgggtatcaaccaaaccttgcagaagagatgggcgtacttcaagaaaggattacctctacaaaaacaggttcaatcacatcaattcaagcggtttatgtaccagcagatgatctgacagacccttccccagctacaacatttgcccacctggacgcaacagttgtattggcaagatcaattgcagagcttggtatttatccagcggttgacccgcttgactcaaacagtcgtcaattagaccctggcattgttggccaagagcactatgacactg

SEQ ID NO: 272908 - DNA, 398 bp, Unknown
  Bacterial polypeptide expressing nucleotide sequence isolated from the Sargasso Sea
ggccgtcgacccactcgccagctccagccggatcctagatccacagtacgttggagaacggcactataacgtcgcacggcgtgttcagaccacattacaacgttaccgagaactccaagacatcatcgcaattcttggcgtcgacgaactttccgaagaggataaacttgtagtccatcgtgctcgacgaatggaacgattcttatctcagcccttccttgtagctgaagtatttacaggaaagccaggtgaaatcaccagcctcgaagatacaatccgatctttcgaagaaatcgctgatggaaaatgggaccatctcccagaacctgcgttcatgtatgtcggcccgattgaacaagctgaagagcaggccaagaaaatggcagaaaagtcataga

SEQ ID NO: 272909 - DNA, 339 bp, Unknown
  Bacterial polypeptide expressing nucleotide sequence isolated from the Sargasso Sea
ttatagagtcgctcgtgaagttcaaaaaaatattacaaacctataaatctcttcaagatattattgcaattctgggaatggatgaattatccgaagaagataaattagtagttgcaagagcaagaaagatacaaagatttttatctcaacctttcttcgttgcagaagtttttacaggttcccctggaaagctggtagatttagaatctactattaaagggtttgatgcgatttgtaaaggtgagtacgatcatttaccagaagctgcattttatatggttggaacaattgaagaagctattgaaaaagctgaaaaaattaaaaaagacgccgcttaat

SEQ ID NO: 272910 - DNA, 676 bp, Unknown
  Bacterial polypeptide expressing nucleotide sequence isolated from the Sargasso Sea
atgagaaaaggacaaattacacaggttattggggcagtagtagatgttaagtttgatggagagttacctgagattttaaccgccttagaatgtaacaatagtggcagcagacttgttttagaagttgcacagcacttaggagagtcaagtgttcgaacaattgcaatggatgcaactgaaggactaaaaagaggagatgaagtcacagatacaggttctccaatcaaagttccggtaggacctgaaacactaggaagaattgtaaatgttattggcgaacctattgatgaaaaaggtgaagttaaaactaaagaaagctggccaatccatagagctgcaccagaatttaatgatcaatcaacagaaactgaaattttagtaactggaattaaagttgtagacttattagcaccttatgcaaagggtggtaaaataggtttatttggtggtgcaggagttggaaaaacagtaattattatggaattaattaacaacattgcaaaagcacatggaggattttcagtatttgcaggtgtaggggaaagaactagagaaggaaatgatctttatcatgaaatgatagagtcaggagtaattaaacctgagggacctggatcaaaagctgcattagtttatggccaaatgaatggaacctcctggagcaagatcaagagtg

SEQ ID NO: 272911 - DNA, 697 bp, Unknown
  Bacterial polypeptide expressing nucleotide sequence isolated from the Sargasso Sea
tatgagtaaaaaaggaaaaataacacaaattataggagcagtcgtagacgtaaactttgatagtgatcttcctgaaatttatacagctctcgaggctaataattcaggaaacaaattaatattggaggtcgcccaacatcttggagaaaatgatgtaagaacaatagcaatggatgcaactgagggattaaaaagaggagatgaggtgattaacactggatctccaatcagtgtaccagtgggaccagaaactttaggcagaattatcaatgtagtaggacagtctatcgatgaaaaaggtgatgtaaaaactaaagaaaaatggcctatacacagatcagctccaaaatttacagaccaagcaactgaaacagagcaattagttacaggaattaaagttgttgatttattagctccatatgcaaaaggtggaaaaattggattattcggcggagcaggtgtcggtaaaacagttaccataatggagttgattaacaatattgcaaaagcgcatggaggattttctgtttttgccggtgtaggggaaagaactagagaaggaaatgatttgtaccatgaaatgatagagtcaggagtaattaagactgacggaaaaggttcaaaagcagcattagtttatggccaaatgaatgagcctcatggagcaagagccagagtagctttaacaggattaaca

SEQ ID NO: 272912 - DNA, 409 bp, Unknown
  Bacterial polypeptide expressing nucleotide sequence isolated from the Sargasso Sea
aatgaataaagaaggtgtaataacgcaattaattggtgctgtagtagatgttaaattccaagataatttaccagaaatctatactgctcttgaggctgataatgacggaaataaactaatattagaagttgcccaacatttaggtgaaaatagcttaagaaccattgctatggactcaactgaggggctcaaaaggggagataaagtttttaataccaagccacctataagtgtgcctgtaggcccagagacattaggaaggataataaatgttattggccaacctattgacgaaaaaggagatgttaatacaaaggaaaagtggcctatacatagaccttcaccaaaatttactgatcaatcaactgaaacggaaattcttgtaacaggtataaaagttatagactta

SEQ ID NO: 272913 - DNA, 557 bp, Unknown
  Bacterial polypeptide expressing nucleotide sequence isolated from the Sargasso Sea
tatggcaagtctagatgatctcaaaaaaaggatagctagtgtaaagtctacacaaaaaatcacgaaagctatgaaaatggttgcagcagcaaaattaagaagagctcaagaaagcgctgagagagggagaccttattcagaaaaaatgaacaatattattttaaacttatctaatggtatatctgataaagaaaatgccccaaaattattatctgggacaggcgaaaataaagttcacctatgtgtagtaatgacatcagacagaggcctttgtggtggttttaattctaacataattaaaaaagcgaaaagttatttttcaaaaactttagacgagggtaaacaattaaagattattactgtagggtcgaagggaaatgaccaactaaaaagagtttatggagataaaattattgaaaatatatcttttaaagagtctaaaaatgcaaattattttgatgccgataaagttggaaggatcataattgaaaaatttgaggctggtgagtttgatatatgcactattttttacaatcaatttaaaaatgtaatcactc

SEQ ID NO: 272914 - DNA, 461 bp, Unknown
  Bacterial polypeptide expressing nucleotide sequence isolated from the Sargasso Sea
aatgccaagtttagatgatttaaaaaaaagaatatctagtgtcaagtcgacacaaaagattactaaagcaatgaaaatggttgcagcagcaaagctaagaagagcacaagaaaatgcagaaaaaggaagaccatattctgaaaaaatgaataatattattcttaatttgtctaatggaatttcagataaagaaagtgcaccaaaattacttattggaacaggagaagaaaaaattcatttatgtatagtaatgacttctgatagaggtctgtgtggtggatttaattcaaatattataaaaaaagcaaaatcatattttaaaaaaatattagatgataataaaactttaaaaattattactgtgggatctaaaggttatgatcaattgaagagagcatataataattatataattgaaaaaatttcattcaaagaatcaaaaaatattaattattttgatg

SEQ ID NO: 272915 - DNA, 841 bp, Unknown
  Bacterial polypeptide expressing nucleotide sequence isolated from the Sargasso Sea
aatgaataaaaatggaaaaataacacaagttataggtgcagttgttgatgtgaagtttgatggagatttaccagaaattttaactgcattagagtgcaacaatagaggaaatagattagtacttgaggttgctcaacacctaggagagtcaagtgttagaacaattgctatggatagcactgagggacttaaaagaggtgatgaagttaaagatactggtgcacctatacaggttcctgtaggaccaaaaacgcttggaagaattgtaaacgttattggtgaaccaatagatgaaaaaggaaaaattgagtctaaagaaaattggccaatacatagacaagcaccttctttcaatgaccaatcgactgaaactgagatattagtaactggaataaaagtaattgatcttttagctccatatgcaaaaggaggaaaaattgggctctttggtggagctggagtaggtaaaacagttatcataatggaacttattaataacatcgctaaagctcatggagggttttcagtatttgccggagttggtgaaagaacaagagaaggaaatgatttatatcatgaaatgatagagtctggagttatcaaacccgaaggtgaaggatctaaagctgcattagtttatggtcaaatgaatgaacctcctggggcgagagctagagttgcattgacaggtttaactgttgctgaatattttagggataaagagggtcaagatgttctttttttcgttgataatatttttagatttactcaggcaggctccgaggtgtcagctcttttgggaagaataccttcagcagttggatatccaccaactttagct

SEQ ID NO: 272916 - DNA, 478 bp, Unknown
  Bacterial polypeptide expressing nucleotide sequence isolated from the Sargasso Sea
tgacttaactgacccttctcctgccacaacctttgctcacttagatgctactgttgtattgtccagacaagtagctgagcttggaatatatccagccgtggatccacttgattctacaagccgtcaattagatcctttggttattggaaatgagcattatgacgtagccagaaatgttcaaaatatgcttcagaaatataaagagctaaaagatataattgctattcttggtatggatgaattatcagaagaagataaacttgttgttgctagagcaagaaaaattcaaagatttttatcacagccattttttgttgctgaagttttcactggcagccaaggaaagtatgtttctctaaaagaaacaattaaaggctttaaggcgattgctgatggagaatatgaccatcttcctgaacaagcattttatatgattggggccattgaggaagcagaagagagagctaaggaactttaa

SEQ ID NO: 272917 - DNA, 631 bp, Unknown
  Bacterial polypeptide expressing nucleotide sequence isolated from the Sargasso Sea
tatggcaagcttagatgacctaaaaaagagaattttaagtgttaaatccacacaaaaaataacaaaagctatgaaaatggtagctgcagcaaaacttaaaagagctcaagaaaatgcagaaagaggtcggccttattctgaaaaaatgaataatataatcttaaatttatcaaacggaatatcagacaaagaaaatgcaccaaaacttttagctggaacagggaataacaaagttcatttatgtgtagttttaacttctgatagaggtctatgtggtggatttaactccaatatcatcaaaaaggcaaaagcatattttagtaaaattacaagtgaaggaaaaaatttaaaaataattactgttggatcaaagggttatgaccaattgaaaaggcaatataatgataaaattgtgaataaaatttcttttaaagagtcaaaaaatattaacttttttgacgctgagaaagtatcaaaaataattattgaaagttttcaaaaaaatgaatttgatgtatgcactattttttataataaatttaaaaatgtaattactcaaataccacaggctcagcaaattattcctttaaaatcttctgaaactggaaataaaatgaaaaagatattatga

SEQ ID NO: 272918 - DNA, 331 bp, Unknown
  Bacterial polypeptide expressing nucleotide sequence isolated from the Sargasso Sea
gctgcatttgcacaatttggttctgatttagatgcatcaacacaaaaattgttaaacagaggatcgaaattaacagaacttttaaaacaaaaacaattctcaccaatgacagttgctgaacaagtagtttctgtattctgcggtgttagaggatatcttgatgatattgaccaaaaagatatatctgactttgaaaataaaattctgcaaaaatgcaaatctgataaaccagaaattttagattcaatttcaagttcaggaaaattagaagaaaatgcagaaaaaatgttaattgatctaattaacgaatttaaaaaaggattgaagtaag

SEQ ID NO: 272919 - DNA, 726 bp, Unknown
  Bacterial polypeptide expressing nucleotide sequence isolated from the Sargasso Sea
acctttcaaaacaagcagttgcttatagacaaatgtctctcttacttagaagacctccaggaagagaagcatatccgggagacgtattctatttacatagtaggttacttgagagggcggctaaattaagcgatgagcacggaggcggatctttaacagctcttccaataattgaaacacaaggaggtgatgtttctgcatttataccaaccaatgtaatttcaattactgacggtcaaatctttttggaaacggaattatttaatcagggtataagaccagcaattaatgtgggattgtcggtttcacgagttggatcttctgctcaaacaaaagcaatgaaaaaggtttctggatctatgaaacttgaacttgctcaatatagagaaatggcagcatttgctcagtttggatcagatttagacgcatctactcaaaaacttttaaatagaggttctaaattaaccgaattactgaaacaaaaacaatattcacccatgacagtagctgaacaagtaatttcaatattttgtggcgtcaaaggtcatttggacgatattgaacaaaagaatatctcagattttgaaaataaaattatagaaaaatgcaaatctgaaaaaaaagaaattttagattcaatttcaacctctggcaaacttgaggaagactcagaaaaatctttaactgagattattactgaacttaaaaaaagctttaattcttaga

SEQ ID NO: 272920 - DNA, 750 bp, Unknown
  Bacterial polypeptide expressing nucleotide sequence isolated from the Sargasso Sea
aaaaactttagaggaagcaggcgcaatggaatatactactattgttgcagctactgcttcagatgcagctccattacaatttttagctccctatacaggatgtgcaatgggagaatattttagagataatgggatgcatgcattaattatttatgacgatctttcaaaacaagcggtagcttataggcaaatgtcacttttattaagaagacctccaggaagagaagcttacccaggtgatgtattttatttacacagtagattacttgaaagggcggctaaattaagtgatgaacatggcggaggatctttaactgctcttccaataattgaaacacaaggtggtgatgtttctgcatttatacctacaaatgtaatttcaattacagatggtcaaatctttttggaaacagaattgtttaaccagggcataaggccagcaattaacgttggattatcagtttcgagagttggatcttctgcccaaacaaaagcaatgaaaaaggtttctggatctatgaaacttgaacttgctcagtatagagaaatggcagcatttgctcagtttggatcagacttagatgcttctacacaaaaacttttaaatagaggatctaaactgactgaactattaaaacaaaaacaatattctcccatgactgtagcagagcaagtaatttcagtctttagcggcgtgaaaggtcatttggatgatattgaccaaaagaatattgctgattttgaaaataa

SEQ ID NO: 272921 - DNA, 916 bp, Unknown
  Bacterial polypeptide expressing nucleotide sequence isolated from the Sargasso Sea
ggagatgatagaaatataaaagaaggtgatgttgtgaaacggacaggtagtattgttgatactcctgttggcaaagagctattaggaagagttgttgatggcttaggaaatcctattgatggaaaaggtgctttagataaaggtataaaaaaaagtagagtagaggtaaaggctccaggaatcattccaagacaatcagtgagtgaaccaatgcaaactggcttgaaatcaattgacagccttgttccaattgggagaggacaaagagaattaattattggagataggcaaacaggaaaaacagcggttgcaattgatgcaattataaatcaaaaaaaaattaatgaaactggtgacgaaaaacaaaaactttattgtatttacgtagcagttgggcaaaaaagatcaacagttagacaaattcaaaaaactcttgaggaggctggtgcaatggaatacacaactattgtcgctgcaacagcatcagactcagcgcctttacaatttttagcaccatacacaggatgtgctatgggtgaatattttagagataatggtatgcatgcactgataatttatgacgatttgtcaaaacaagctgtagcttacagacaaatgtctcttatacttagaagacctcctggaagagaggcatatcctggtgatgtattttatcttcacagtagattactagaaagagcagcaaaattaagtgatgaacatggtggaggttccctcacagctcttccaataatagaaactcaaggtggagatgtttcggcatatattccaaccaacgtgatttcgattacagacggacaaatttttctagaaacggaactattcaatcaaggaattagacctgcaattaatgttggattatcagtctcaagggtcggatcagcagctcaaacta

SEQ ID NO: 272922 - DNA, 676 bp, Unknown
  Bacterial polypeptide expressing nucleotide sequence isolated from the Sargasso Sea
ttttggtgatgacagaaatgttaaagaaggggatatagtaaaaagaactggtaatattgttgatactccagttggaaaagaattattaggaagagtagtggatggtttaggaaatcctattgatggaaaaggaccattagataaaggaattaaaaaaagcagggttgaagtaaaagctcctggtattattccacgacaatcagtaagtgaaccaatgcaaactggtcttaaatcaattgatagtttagttccgattggaagagggcaaagggaattaattattggtgatagacaaactggtaaaacagcagttgcagtagatgcaattattaatcaaaaaaaaatcaatgaatctggtgatgaaaaacaaaaactgtattgtatatacgttgcagttggacaaaaaagatcaacagtaagacaaattcaaaaaacattagaagaggctggagctatggagtacacaacaatcgttgctgctactgcatctgactctgctcctttacaatttttagcaccatacacaggttgtgctatgggtgagtattttagagataatggaatgcatgctttaataatttatgatgatttatctaaacaagcagttgcttatagacaaatgtcattgttattaagaagacccccaggacgtgaggcttatcctggagatgtattt

SEQ ID NO: 272923 - DNA, 788 bp, Unknown
  Bacterial polypeptide expressing nucleotide sequence isolated from the Sargasso Sea
gaatactttagagacaaaggagaggatgcattaatagtatatgatgatctttctaaacaagcggtcgcatatagacaggtctcactactcttaaaaaggcctccaggaagagaggcttatccaggtgatgttttttatcttcattcaaggcttttagaaagagcagctagagtaaacgcagattatgttgaacaagttactggtggaaaagttaaaggcaaaaccggctctttaacagccctacctattattgaaacacttgcaggagatgtttctgcatttgttccaactaatgttatatcaattacagatggacagatatatttagaaactgaattatttaactcaggtattaggccggctattaatccaggactttcagtatcaagggttggtggttcagcacaaacaaagataatgaaaaagttagctggtggtgtgagaacagcattagctcagtatcgtgaattagcagctttctctcagttcgcatcagatctagacgatgcaactaagcaacaacttgccagcggtaaagcatttaccgaactacttaagcagaaacaatatgctccgatgagtgttgcacaacaagctttaagtttatttgctgccgacaaaggttatatgtctgatgttgaggttgataaaatattagattttgaggaagcacttcatggatatcttagtgcagaaaagggtgaattagagaaacaaattaacacaactggtgattggaatgatgatatagaaagtcaattcacttctcttgttgaggattttaaaaa

SEQ ID NO: 272924 - DNA, 812 bp, Unknown
  Bacterial polypeptide expressing nucleotide sequence isolated from the Sargasso Sea
catggtaccaattggaagggggcaaagagaacttattattggtgacaggcaaacggggaaaacagcagtagctattgatgcaataattaatcaaaaagacactggcgtaaagtgtatttatgttgctattggccaaaaagcatcttcaatagccgcagttgttagaaagcttgaggagcatgatgctcttaaacatactattattgtggcagcttcagcagctgagtctgcagctatgcaatatatagcaccatactctggatgtgcaatgggtgaatactttagagataatggcgaagatgcattaattgtctatgacgatcttactaaacaagcatgggcatacagacaagtttcactgttgttaaaaagaccacctggaagagaggcgtatcctggggatgttttctatttacattctaggttattggagagatccgctagaattaatgagaaagcagtacagaatataacagatggaaaaattaagaatcaaacagggtcactcacagcgttgccgattatagaaacccaagcgggtgatgtttctgcatttgtgcctacgaatgtaatttcaataacagatggacaaatcttcttagaaacagatttatttaatgctggaatcagacctgctataaatgcaggactatctgtatcaagagtaggcggagcagcacagactaaaattatcaaaaaactcggcggcggtgtgagattagcgcttgcacaatatcgtgaattggctgcattttcgcagtttgcatctgacttagatgaagctacaagaaaacaacttgagcgaggaaaaa

SEQ ID NO: 272925 - DNA, 916 bp, Unknown
  Bacterial polypeptide expressing nucleotide sequence isolated from the Sargasso Sea
tggtgaacctatagatgaaaaaggtcaagtcaaagccaaagaaagttggcccatacataggtcagcgccagaatttaatgatcaatcaacagaaacagaaattttagttacaggaattaaagtgatagatttattagctccttatgcaaagggtggtaaaataggtttgtttggtggagcaggtgtaggaaaaacagttataattatggagctaataaataatatagcaaaagcacacggtggattttccgtatttgcaggcgttggtgaaagaactagagaaggaaatgatctttatcatgaaatgatagaatcaggtgtaattaaacctgaaggatctggatcaaaagctgcattggtttatggacagatgaacgaacctccaggtgcgagagctagagtagccttaactggtttaactgttgctgaatatttcagagatcaagaaggtcaagatgtgttattttttgtcgataacatttttagatttacacaagcaggatctgaagtttcagctttactaggaagaattccatctgctgttggctatcaacctacattagcaacagacatgggaaatttacaagaaagaattacaacaactaacaaaggatcaattacatcggtacaggctatttatgtacctgctgatgatttaactgatccggctccagcaacatccttttctcacttggacgcaacaacagtattatctagacagatagcagaattaggaatctatccagcagtggatcctctagattcaacatctagaatattagacccaagaatagttggagatgaacactacagagtcgctagagaagttcaaaaaatattacaaacatataaatctttacaagatattattgctattttaggcatggatgagttgtcagaagaagataaattaact

SEQ ID NO: 272926 - DNA, 667 bp, Unknown
  Bacterial polypeptide expressing nucleotide sequence isolated from the Sargasso Sea
gaagcttatccttggagatgtattttacttgcatagccgattgcttgaaagggccgcaaaactgaatgacgaaaatggaggtggatctcttacagctttaccgatcattgaaacacaggccggagacgtctcagcctatataccaacaaatgttatatcaattacagatggtcaaatattcttaggcactgaacttttcaatcaaggaattagaccagcagttaatgttggcctctcagtttcgagagttggatcagcagctcaaactaaggctatgaaaaaagtagcaggatcgatcaaacttgaattagcccaatatcgtgaaatggctgcctttgcacaatttggttcagatttagatgcatccacccaaaagcttttgaatagaggatcaaaacttactgaattactaaagcaagatcagtacagtccaatgactgtagcggagcaagtagtcacaatatatgctggagtaaaagggtatttggacagtattgacacaaatcaaattcgctcatttgaaaaaggtttattagaattagttaaatctgagaaaccagaagtaatagagtctatcgaaaaaagtggaaaaattgatgaggaaacagataaaattttatctgaaattataacaaattacaaaaaaacaaattttgagaataaataa

SEQ ID NO: 272927 - DNA, 472 bp, Unknown
  Bacterial polypeptide expressing nucleotide sequence isolated from the Sargasso Sea
aaatctatttaattctgggataagaccagctattgatgttggtttatcagtgtcaagggttggaggtaatgcccagataaaagctatgaagtctgttgctggaacactgcgcctagatttagctcaatatagagaactagaggcttttgcaaaatttggttcagacttagaccaggcaactctttctcaactaacgcgtggagaaaggatggttgagatattgaaacaaaatcagtatgtacctatggatgtggaaaaacaggtagcaataatatttgcggcatcaaggggccacttagatgatttatctgttgatcaaatctcagaatttgaatatggcctttttgaatatttagatgcaaatgcaaaagatagtttagattctatcgtcaaggatggtgtaataagcgatgaagcagaagaaatgcttgataaagcaatcaaagaatataaggcaggatttaaagcttaa

SEQ ID NO: 272928 - DNA, 780 bp, Unknown
  Bacterial polypeptide expressing nucleotide sequence isolated from the Sargasso Sea
aatgagtaatggtttagtaacgcaaataattggagcagttatagatgttgagtttgataaatcaaacataccaaatgtttatgaagctttaactatatctggaatggaaacagttttagaggtacaacaacagctcggcgatggtgttgttagaacaattgcaatgggcagtacagagggtttaaaaagaggacttgatgttaatagaaccaatgcgccaatatcagtaccagttggtcaagaaactttgggaagaataatggatgttcttggaaacccgattgatgaaaaaggacctattggcgaaaaagaaacattacccattcacagaaaaccaccagaatacgttgatcaagcagcatctaatgaattgcttgaaaccggcattaaagttattgacctaatatgtccttttgcaaaaggaggaaaggttggtttatttggcggagcaggtgtaggcaagacagttaatatgatggagttaatcagaaatattgctattgagcattcaggtttctcagtttttgccggtgtgggtgagagaacaagggaagggaatgatttctatcacgagatgacagattcaaatgtcatcgataaagtttctctagtatatggacagatgaatgagccaccaggaaatagactaagagtagctctaactggactaacaattgctgaaaagttcagagacgaaggtagagatgtccttttatttattgataatatttatcgttatactttagctggagttgaagtttccgcattattaggaagaat

SEQ ID NO: 272929 - DNA, 206 bp, Unknown
  Bacterial polypeptide expressing nucleotide sequence isolated from the Sargasso Sea
aagatttttatctcaaccatttttcgtcgcagaggtttttactggttctccaggtaaactagtagatttagatgcaactataaaaggctttgatgcaatttgtaaaggtgagtacgatcatttgccagaagcggcattttacatggttggcggaattgaagaagttatagaaaaagcagataaactagctaaagaaaccaaataat

SEQ ID NO: 272930 - DNA, 941 bp, Unknown
  Bacterial polypeptide expressing nucleotide sequence isolated from the Sargasso Sea
agacggaaaagggagtttatcagctaaaaatagaaaacgtgtagaagttaaagctcctggtattattccaagacaatcagttaatgagccaatgcaaacaggtttgaaatctattgactctttaattcctataggtagagggcaaagggagctaattattggtgatagacaaacaggcaaaactgctgttgcaattgatgcgattatcaatcaaaaaaaaattaatgagtcctctgatgaaagtaaaaaattatattgtgtttacgttgctattggccaaaaacgttctactgtagctcagataactaagactttagaagaagcaggtgcattaaaatatacaactattgttgctgctactgcgtctgactctgcacctttacaatttctagctccatacacgggatgtactataggtgaatattttagagacaatgggatgcatgctttaatagtttatgatgatttatcgaaacaagcagtagcttacaggcaaatgtctttattattaagaagacctcctggaagagaagcttatccaggggatgtattttatttgcatagtagattattagagagagcggcaaaacttagtgataaaagtggtggtggatcattaacagcgttacctataattgaaacccaagcaggagacgtttctgcttacatacctactaatgttatttctataaccgacggtcaaatattcttagaaactgagttatttaatcaaggaataagaccggctgtaaatgttggtttatctgtgtcaagagtgggttcagccgctcaaacaaaagcaatgaaaaaagttgccggatctattaaattagaactagcacaatacagagaaatggccgcttttgcgcaatttggttcagacttggacgcatctactcaacaactgctgaaccgaggttcaaagctaacagaactttaaa

SEQ ID NO: 272931 - DNA, 775 bp, Unknown
  Bacterial polypeptide expressing nucleotide sequence isolated from the Sargasso Sea
tctaattatctacgacgacctttctaaacaagccgttgcatatagacaaatgtctcttttgctaagaagaccgcccggaagggaggcttatcctggtgacgttttctaccttcactcaagattactagaaagagccgcaagggtgaatgaggaatatgtagagaactacacaaatggtgaggttaagggaaaaacaggttcgttgactgcactaccaatcatcgaaactcaggctggagacgtttcggcgtttgttcctacgaacgtaatttctataaccgatggacaaattttcctcgagtcgtctttatttagttcaggattaaagccagccatggatcctggtatttcagtttcaagggtgggtggtgctgctcaggttccaataattaaaaagcttggcggaggaattaaaacagccctcgctcaatacagagagttagaggcttttgcccagtttgcttcagatcttgacgaggcatccaaagagcaattagagcatggtgtcagggttacagagctgacgaaacaagatcagttttcaccaatgtctgtagctgaaatgggcctaatgctttacacggctaatgaagggtatctaaggcaggttgaggtcgaaaaaatcaaagactttgaaaagagcttgatagcctatatgaattccgagcataaagatcttatggataaggtatcagagaccggagaatacggagacgatatccaaaatgccttcaaagaagccttagacaaattcatggaaacacaaacctggtag

SEQ ID NO: 272932 - DNA, 433 bp, Unknown
  Bacterial polypeptide expressing nucleotide sequence isolated from the Sargasso Sea
tatgagaaaaggaaaaattacacagataattggagcagtagtagatgttagatttgaaggagaactaccagaaatattaaccgcattagaatgtaataatagtggcaatagacttgtattagaagttgcgcaacatttaggagagtcaagtgtaagaacaatagctatggatgccactgaaggcttaaagagaggagatgaagtaacagatacaggggctccgattaaagttccagttggaccagaaactctaggaagaattgttaatgtaattggtgaacctatcgatgaaaaaggagaagttaaaactaaagaaagttggcctattcatagatcagcaccagaattcaacgatcaatcaacagaaacagaaattttagttacaggcattaaagtagttgatttgttagcaccatatgcaaaggggtggtaa

SEQ ID NO: 272933 - DNA, 775 bp, Unknown
  Bacterial polypeptide expressing nucleotide sequence isolated from the Sargasso Sea
tgcacttgtctatggacaaatgaacgagcccccaggaaacaggcttagggttgcgttgaccgggctgacaattgcagaaaactttcgagacgaaggaagggatgtcttgatgtttatcgacaatatttataggtatacacttgcaggcacagaggtatctgcactgcttggaagaatgccatccgcagttgggtatcaacccaacctagcagaagaaatgggcgttcttcaagagaggattacttcaacgaaaacagggtcaatcacctcaattcaagcggtttatgtaccagcagatgatctgaccgatccatcgccagcaaccacttttgctcaccttgatgcaacagtcgtattggcaagatcaatcgctgagcttggaatttacccagccgttgacccgctcgattcaaatagccgtcaattggatccaggcatcgtaggacaagagcactatgacactgcaaggtctgtccagcaggttttgcaacggtataaagagctgcaggatattattgcaatccttggaatggatgaactatccgaagaagacaagctcaccgttcaaagagcaagaaaaatccaaagattcttgtcccagccattttttgttgcagaggtcttcactggttctccaggacagtacgtgtcgctgagagactccattaaagctttccaagggatagtcgctggcgattatgacgatcttccagagcaagcattctatatggttggaacaattgaagaagcggttgaaaaagcaaaaagcatgtaa

SEQ ID NO: 272934 - DNA, 586 bp, Unknown
  Bacterial polypeptide expressing nucleotide sequence isolated from the Sargasso Sea
atgcccagtcttgatgatttaaaaaagagaataaaaagtgtaaaatcaactcaaaaaataaccaaagcgatgaaaatggttgctgctgcaaaacttaaaaaagcgcaagaaaatgcggagaaaggtagaccatatagtgaaaaattacaaaatatcattcttaatttaaccacttcaatttctgatgattctaatgccccgagactattgattggaagtggaaaagataaagtttatttatgtgttgtgataactgctgatagaggtttgtgcggaggctttaattctaatatctgtaaattagctaaaaatcattttaagaatattttaaaagaaggaaaagaattaaaaataattactgtgggtagcaaaggtcacgatcaaattaaaacagaatatggtaaacacattatctataaaaaaagttttaaagataaaaaacaaattacatttaaagaagcaaacgaaattggaaaaaaaattattgaattgtttgaacaggaacagtttgataaatgttttatattttataataatattaaaaacgtaataactcagatccctaaagcagaacaaattattccta

SEQ ID NO: 272935 - DNA, 940 bp, Unknown
  Bacterial polypeptide expressing nucleotide sequence isolated from the Sargasso Sea
gggagtcgtgattttcggggatgatagaaaaattaaagagggtgacacaattaaaagaacaaatgcaatagttgatgtaccggtaggtaaggaacttttaggaagagttgttgacggtttaggaaatccaattgacggaaaaggagctatatcttcaaaagagagaaaaagggttgaagtaaaagcaccgggaattattccgagacaatcagtaagtgaaccaatgcaaacaggcttaaaatcaatcgactcacttattccagtaggaagaggacaaagagaattaatcattggtgacagacaaacaggtaaaactgcagttgctatagatgcaattattaatcaaaaaaaaataaatgaatcttctgatgagaaaaaaaaactatattgtgtttatgtagccattgggcaaaagcgttccacagtagctcaaataacaaaaactttagaggaagctggagcattaaaatacacaacaatagttgctgcaacagcatcagactctgcaccacttcagtttttagctccttatactggttgtactattggagaatattttagggataatggaatgcatgccttaattgtttatgacgacttatcaaaacaagccgtagcttatagacaaatgtcgcttttgttaagacgacctccaggaagagaagcttaccctggagatgtgttttatttgcacagcaggcttttagaaagatcagcaaaattaagcgatgctaatggcggcggatcattaacagctttaccaattattgaaactcaagctggagacgtatcagcatacattcctactaatgtaatttctattacagatggacaaatatttttagaaactgaattattcaaccaaggaataagaccagcagtaaacgtaggtttatctgtatcacgagttggatctgccgctcaaactaaagcaagaaaa

SEQ ID NO: 272936 - DNA, 316 bp, Unknown
  Bacterial polypeptide expressing nucleotide sequence isolated from the Sargasso Sea
aaaaatactacaagcctataagtcgctccaagacataattgccatactaggcatggatgaactttcagaagaagacaaattaacagttgcgagagcaagaaaaattcaaagatttttatcacaacccttttttgttgcagaagtttttacgggatctccaggcaaacttgtagatttagaggcaacgatcaaaggttttgatgcaatatgtaaaggtgaatacgaccagttaccagaagcagctttttatatggttggaactattgaagaagcagttgaaaaagctgaaaaaatggcaaaggaagcagcagcttaa

SEQ ID NO: 272937 - DNA, 253 bp, Unknown
  Bacterial polypeptide expressing nucleotide sequence isolated from the Sargasso Sea
catggtatctatacgccctgatgaaatcagttcaatcttaaaacaacaaataactgattatgaccaatctgtaagtgttagcaatgtaggaactgttctgcaaatcggtgatggcatcgcaagaatatatggcttagatcaggtcatggcaggtgagttgttggaatttgaggatggtaccgaaggtatagctttaaatcttgaagatgataatgttggagctgttttaatgggagaggcacttggtgtccaa

SEQ ID NO: 272938 - DNA, 724 bp, Unknown
  Bacterial polypeptide expressing nucleotide sequence isolated from the Sargasso Sea
catggtatctatacgccctgatgaaatcagttcaatcttaaaacaacaaataactgattatgaccaagctgtaagtgttagcaatgtaggaactgttctgcaaatcggtgatggcattgcaagaatatatggcttagatcaggtcatggcaggtgaactattggaatttgaggatggcaccgaaggtatagctttaaatcttgaagatgataatgttggagccgttttgatgggagaggcacttggtgtccaagaaggaagtaacgttaagtccacaggtaaaatcgcatctgttccagttggtgaagcaatgcaggggagagttgttaatcctctcggacaaccaatagatgggaaaggagaaattccaacaagtgatactagattgattgaagaaatggctcctggaataatcaagagaagatcagtgcatgaaccaatgcaaacaggtattacatctattgatgcaatgattcctgttgggagaggtcaaagagaattaattattggtgatagacaaactggaaaatctgcgattgctattgacacaataatcaaccaaaaaggtcaagacgtagtttgtgtttatgtagctattggtcagaagtcagcatcagtagcaaacatcgtggaggtcttaagagagagaggagctctagattatacagtcgtagttagtgcaggagcctctgaaccagctgctttacagtacttagcaccttat

SEQ ID NO: 272939 - DNA, 712 bp, Unknown
  Bacterial polypeptide expressing nucleotide sequence isolated from the Sargasso Sea
aaaagaggcgatgttgtacaaaatactggagcaccaataagtgttcctgtgggtcctgaaactttagggagaataataaatgttataggccagcctatcgatcaaaaaggagaagttaaaacaaaagaaaagtggccaatacatagagaggctcctaaatttacagatcagtcaaccgaaacagaaatattagaaacaggaattaaagtcattgatcttttggcaccatactctaaagggggaaaaataggattatttgggggagcaggtgttggaaaaacagttatcattatggaactaataaataatatcgctaaagcacatggaggattttcagtttttgcaggtgttggagaaagaacaagagaaggaaatgatttataccatgaaatgattgagtcgggagttattaaaccagacgggaaagattcaaaagcagcacttgtttatggacaaatgaacgaacctccgggggcaagagcaagagtaggtttgacagggttaactgttgcagaatattttagagataaagagggtcaagatgtattattttttgttgataatatttttagatttacacaagctggttcagaagtttctgctttactaggtagaataccatctgcagtaggatatcaacctacattagctactgatatgggtaatttacaggaaagaattactacaacaggaaaaggttcgattacatcag

SEQ ID NO: 272940 - DNA, 788 bp, Unknown
  Bacterial polypeptide expressing nucleotide sequence isolated from the Sargasso Sea
aatggcaagtttagacgatttaaaaaaaagaatagcaagtgttaaatctacacagaaaattacaaaggctatgaagatggttgctgcagcgaaacttagaaaagcacaagaaagtgcagaaaaggggaggccttattcagaaaaaatgaataatgttattttaaatttgtctagtggaatatcagataaagagaatgctccaaaacttttatcaggaacaggaaatgataaggttaatttatgtgttgtaatgacatcagatagaggattgtgtggaggtttcaattctaatataattaaaaaagccaaaagttacttctcgaaaattttaagcgagggaaaagaacttaaaatcataactgtaggctcaaaaggaaatgatcagttaaagagaatgtatggtgataaaattatagagaatatttctttcaaggagtcaaaaaatgccaattattttgatgctgacaaggttggcaagatagtaatagataaatttgagaatagtgaatttgatatatgcactattttttacaatcaatttaaaaacgtaattgctcaaattccccaagcacaacagataattcctctaaatagagaggatgttgaaggtaatacttcagaggaaaattatgaatttgaaccagatgaagatgagattttgagcaatttattgccaaaaaatatttcaacacaaatatttaaagcaatgttagagaattcagctagcgaacaaggatcaaggatgagtggcatggacaaatgcacccgaaacgcaggagaaatggttg

SEQ ID NO: 272941 - DNA, 898 bp, Unknown
  Bacterial polypeptide expressing nucleotide sequence isolated from the Sargasso Sea
tgcagtgggtcagaaaaactcttctgttgcgaatgtgcttaagaaactagaggaagaaggagcattagagcatacaatcattgtcaatgctgcagcatccgactcagctgccatgcagtatattgctccatattcaggctgtgccatgggcgagtacttccgagacaaaggagaagacgccctaattatttttgatgacttaaccaagcaagcctgggcatatagacaggtatcgcttctattaaaaagacctccaggaagagaagcttatcctggcgacgtattttatcttcattcaaggttgcttgagagagcggcaagggtgaatgcagagtatgtagaaaaagaaacaggcgggaaagtgaagggccaaacaggctcgttaactgcattaccaatcattgaaacacaagcgggcgacgtttctgctttcgtgccaacaaacgtaatttctattacagacggacaaatatacctagaaagtgatttattcaatgcgggcattagaccagcaataaatgctggtttatctgtttcaagagtaggcggtgcagcgcaaacaaaaatcattaaaaagctcggtggaggtgtcaggttggcattggcacaatatcgtgagcttgcagcatttgcccagtttgcatccgatcttgatgaggctacaagaaaacagctagaaagaggtcagagagtaacagagctaatgaagcaaaaacaatatgctccattgaccgtagcagaaatggccgtgtctctttatgcagcgaatgagggctatcttgatgatgtccctgcagacaagattgttgattttgaatcagcactgcatgcaaattttgttgactcagcctctgatcttgcacaaaagatcaatgacactggcgactacaacgatgaa

SEQ ID NO: 272942 - DNA, 943 bp, Unknown
  Bacterial polypeptide expressing nucleotide sequence isolated from the Sargasso Sea
ccgggaactttaggtagaattatgaatgttgtaggagagccagttgatgaaagaggcgacattggaacgagtaaatcttatcctattcatagaccagcgccagagtttgttgatcaatctacagaaactgaagttctagtaacaggaattaaagtagttgatctactagcaccttatgcaagaggtggtaaaattggattatttggcggagctggagttggtaagacagttttaattatggaattaattaataacattgccaaggctcatggaggatattcggtatttgctggagttggagaaagaacgcgtgagggtaatgacttgtaccacgaaatgattgagtcaggaattattgacttaaaagggaaagattcaaaagttgcacttgtttatggtcagatgaacgaaccaccaggagcaagagctcgagttgctctttcaggattaactcaagcagaatactttagagatgaagaaggtcaggatgtgttattctttgtagataacatatttagatttacacaggcaggctctgaagtttcagctcttctaggacgtatcccatctgcagttggatatcagccaacacttgcaacagatatgggtgctttacaagaacgaatcacaactacaaaaaaaggatctattacatcagtacaggcaatatatgttcctgcagatgacttaactgatcctgcacctgcaacatccttttcacatttggatgcaacaacagttctaaatagagctatctctgaaaaaggaatatatccagcagttgatccattagactctacttctagaattttagatccacaagttgttggtgatgatcattacagagttgctagagaagtacaaagagttctacaaacatataaaagtcttccagatataatagctattctaggaatggatgagctttcagaagaaagatagt

SEQ ID NO: 272943 - DNA, 805 bp, Unknown
  Bacterial polypeptide expressing nucleotide sequence isolated from the Sargasso Sea
tatgaaaatggttgcagcagctaaattaagaagagctcaagaaagcgctgagaagggaagaccttattctgaaaaaatgaataatgttattttaaatttatcaaatggtatatctgataaagaaaatgcaccaaagttattgtcagggactggtcaagaaaaaactcatctttgtgtggtgatgacttctgatagaggtttatgcggcggatttaattctaatattattaaaaaagctaaaagttattttgcaaaaattttagatgaagataaagagcttaaaattattacagttggctcaaaaggaaacgaccaattaaaaagagtttatggtgataaaataatcgaaaatatttctttcaaagagtctaaaaatgcaaattattttgatgctgacaaagttgggaaaatggtaattgaaaaatttgaggcaggtgaatttgatgtttgtacaattttttataaccaatttaaaaatgtaattactcaaattcctcaagcacagcaaattatccctttaaataatgagggagaagaaaatagttcagaagaaagttacgaatttgaaccagatgaagatgaaattttaagcaatttattgccaaagaatatttctacgcaaatatttaaagcaatgttagagaattcagctagcgaacaagggtctagaatgagtgcaatggataatgcaacccgaaacgcaggtgaaatggttgacaaacttactatcgaatataatagaagtcgtcaggcagcaattacaaaagaactaatagaaatcatatcaggagcagaaagtttataa

SEQ ID NO: 272944 - DNA, 684 bp, Unknown
  Bacterial polypeptide expressing nucleotide sequence isolated from the Sargasso Sea
tgtaatttttggtgatgacaaatcagttaaagaaggtgatactgtaaaaagaactggtgcaattgttgatacaccagttgggaaggaattacttggtagagtagttgatggtttaggaaacccaattgatgggaaaggtgcattagataaaagtttaaaaagaagtagggttgaggtcaaagcgcctggcataattccacgaaaatcggttagcgaaccaatgcagactggtttaaaatcaattgacagtctagttccaattggaaggggacaaagagaattaattattggtgacagacaaactggtaaaacagcagttgctattgatgctatcatcaaccaaaaaaaaattaatgagtctggtgatgaaaagaaaaaattatattgtatttatgtagctgtaggccaaaagagatctactgttagacagattgaaaaaacattagaagaagctggcgctatggaatatacaactatagtagcagcaacagcatcagatgcagcgcctctgcaatttttagctccttacactggatgcactatgggtgagtattttagagataatgggatgcatgctttgattatttatgatgatttatcaaaacaagctgttgcatatagacaaatgtcacttcttttaagaagacccccaggaagagaagcgtatccaggagatgtatttta

SEQ ID NO: 272945 - DNA, 607 bp, Unknown
  Bacterial polypeptide expressing nucleotide sequence isolated from the Sargasso Sea
atgagaaaaggaaatataacacaaattattggagcggtagtcgacgtcaaatttgatggagaattaccagagattttaacagccttagagtgtgataataatggtaataggcttgtactagaagtagcacagcaccttggtgaatctagtgtaaggacaatagctatggatgcaacagaaggtctcaaaagaggagatgaagttaaagataccggctccccaattaaggttcctgttggacctgaaacactaggaagaattattaatgtaattggcgaaccaatagatgaaaaaggagatgtaaagactaacgaaagctggccaattcatagagaagcgcctgaattcaataatcaatcaactgaaacagaaatattagtgactggtataaaagttattgaccttctcgcaccgtatgcaaaaggtggaaaaataggtttatttggtggtgcaggagttggaaaaaccgtacttattatggaattaattaacaatgttgcaaaagcgcatggtggattttcagtttttgctggagtaggagaacgaacaagagagggaaatgatctttatcatgagatgatggagtccaggtgttataaaacctgag

SEQ ID NO: 272946 - DNA, 160 bp, Unknown
  Bacterial polypeptide expressing nucleotide sequence isolated from the Sargasso Sea
tgcagaacacggggcaagaatgaccgcaatgcataaagcaacagacaatgcagatgaattaaataaggagcttaagttgagttacaacaaagccagacaagcagctattactaacgaaattttagaaatagttggcggtgctgaagcattgaacgcataa

SEQ ID NO: 272947 - DNA, 604 bp, Unknown
  Bacterial polypeptide expressing nucleotide sequence isolated from the Sargasso Sea
atggtaaaaactaatttaaacaaaggttacgttagtcaaattattggtcctgtattagatattaagttcccaggcggaacattaccaccgatttatagtgccattaaaattgaattagaagacggtactgaaacaattgtagaagtacaacaattattaggtgataacaaagtacgtgcagtatcaatgcgttcaacagatggtttgaagcgtggtgctgaagtaattgatttaggtactcctattagtgtacctgtaggtactccaacgttaggacggatctttaacgtaattggtcaacctgtggatgaacaaggtgatgtaagttttgatgaaactttaccgattcatcgtgatgccccagcatttacagaattagaaacaaaaccatcaatctttgagaccgggattaaggtagtagatttattagcaccttaccgtcgcggtggtaaaattggtttattcggtggagctggtgtagggaaaacagttttaatcatggaattgattaataatattgccaaagctcacggtggtgtatctgtttttggtggtgtaggtgaacgtacacgtgaaggaaacgatttatatgaagagatgaaag

SEQ ID NO: 272948 - DNA, 772 bp, Unknown
  Bacterial polypeptide expressing nucleotide sequence isolated from the Sargasso Sea
gaatgagcctcccggggccaggtctagagtagctttaacaggattgacattagccgaatactttagagacgaagagggccaagatgtactgttcttcgttgacaatatcttcagatttactcaggcaggttcggaagtgtctgcgttgcttggacgaataccatcagctgtcgggtatcagcccacgttagcaactgatatgggtaatttacaggagcgtattacatctaccaataaaggctccataacctcagtgcaggcaatttatgttccagcagatgatttgacagaccctgcgcccgctacctccttttcgcaccttgatgcaacaacggttcttagccgacagattgccgaacttggtatttacccagcagttgatccgttggattcaacgtctcgtatgcttgacccaagaattattggagacgaacattacgaagttgcgcgtcaggtccaagaagtgttgcaaacttataagtcacttcaggatataatagcgattttgggtatggacgaactttcagaagaagataggttgacagtggcgcgggctcgaaagatccaacggttcatgtctcaaccattttttgtcgcggaaatttttacgggaacgcctggagttctggtgcctctggaagaaacaattcgtggctttaaagagatagtggaaggtaaacatgatgatttaccagaggccgcattctatatggtaggcaccattgatgaggctatagaaaaaggtaaggaactggcagctgaggcagcttaa

SEQ ID NO: 272949 - DNA, 883 bp, Unknown
  Bacterial polypeptide expressing nucleotide sequence isolated from the Sargasso Sea
tatagctagagtttacggattagataatgtgcaagctggagaaatggttgaattttccggaggcataaaaggcatggctttaaatttagaaagtgacaatgtcggtgtagttatatttggcgatgacagatcaatcaaagaaggtgatgttgtaaaaagaactggggcaatcgtagatgcgccagttggaaaaagtttattaggtagagtggtagatgcattaggaaatcccatagacggtaaaggagatttagataaaaaagtagagagaaaaagagttgatgtaaaagcaccaggaataatacccagacaatcagttaatcaaccaatgcaaacaggacttaaagccattgatagtttaatcccagtaggtagagggcaaagagaattaattattggtgataggcaaaccggaaaaactgcagtagctattgatacaattattaatcaaaaagaaataaataaatcaggagatgaaaaagaaaaactttattgtatatatgttgcgattggtcaaaaaagatcaacagtagctcaaatagtaaaaaccttagaagatgcaggagctatggaatatacaacgatagtatccgctactgcttctgatcctgctccacttcagtttttggccccatatacaggatgtacaatgggggaatattttagagacaacggaatgcacgcattaattatttatgatgatttatcaaagcaagctgttgcttatagacaaatgtcactattattaaggcgaccaccgggaagagaagcatatcctggagacgtcttttatttacatagcagattgttagaaagagcggccaaacttaatgacgatcaaggaggaggctcacttaccgctttaccaataattgaaacacaa

SEQ ID NO: 272950 - DNA, 616 bp, Unknown
  Bacterial polypeptide expressing nucleotide sequence isolated from the Sargasso Sea
attttattaggagcgttgttagtttttatttctttaggaactaaaaagatggaaaatgatcctaaaggccttcaaaacttgcttgagttcctctgggattacataagagatcttgctaggacgcaaataggtgaaaaagtttatagagattggatgccatttataggtactttatttttattcgtctttgttagtaattggggaggagctttaattccttggagattgattaagttaccaagtggagaattaggagcacctactgctgatatcaatacaactatagctttggctttactggtttcactttcttatttctatgcaggtttaagcaataagggttggagatacttcgaatattatgttcacccaactccgattatgctccctttcaaaattctagaggattttacgaaacctttatcactttccttcaggctatttggaaatattttggctgatgaacttgttgttggtgttctagtctttttagttccgcttattcttccaatacctgttatgtttctaggattgtttactagtgcaattcaggcattgattttcgcaactttggcggcctattacattggagaagctgttgaagaacatcattagc

SEQ ID NO: 272951 - DNA, 625 bp, Unknown
  Bacterial polypeptide expressing nucleotide sequence isolated from the Sargasso Sea
tatgagtagtggtcgtatcgttcaggtcattggggccgttatcgatgtcgagttcggaagagaagaagttccgaaagtctacgatgcactaaaagttactgatacaggattgactttagaagttcagcaacaactcggtgacggagtggtgcgttccattgctatgggcatctctgagggattatctcgagggctagaggtcactaatactggcgcacccatatctatcccggttggagaggaaacgctgggtcgcattatggatgttcttggaacggccatagatgagaagggagccatcaacgcccgtgagacgatgccgattcatcgtaagccgccttcctatgaggatcaaaagggagggaatgaactccttgagacaggtattaaagtaatcgacttaatttgtccatttgcaagaggcggtaaggtcggtctatttggcggggccggcgttggaaaaacggtaacgatgttggagttgatacgaaatatagccatagaacactctggactttccgtttttgctggagtgggcgagcgcacccgtgaaggaaacgatttttactacgagatggaagaggcaggggttttagataagatttcactggttttcggacagatg

SEQ ID NO: 272952 - DNA, 866 bp, Unknown
  Bacterial polypeptide expressing nucleotide sequence isolated from the Sargasso Sea
tttaaaagaccttaaaaataggattggttctgtaaagtctacccaaaaaattacttctgctatgaaaatggtggcagctgcaaaattgagaaaagctcaggaacaagctttagcttcgagaccctacgctactcttatggataatatagtttctaaaattgcaactaaggcttctggaaattccatagatcttttggcaggtaaaccagaaaataagactcatttactagtagtcttttctgcagacagaggtttatgtggtggtttcaatggttcaatcacaaggattgttaggtcagaggtaaaaaaattaaaagatgacggaataccagtaaaactccttatggttgggaaaaaatcagctgatgctcttaatagggatctcggagatctttttgttgaaagaatagatggtaaatcagcaaagccaaattactcagatgcagaggttttagcacaaaaaattataaatctatttgaaaatggacactttggagtttgtaaagttatttataacaaatttgtttcagcaattactcaagaagttacctttaaatctcttataccaattgaagttaaacaaaatgagatagaaaatgataattctagttctatttatgattttgaaccaagtgaagaagaaattctaaacgacttattacctcgcaacttagctactcaattgtttagctcccagatagagagcgcagcaagcgaattagctgccagaatgacagcaatggacaacgctactagaaatgcaggtgacatgatagataatctaacacttcaatataatagaacaagacaagcagtcattactaaagaattaatagaaattatatcaggcgcagaagccttataat

SEQ ID NO: 272953 - DNA, 670 bp, Unknown
  Bacterial polypeptide expressing nucleotide sequence isolated from the Sargasso Sea
atggaaataaatccttcagaagtaacaaagatactaaaagaacaaattaaaaattttggtgataaagcagaagtaactgaagttgggcaagtattatcagtaggagatggtattgctagaatttacggacttgataatgttcaagctggagagatggttgagtttgcagatggttctaaaggtatggcattaaatttagaaagtgaaaatgttggggttgtaatttttggagatgacagaaatattaaagaaggtgatacagttaaaagaaccagaaacattgttgatactccagttggaaaagaattattaggaagagttgttgatggattgggaaatccaattgatggtaaaggacctttagataaaagtgttaaaaaaagtagagttgaagttaaagctcctggaattattccaagacaatcagttagtgaacctatgcaaactggtttaaaatctattgatagtttggttccaattggaagaggacagcgtgaattaattattggtgatagacaaacaggtaaaactgcagttgcaattgatgcaatcataaaccaaaagaaaattaatgagacaggtgatgagaaacaaaaactttattgtatctatgttgcgattggtcagaaaagatcaactgtaagacaaattcaaaaaacattagaagaag

SEQ ID NO: 272954 - DNA, 727 bp, Unknown
  Bacterial polypeptide expressing nucleotide sequence isolated from the Sargasso Sea
atgagaaaaggacaaataacacagatcattggggcggtagtggacgtaaaattcgacggagaactaccagaaattttaactgcactagagtgcgataacggtggaaatagattagtcttagaagttgcacaacacctaggagaatcaagtgtcagaacaattgcaatggatgcaacagagggtcttaaaagaggagatgaggtaacagacacagccgctccaattaaagttcctgtgggacccgaaacacttggaagaattataaatgtaattggtgagcctattgatgaaagaggagaagttaaaagctcagataattggccaattcatcgagctgcaccagaatttaatgatcaatcaactgaaactgaaatacttgttacaggaataaaggttattgatcttttagcaccctatgcaaaaggtggtaaaattggtttgtttggtggagctggagtcggtaagactgttttaattatggaattgattaataacgttgcaaaagctcacggtggattttcagtgtttgcaggagtaggagaaagaactagagagggaaatgacctttaccatgaaatgatagattcaggtgttattaaaactgatggggaaggttctaaagcagcattagtttatggacaaatgaacgagcctccaggagcaagagcgcgagttgctttgactggattaactgttgctgaatattttagagatcaagaaggtcaag

SEQ ID NO: 272955 - DNA, 880 bp, Unknown
  Bacterial polypeptide expressing nucleotide sequence isolated from the Sargasso Sea
tatggctaacaatttaactggaaaaatatcacaagttcttggagctgtagttgatgtagagttcgatggtgaacttcctgcaattatgaacgctctagaagttgacaacaatggaacaagattaatgctagaggttgctcagcatttaggagaaaatgctgttcgtacaattgctatggatacaacagatggactagttagaggtcaaacagctactgatacaggtgcccctatttcaatgcctgtaggcccggaaactttaggtagaattatgaatgttgtaggagagccagttgacgaaagaggcgacattggaacgagtaaatcttatcctattcatagaccagcgccagagtttgttgatcaatctacagaaaccgaagttctagtaacaggaattaaagtagttgatctactagcaccttatgcaagaggtggaaagattggattatttggtggagctggagttggtaagacagttttaattatggaattaattaataacattgccaaggctcatggaggatattctgtatttgctggtgtaggcgaaagaactcgtgagggtaatgacttgtaccacgaaatgattgagtcaggaattattgatctaaaaggtaaggactcaaaagttgcacttgtttatggccagatgaacgaaccaccaggagcaagagctagagttgctttatcaggattaacccaagctgaatattttagagacgaagaaggacaggatgttttattttttgtagacaatatctttagatttactcaagctggatctgaggtgtcagctctcctaggacgtattccatctgcagttggatatcaaccaacacttgcaactgatatgggtgccctgcaagagcgaattaca

SEQ ID NO: 272956 - DNA, 960 bp, Unknown
  Bacterial polypeptide expressing nucleotide sequence isolated from the Sargasso Sea
atgagcaaaggaataataacacaagttataggagcagttgttgatgtaaagtttgaaggtgatttaccagaaatattaacagctttagaatgtaaaaatggcaataatagattagtacttgaagtagcacaacacttaggtgagtcgactgcaagaactattgcgatggatgctacagagggattaaaaagaggtgatgaggttataaatacgaatgctccaattaaagtgccggtaggacctgaaactttaggaagaattataaatgttgttggagagcctatagacgaaagaggagaggtaaaaacaaaagaaaattggccaatccatagaccagctccagaatttaacgatcagtcaacagagacagaaatacttgtaactggtatcaaagttattgatcttttagctccatatgcaaaaggaggaaagataggtttgtttggtggtgcgggtgttggaaaaactgttttaattatggaattgatcaacaacgttgccaaagctcatggtggcttttcggtttttgctggtgtaggtgaaagaactagagaagggaatgatctttatcatgaaatgatggaatcaggggtaataaaatctgagggtcctggatctaaagctgctttagtttatggacaaatgaatgaacctccaggagcaagagcaagagtggcgctaacaggattaactgtagcagaatattttagagatcaagaaggacaagatgttctttttttcgttgataatatatttaggtttactcaagcaggttcagaggtatcagcattactaggaagaataccatctgcagtgggatatcagccaacattagcaactgatatgggaaatttacaagagagaattacaaccactaacaaaggctcaattacatcagtacagggcatttatgtacctgctgatgatttgactgatcccccgtcagcaacttcatttgct

SEQ ID NO: 272957 - DNA, 927 bp, Unknown
  Bacterial polypeptide expressing nucleotide sequence isolated from the Sargasso Sea
atcggagacaggcagaccgggaaaactgctgttgctctcgacgcaattctcaaccaaaagacatacaacgatgcggctggttcagatgaaagtaagaagctttattgtgtttatgttgcaattgggcaaaagcgatcgtctgtagctcagttggtgaaaaagcttgaagaaactggggcaatggactattcgatagtcgttgcagccacagcttctgagccagcaccaatgcaatttcttgcaccgtattcagccacagctatggcggaatactttagggataatggcaagcatgcactcattatttatgatgatctttctaagcaggcagtagcttatagacaaatgtcactgcttttaagaaggccgccgggtagagaagcttatcctggagatgtattttacctacattcacgcttattagagaggtcttctaagctaaatgaggatagcggatcaggatcacttacggctttacctattattgagacccaaggaggagacgtctcagcctttataccaacgaatgtgatttcgatcacagatggacaaatctttcttgaaactgagcttttcaatgctggtattaggccggctgtaaatacaggtctttcagtatctagagtaggttcttcggcccaaacttctgcaatgaagtctgttgctggttctgttaagttggagttagctcaatatagggaaatggctgcttttgcgcagtttggttctgatttggatgcttccacacaggcccttttaaatagaggagctcgattaactgagctattaaagcaagcacaatattcaccgctgacaaatgctgaacaagtgatcattatttatgctggtacaaatggctaccttgatacagtggaagttaaagatgttggaagctttgagaaaggacttgtaacacacctcagaagt

SEQ ID NO: 272958 - DNA, 822 bp, Unknown
  Bacterial polypeptide expressing nucleotide sequence isolated from the Sargasso Sea
actgcctgaaattttaacagcattagaatgtaaaaatggtaataacagactagttttagaggtagcacaacacttaggtgaaactactgttagaacaattgctatggatgctaccgaaggactaaaaagaggtgatgaggttattaataccaatgctcctattcaagttccagttggacctgaaacacttggaagaattataaatgtaattggagaaccaatagatgaaagaggtgtggtaaagactaaagagagctggccaattcatagggctgcacctgaatttaatgaccaatcaacagaaactgaaatacttgtaacaggtattaaagtaattgatttacttgcaccttacgcaaaaggtggaaagattggattatttggtggagcaggagtaggaaaaacagttttaattatggaattaattaataacgtcgcaaaagctcatggtggtttttcagtttttgcaggagttggagagagaactagagaaggaaatgatctttatcatgaaatgatagagtctggagtaattaaaaaagaaggagctggttcaaaagctgctctagtttatggacagatgaatgaacctcctggagcaagagcaagagttgcacttactgggttaactgttgctgaatacttcagagaccaggaaggtcaggacgtacttttctttgtagataatatttttagatttactcaggcaggatcagaggtttcagctttgttaggaagaattccatctgctgttggatatcaacctacattagctactgacatgggtaatctccaagaaagaattacgactacaaacaaagg

SEQ ID NO: 272959 - DNA, 622 bp, Unknown
  Bacterial polypeptide expressing nucleotide sequence isolated from the Sargasso Sea
ttggaaagagctgccaaaatgagtgatgagcacggtggcggaagtttaactgctcttccaattattgaaactcaagctggagacttatctgcttacattccaacaaatgttatttcaattactgatggacaaatttttttagaaacaaacttatttttcgctggtattcgtcctgcgattaacgtgggtctttcagtaagtcgtgttggttctgcagctcaaacaaaagcaatgaaaaaaattgctggtcctgtaaaactagaattagctcaatatcgtgagatggctgcttttgcacagtttgcatcagacttagatgcctcaactaaacaattacttgatcgtggtgcaagactagttgaaatcttaaaacaaggtcaatattcaccacttactgtttcagagcaagttgtatccatttatgccggtgtacgcgggtatcttgataaagttgcggtaggtgatgtagtcaagtttgaaacagaagttttaaatgaaattagaactaagcatagtgatttattagatgcgattgccaatgaaaaagaattatctaaagaaaatgatgataaactaaaatcaattttagacgatttggttggaaagtttgcaagtaactaat

SEQ ID NO: 272960 - DNA, 616 bp, Unknown
  Bacterial polypeptide expressing nucleotide sequence isolated from the Sargasso Sea
ttcgacaaagataatatccctaaagtatatgaagcccttatggtggatgagagcggaacaactcttgaggttcagcagcaattaggtgatggtgttgtgagaacaattgccatgggagcaactgaaggtttaaaaagaggtctttcagcatcaagaacgaatgctccaatttcagttccagttgggccagagacattagggagaattgtagatgttcttggtaatcctattgatgaaaagggaccaatcggcgaaaaatcaaaaatgccaattcacagaaagccaccaagctatacagatcaatcggcgtcaaatgaagttctagaaactggtatcaaagttattgacctaatgtgtccttttgcgaaaggtggaaaaataggactatttggtggcgcgggtgttggaaagacagtaaacatgatggagcttattaacaatattgcacttcagcattctggtctttctgtatttgctggagtaggtgaaagaaccagggaaggtaatgatttctattatgaaatgcaggaatctggagttgttaacatcgacaaccttggcgaatcaaaagttgcaatggtttacggacagatgaatgaacctccaggaaacagac

SEQ ID NO: 272961 - DNA, 787 bp, Unknown
  Bacterial polypeptide expressing nucleotide sequence isolated from the Sargasso Sea
actcaagtaataggtgctgtagttgatgttcaattcgaagggcaactaccagaaatattaactgcattagagtgtgataattctggaaatagattagttttagaggtggcccaacatttaggagaaacagcagtacgaacaatagcaatggatagtactgagggccttaaaaggggagataaagtaagtgatactggttcaccaataaaagtaccagttggtccagaaactttgggcagaataataaatgtaattggcgaaccaattgatcaaaaaggaaaagtaggcacaaaagaaagttggccaattcatagaccagctccaaaatttactgaccaatcaacagaaactgaaattttagttacaggcattaaagttgttgatcttctcgcaccttattccaaaggaggaaaaatcggactctttggaggagctggagttggaaagactgtaataataatggaattaataaataatattgcaaaagcacatggtggattttcggttttcgctggtgttggtgaaagaacaagagaaggaaatgacctttatcatgaaatgatcgagtcaggtgtaattaaacctgagggcaaaggttccaaagctgctttggtgtatggtcagatgaacgaacctccaggtgcacgtgcgcgagttggtttaactggtttaactgttgctgaatattttagagataaagaaggtcaagatgttttattctttgtagataatatatttagatttacccaagctggatcagaagtttcagctctttgggtagaatacc

SEQ ID NO: 272962 - DNA, 731 bp, Unknown
  Bacterial polypeptide expressing nucleotide sequence isolated from the Sargasso Sea
ctaaacttagaaagtgaaaacgttggtgtcgtaatttttggtgatgacagaaatgttaaagaaggggatgtagtaaaaagaacaggtaatattgttgatactccagttggaaaagaattattaggaagagtagtggatggtttaggaaatcctattgatggaaaaggaccattagataaaggaattaaaaaaagcagggttgaagtaaaagctcctggtattattccacgacaatcagtaagtgaaccaatgcaaactggtcttaaatcaattgatagtctagttccaattggaagagggcaaagggaattaattattggtgatagacaaactggtaaaacagcagttgcagtagatgcaattattaatcaaaaaaaaatcaatgaatctggtgatgaaaaacaaaaactatattgtatatacgttgcagttggacaaaaaagatcaacagtaagacaaattcaaaaaacattggaagaagctggagctatggagtacacaacaatcgttgctgctactgcatctgactctgctcctttacaatttttagcaccatatacaggttgtactatgggtgagtattttagagacaatggaatgcatgcgttaataatttatgatgatttgtctaaacaagcagttgcttatagacaaatgtcattgctattaagaagacctccaggacgtgaggcttatcctggagatgtattttatcttcatagtagattact

SEQ ID NO: 272963 - DNA, 499 bp, Unknown
  Bacterial polypeptide expressing nucleotide sequence isolated from the Sargasso Sea
tgcggatgacttgaccgaccctgcccctgcaactacatttgctcacttggatgcgactacagtactctccagaaagattgccgagttgggaatttatcctgccgtagatcccttggattctacctctcgaattttgactcctgagattgttggccaagagcactacaacactgcacaaagggtaaaagagattctacaacgctacaaagaattgcaagacattatcgccatcttgggtatggatgaattgtctgaagaagataaattggtggtacaccgtgcacgtcgtgtacaacgtttcttgtctcaacctttccacgttgcggagcagtttacaggattgagaggagtattggtagacattgaagacaccatcaaaggatttaacatgatcatggacggtgaagtggaccaatatcctgaggcagcctttaacttgaaaggaaccattgaggaggccattgaagctggagagaaaatgttggctgaaaacaactaa

SEQ ID NO: 272964 - DNA, 791 bp, Unknown
  Bacterial polypeptide expressing nucleotide sequence isolated from the Sargasso Sea
gtgcatggtattcggacagatgaatgaaccccccggcgctcgccttcgtgtagccttgtcagcacttacaatggctgagtttttccgagatacgacaggagccgatactcttctcttcgttgataatatcttcagattttctcaggctggtagtgaagtgagtgcgctgctgggcagaatgccaagtgctgtaggatatcagccaacgctcgctacagagatgggcgccttgcaagaaagaattacgtctacatccaagggcgcaattacatctgtacaagctgtgtatgttcctgctgatgatccgactgaccctgctccagcgactgcctttggcaacctcgatgcatttctctatctcgagcgatccatctctgaaaaaggcatttatcctgccgttgatcctcttgcctcatccagtcgaattttggatcctcagtatgtcggcgatcgacactacgcgattgcccgccgcgtccagagaacactgcaacgctatcgagaacttcaagatatcatagccatccttggtgtggacgaacttgctgaggaagacaaattgattgttcacagggcccgccgcatggagcgtttcctctcacaaccatttcttgttgctgaagtgttcacaggcaaaccgggtgaaataacaagcctcgatgacaccattcgttccttcgaagagattgcagacggaaaatgggatcaccttccagaacaagcattcatgtatgttggtcctattgaacaggccgaggaacaagcaaaaaaaatggccgcaaaggcctgaa

SEQ ID NO: 272965 - DNA, 851 bp, Unknown
  Bacterial polypeptide expressing nucleotide sequence isolated from the Sargasso Sea
acagatggtcttgttaggggtcaagaagtaactgatacaggtgaggctattacagttccagttggccaagaaacgttaggaagaatattgaatgttattggagaacctattgatgaaagaggtcctatccgtacagagcgaaaggctccaattcatgcttctgcaccaccatttgtagatcaatcaactgaggctgagattcttgtaactggcatcaaagttctagatttattagagccttatccaagaggaggtaaagttggtctttttgggggagcaggagttggaaaaacagtattaattcaggagctgattaataatatagctaaaggtcatggcggatattctgtttttgcaggtgtaggagagcgaactagagaaggaaatgatttatatcatgaaatggttgagtctggagtaattgatttgcagggcaatgaatctaaagttgcccttgtttatggtcaaatgaatgaacctcctggagccagagctagagtagggttaacagggttaactcttgctgaatactttagagatgaagagggtcaagatgttttatttttcgttgataatatttttagatttacccaagccggttctgaagtctctgcactactaggaagaataccttcagcagttggttatcaaccaactcttggaacagatatgggtgcccttcaagagagaataacttcaacaaacaaaggttctataacgtctgttcaagctatttatgttcctgctgacgatttaacagacccagcaccagcaacgtcttttgctcatcttgatgctacaacagttttatccaggcagatatctgaacttggaatttatccagctgtaga

SEQ ID NO: 272966 - DNA, 892 bp, Unknown
  Bacterial polypeptide expressing nucleotide sequence isolated from the Sargasso Sea
ttttttggaggagcaggtgttgaaaaaaccgtacttatcatggaactaataaacaatgttgcaaaagcccatggtggcttttctgtttttgctggagtaggtgaaagaactagagagggtaatgatctttatcatgaaatgatagagtcgggagtaataaagcctgagggatcaggttcaaaagccgcattggtttatggccaaatgaatgagccaccaggagcaagagcaagagttgctttgtcaggattgactgttgcagagtattttagggatcaagagggtcaagatgtactattttttgtagataatatttttagattcacccaagctggatcagaagtatcagcattattaggcagaattccatcagcggttggatatcaaccaactttagcaacagatatgggaaatcttcaagagagaataacaacaactaacaaaggatcaattacttctgtacaagcgatatacgttcctgcagacgatttaactgatccagcaccagcaacatctttttctcatttggatgctacaaccgtactatcaaggcaaattgcagaaataggaatttaccctgctgttgatcccctggattcgacttctagaatcttagatccaaggattgttggagatgaacattatagagttgcaagagaagtacaaaaagttttgcagacttataagtcattacaagatattattgcaattttaggtatggatgaactttcagaggaagataaattaattgttgcaagagcaagaaaaatacaaagatttttatcacaaccattttttgttgcagaagtatttactggttctccaggcaaactagttgagcttgattcaacaattaagggttttgatgctatatgcaaaggtgaatatgacc

SEQ ID NO: 272967 - DNA, 472 bp, Unknown
  Bacterial polypeptide expressing nucleotide sequence isolated from the Sargasso Sea
tgaactttttaaccaaggaattagacctgcaattaacgtaggtttatcagtgtcaagagttggatcttcagcacaaactaaagcaatgaaaaaagtttctgggtcaatgaaacttgagttagctcaatatagagagatggcagcatttgcccagtttggatcagacttagatgcatccactcaaaaattattaaacagaggttctaaattaactgaactattaaaacaaaaacaatactctcctatgactgtagctgaacaagtaatttcaatattttgtggcgttaaaggatatttggatgacattgaacaaaaaaatattgctgatttcgaaaataaaattatagaaaaatgcaaatctgaaaaatcagaaattttagactcaatatcaagctctgggaaacttgaggaagatgcagaaaaatctttaacagaggttattttagaacttaaaaaaaactttaattcttaa

SEQ ID NO: 272968 - DNA, 520 bp, Unknown
  Bacterial polypeptide expressing nucleotide sequence isolated from the Sargasso Sea
ttcagcaatttatgtaccagctgacgacttaactgatccagctccagcaacttcatttgcacacttggatgcaacaactgtactttcaagacaaattgctgaaattggtatttatccagcggttgatccattagactctacatccagaattttggatccaagagttgtgggagacgagcattacaaggtagcaagagatgtccaaaaaatattgcaatcttataagtcactccaagatattattgcaattcttggtatggatgaattatctgaagaggataaattagttgttgctagagctagaaaaatccaaagatttttatctcaaccattttttgtagctgaagtttttacaggctcgcctggaaaattagttgatttagaatcaaccattaaaggttttgatgcaatttgcaaaggtgagtatgatcatttaccagaagcagctttttacatggtgggcactattgaggaagcaattgaaaaagctaagaaaatggaaaaagaagctgcagcctaa

SEQ ID NO: 272969 - DNA, 799 bp, Unknown
  Bacterial polypeptide expressing nucleotide sequence isolated from the Sargasso Sea
gatggaaataaatccttcagaagttacaaaaatattaaaagaacaaatcaaaaattttggtgaaaaagccgaagttgcagaagtagggcaggtattgtcagttggagatggtatcgcaagaatttatggtttggacaatgtacaagctggtgaaatggtggaattcgcagatggatcaaaagggatggctctaaatttagaaagtgaaaatgttggtgttgtaatttttggtgatgatagaaatgtaaaagagggtgatgtagtaaaacgtacgggtaacattgttgatactcctgttggaaaggaattattaggaagagttgtagacggtttaggtaatcctattgatggaaaaggtccgtttgataaaaatattaaaaaaactagagtagaagtaaaagcaccaggaattattcctcgtcaatcagtcaatgaaccaatgcaaactggattaaaatcaattgatagtttggttccaattggaagaggtcaaagggaattaattattggtgacagacaaacaggtaaaactgcagttgctgtggatgcaattattaatcaaaaaaaaataaatgaatctggtgatgaaaagcaaaaattatattgtatttacgttgcagttggacaaaaaagatcaacagtaagacaaattcaaaaaactttagaagaagcaggtgcaatggattacacaactattgttgcagctacagcatcagactctgcgccattacaatttttagccccatatacaggatgtgctatgggtgagtattttagagataatggaatgcatgcactt

SEQ ID NO: 272970 - DNA, 739 bp, Unknown
  Bacterial polypeptide expressing nucleotide sequence isolated from the Sargasso Sea
agttacaaaaatactaaaagaacaaattaaaaattttggtgataaagcagaagtcacagaagttggtcaagttttatctgttggagacggtattgctaggatttatggtttggataatgttcaagctggtgaaatggtagagtttgcagatggttcaaaaggtatggctctaaacttagaaagtgaaaacgttggtgttgtaatttttggtgatgacagaaatattaaagaaggggatgtagtaaaaagaacgggaaatattgttgatactccagttggaaaagaattattaggaagagtagtggatggtttaggaaatcctattgatggaaaaggaccattagataaaggaattaaaaaaagcagggttgaagtaaaagctcctggtattattccacgacaatcagtaagtgaaccaatgcaaactggtcttaaatcaattgacagtttagttccgattggaagagggcaaagggaattaattatcggtgatagacaaactggtaaaacagcagttgcagtagatgcaattattaatcaaaaaaaaatcaatgaatctggtgatgaaaaacaaaaactgtattgtatatacgttgcagttggacaaaaaagatcaacagtaagacaaattcaaaaaacattagaagaagctggagctatggagtacacaacaatcgttgctgctactgcatcggactctgctcctttacaatttttagcaccatacacaggttgtgct

SEQ ID NO: 272971 - DNA, 664 bp, Unknown
  Bacterial polypeptide expressing nucleotide sequence isolated from the Sargasso Sea
ctggagagagcatatcctggcgatgttttttatttacacagcagactattagaaagagcctcaaagttgaacgaaaagaatggaggagggtctcttacagctttgcctattatagagacacaagcgggggatgtttcggcttatattccaactaatgtaatatcgataactgatggtcaaatctttttagaaactgagctattcaatcaaggaataagacccgcggttaacgtaggtttatcagtttcaagagttggttcagcggcccaaactaaagcaatgaaaaaggtagcaggatctattaagcttgaacttgcacaatacagagaaatggcagcatttgcacagtttggttcagatttagatgtttcaacgcaaaaacttttaaatagaggctccaaattgactgaactattaaaacaaaaccaatattcacctttaacagtggcagagcaagttgtttcaatattcacaggggtgagcggatatcttgacgatatagaaataaatgcaattaaacaatttgagatcgacctgttagagaaagttaaaaatgatcagccagatattttggatagtattaattcatcaggaaaactggaagatgatgttaaagagaaattagtaaatattatcaaagatattaaaggagcaaaaaaatagt

SEQ ID NO: 272972 - DNA, 319 bp, Unknown
  Bacterial polypeptide expressing nucleotide sequence isolated from the Sargasso Sea
tcaaaaattcttcaatcgtataaatctcttcaagacattatagcaatattgggtatggatgagttgtccgaggaggataaactaacagttgctagagcaagaaaaattcagagattcttatctcaacctttttttgtagctgaagtttttacaggaacacccggtaaacttgtaaacttagattctacaataaaaggttttgacgcaatttgtaagggagattatgatcacttgcctgaagccgccttttatatggttggaacaatagatgaagcaattgcaaaagcggaaaaaatggcaaaagaggctgcagcataat

SEQ ID NO: 272973 - DNA, 818 bp, Unknown
  Bacterial polypeptide expressing nucleotide sequence isolated from the Sargasso Sea
ccctggcataattcctcgaaaatcagttagtgaaccaatgcagacaggttttaaatcaattgacagtctagttccaattggaagaggacaaagagaattaattattggtgacagacaaactggtaaaacagcagttgcaattgacgctattataaaccagaaaaaaattaacgagtcaggtgatgagaagaaaaaattatattgtatttacgtagcagtaggccaaaagagatctacagttagacaaattgaaaaaacattagaagaagctggtgcaatggagtacacaacaatagtagcagcaacagcatcagatgcagcacctttgcaatttttagccccatacaccggatgtactatgggtgaatattttagagataatggaatgcatgctttaataatatatgacgatttatcaaaacaagctgttgcttacagacaaatgtctctattgttaagaagacctcctggaagagaagcatatcctggtgatgtcttttatctacacagtagattacttgaaagagcagcaaaattaggtgatgaacatggtggaggctctttaacagctcttccaattatcgaaactcaaggaggtgacgtttctgcatttataccaacaaatgtgatctcaattactgatggacaaattttccttgaaactgaactttttaaccaaggtatcagaccagcaattaatgttggtttatctgtatcaagagttggatcgtctgctcagacaaaggccatgaaaaaagtttcaggatcgatgaagttagaattggcccaatatagagaaatggctgcatttgctcagt

SEQ ID NO: 272974 - DNA, 836 bp, Unknown
  Bacterial polypeptide expressing nucleotide sequence isolated from the Sargasso Sea
accaatagaattcttgaagtgccagttggcgaaggcttgcttggcagggttgtcgactccttgggaacaccactcgatggaaaaggagctgtttcctcagaccaaacagcaccaatagaaaaggttgcaccaggcgtcatctcaagacagtcagtcgaccaaccagttcaaaccggacttaaatcgattgatgcaatggtaccaatcggaagaggtcagcgagagcttatcattggcgatagacaaacaggaaaaacagcggttgctgttgacaccataatcaaccaaaaaggcacagggataaaatgtatctacgttgcggtgggccagaaaaactcttcagttgccaatgtggttaagaagttagaggaagaaggcgcattagagcatacaatcattgtcaatgctgcagcatccgattcagctgccatgcagtatattgctccatattcaggttgtgccatgggcgagtacttccgagacaaaggagaagacgccctaattatttttgatgacttaaccaaacaggcctgggcatacaggcaagtatcgctcctattaaaaagacctcctggaagagaggcttatcctggcgacgtattttatcttcactcaagattgcttgagagagcagcaagggtgaacgcagagtatgtagaaaaagaaacaggcgggaaagtgaagggccaaacaggctcgttaaccgcattgccaatcattgaaacacaagcgggcgacgtttctgctttcgttccaacaaacgtgatttcaattacagacggacaaatatacctagaaagtgatttattcaatgcgggcattagaccagcgataaa

SEQ ID NO: 272975 - DNA, 508 bp, Unknown
  Bacterial polypeptide expressing nucleotide sequence isolated from the Sargasso Sea
atgaaaattcgagcagaagaaatcagtaacatcatccagcagcaaatcgaaaatttcgagaagcagaccaccaaaaccgaagttggaaccgtcttggaagtcggagatggaatcgcacgagtctatggacttgacaatattgttgccggcgaacttgtggaattccccaataaccttcaaggcatggccctcaatctggaagaggataatgtcggtgtcgtgctttttggtgatgaccgaaacatcaaggaaggagatgaagccagaagaaccgagcgtatcgccgaagttcctgtaggtgatgccatgctcggtcgggttgtggaccctcttggacaaccaattgatggcaagggccccattgagacctcagaaagccgaagagtcgaagtcattgctccgggtattgtcacacggaagtcggtgcatgaacctcttcagacaggtctcaaggcaatcgactcgatggtcccgattggacgcgggcagcgagagttgatcattggcg

SEQ ID NO: 272976 - DNA, 337 bp, Unknown
  Bacterial polypeptide expressing nucleotide sequence isolated from the Sargasso Sea
cagagtagctagagaagttcaaaaaatactacagacttataaatctttgcaagatattattgcaatattgggtatggatgaattatcagaagaagataaattaactgtggctagagctagaaaaattcaaagatttttatcacaacctttttttgttgcagaagtttttacaggatcaccaggaaagctagttgaattagaatctacaatcaagggctttgatgcaatttgtaaaggtgagtatgatcatttacctgaagcagctttttatatggtaggaactatagaagaagctattgaaaaagcagaaaaaatggctaaagaagcagcggcgtaa

SEQ ID NO: 272977 - DNA, 707 bp, Unknown
  Bacterial polypeptide expressing nucleotide sequence isolated from the Sargasso Sea
ggacaagaaactctgggaagaattatggatgttttgggaaatcccattgatgaaaaaggcgacattggtgagaaagaaagacaaccaattcataaaagcccaccaagctacaccgatcaagcgggatcaaacgaactactagaaacaggcatcaaagtaattgacttaatgtgtccttttgcaaaaggaggaaaagttgggttatttggaggagctggagtaggtaagaccgttaacatgatggagcttataagaaacattgcaattgagcattcagggttctcagtttttgctggagttggcgaaagaactcgagaaggtaatgatttttatcatgaaatgactgaatcaaatgttttagataaagtttcgcttgtttatgggcaaatgaatgagcctccaggcaacaggttaagagttgctcttactggcttaacaattgctgagaaatttagagatgaaggaagagatgtgcttctttttattgataatatttatagatatacacttgctggtgttgaggtatcagctctgttaggaagaatgccatctgctgttggatatcagccaacactagcaggggaaatgggagcacttcaagaaagaattacttcaacaaaaacaggatctattacttcaatacaggcagtatatgttcccgctgatgatttaacagacccttcacctgcaacaacatttgcacactt

SEQ ID NO: 272978 - DNA, 701 bp, Unknown
  Bacterial polypeptide expressing nucleotide sequence isolated from the Sargasso Sea
aatgcaacagctgaatccgtccgagattagcgacataatcaaacaaaaaattgacaagttagatgtcaaaagcgaagcaagaaatgaaggtaccgtcgtttcggttaccgacggtattattcgaattcatggccttgcagaggctatgtatggagagatgattgaatttgagggtgggatttatggtcttgcacttaaccttgagcgagattcagttggagctgtaattttaggtgattataagaccgttgctgaaggtcagtcatgcaaatgtaccggtcgaattcttgaggtgccagtggggccagaattacaaggccgagttgtggatgcacttggaagtccgattgacggaaaaggcccgatagatgcaaaagcaactgatgcaatagagaaggtagcacctggggttattgcccgtcaatcagttgatcagcctgtacaaattgggctaaaagcaattgatgcgatggttccaattggtagaggacaaagagagctaataattggtgaccgacaggtcggaaaaaccgccatagctgttgatgcgattattaatcaaaaaggcacaggaattaaatgtgtttatgttgctataggtcaaaaggcatcgtccgtaaatgctgtggtaagaaagcttgaagagcacggagcaatggagcatacaattgttgttgctgctacagcttctgaccctgcgg

SEQ ID NO: 272979 - DNA, 799 bp, Unknown
  Bacterial polypeptide expressing nucleotide sequence isolated from the Sargasso Sea
gttgcctcagactgtattagtttttgggcaaatgaatgaacctccaggaataagagcaagagttgcccaaacgggtttaactatggctgaatattttaaagaagaaagaggacaagacgttttgttatttgtggacaatatatatagatatattttggctggaatggaggtctctggattattaggcaggatgccttctgcagtagggtatcagcctacattaggtaccgaaatgggagctttggaagaacgtataacttcatctaagacaggttcaattacatcggtgcaagctatatatgttcctgcagacgactatactgaccctggaatagtaactacttttggtcatttagatgcagttatgactttggagagaaacttggcttctcaaggtttatatccagcagtcgatcctttaacatcattttcaaatatattagaaccatcagttgtgggacaagaacattatgatgttgcaatagccgttacacaagttttacagagataccaaagcctacaagatattattgctattttaggtattgaagaattatctgacgatgataaagctactgtttctagagcaaggaaaattcaaagattcttaactcaaccatttaatgttgctgaacaattcacaggaactcctggtaagtatgtgtcggttaaagatacagttgaaggctttaagcaaattcttgatggagttcatgatgatgttccagagcaggcattttatatggttgggacgatagacgaagctcttgcaaaagctcaagagatggcatctgcttaa

SEQ ID NO: 272980 - DNA, 642 bp, Unknown
  Bacterial polypeptide expressing nucleotide sequence isolated from the Sargasso Sea
tgttttttatctccattcaaagattattagaacgagcagctaagctaaattcagataatggatctggttcattgacagctttgcctgtaattgaaacacaaggtggagacgtatccgcttttattcctacaaatgttatatcaataacggatggacaaattttcttagagactgagttgttttataagggtattagaccagcagttaacgttggattatctgtttcaagagttggttcttcagcacaaattaaagcaatgaaacaagttgcaggaaccatcaaacttgatcttgctcagtatagagagatggctgcatttgcacaatttgcatctgatttagatgcttctactagacaattgcttgcaagaggtgaaagacttactgagttattaaaacaaccacaatattcaccactatctgtagaagaacaagtgtgtgttatatattcaggtgttaaaggatatttagataagataagtataaatcaaattggagattttgaaaaagctctcttgcaaacacttaattcaaaaggctcttcaataattatttcgataactaaagataaagcgcttactgataaatctgaaaaagaccttcaaaagattattgaagatctattgagtagttttgagtaaa

SEQ ID NO: 272981 - DNA, 607 bp, Unknown
  Bacterial polypeptide expressing nucleotide sequence isolated from the Sargasso Sea
ctttctgatgctatgggagggggttctatgacagctcttccaattattgaaactcaatctggggacgtttcggcttacattccaactaatgttatttcaattacagatggacaaattttcttgagtgcagatttatttaactcaggattaagaccagctattaatgttggtatttcagttagccgagttggaggagcagctcagacaaaagcaataaaaaaaattgctggaactttaaaattagaacttgcacagtttgatgaactagctgctttttctcaatttgcatctgatcttgatgaagcaactcagcaacaacttgaacgaggcaaaagacttagagagttattaaagcaacctcaattctctccgctgaaccttgcagaacaagttgcagttgtttatgcaggggttaaaggtcttattgatgaggttcctgttgaagatgttactaaatttgcaactgaacttagggaatacctgaagttgaataaagcggaatttatagaagagattcttaaagaaaaaaaattaaatgatggactagaagcgacgctaaaagaggtgataaatgaagttaaatcatcaatgcttgccacagtttaaa

SEQ ID NO: 272982 - DNA, 831 bp, Unknown
  Bacterial polypeptide expressing nucleotide sequence isolated from the Sargasso Sea
aatatcacaagttctcggagctgtagttgatgtagagttcgatggtgaacttcctgcaatcatgaacgctctagaagttgacaacaatggaacaagattaatgctagaggttgctcagcatttaggagaaaatgctgttcgtacaattgctatggatacaacagatggactagttagaggtcaaacagctactgatacaggtgcccctatttcaatgcctgtaggcccggaaactttaggtagaattatgaatgttgtaggagagccagttgacgaaagaggcgacattggaacgagtaaatcttatcctattcatagaccagcgccagagtttgttgatcaatctacagaaactgaagttctagtaacaggaattaaagtggttgatctactagcaccttatgcgagaggtggtaagattggtttatttggtggagctggagttggtaagacagttttaattatggaattaattaataacattgccaaggctcatggaggatattcggtatttgctggtgtaggcgaaagaactcgtgaaggtaatgacttgtaccacgaaatgattgagtcaggaattattgatctaaaaggtaaggactcaaaagttgcacttgtttatggccagatgaacgaaccaccaggagcaagagctagagttgctctatcaggattaacccaagcagaatattttagagacgaagaaggacaggatgttttattttttgtagacaatatctttagatttactcaagctggatctgaagtgtcagctctcctaggacgtattccatctgcagttggatatcaaccaacacttgcaactgatat

SEQ ID NO: 272983 - DNA, 792 bp, Unknown
  Bacterial polypeptide expressing nucleotide sequence isolated from the Sargasso Sea
aatgcagacaggtttaaaggctattgatagtttaattcctataggtagaggacaaagagaattaattattggcgatagacagacaggtaaaactgctattgcaatagatacaattattaatcaaaaggacaataacaagtctaaagatgagaaaaaaaaactatattgtatttatgtagcgattggccaaaagaggtcgacagtagcgcaaattgttaaaactttacaagatacaggagctatggaatactcaatagtagtagctgctacagcatccgatccagcaccattacaatttttagcgccatatactggatgcaccatgggagaattttttagagacaatggtatgcattctctcatagtttatgatgatttatcaaaacaagcagttgcttacagacaaatgtctctattgttaagaagacctccgggaagagaagcttttccaggcgatgttttttatttacacagccgacttcttgaaagagcagcaaaattaaatgatgaaaatggaggtggttcactaaccgcattgccaataattgaaacacaagctagtgatgtttcagcatacatcccaacaaatgtaatttctataacagatggacaaatatttcttgaaactgaattattttttcaaggaattagacctgcagtaaatgttggaatatctgtatcaagagttggatctgcagcgcaaataaaagcaatgaaaaaagtagctggctcaattaagttagaattagctcaatatcgtgagatggcggcctttgcgcagtttggttcaga

SEQ ID NO: 272984 - DNA, 526 bp, Unknown
  Bacterial polypeptide expressing nucleotide sequence isolated from the Sargasso Sea
acctaccaatgtaatttcaatcacagatgggcaaatttttttagagacagaattatttaatcaaggaataagacctgctgtgaatgttggcctctctgtttctagggttggttcagcagctcaaactaaagcaatgaaaaaagtagcaggctcaattaaacttgaattggcacagtatcgtgaaatggcagcatttgctcaattcggatctgatttggacgcttcaacacaaaaacttttaaatagaggctctaaacttactgaattattaaaacaagatcagtacagtccaatgacagtagcagaacaagtggtttcagtttactctggtgttaaaggatatttagatagtattaatacaaatcaaattcgttcttttgaaaaaggattattagacttaataaagagtgaaaaacccgaaatattagactcaattcagaaaagcggtaaaatagaagaagatactgaaaaagttttatctgaagtgatttctgattataaaaaatcaaattttgaaaaaaaataa

SEQ ID NO: 272985 - DNA, 303 bp, Unknown
  Bacterial polypeptide expressing nucleotide sequence isolated from the Sargasso Sea
aatgcctagtttagatgatcttagaaaaagaatttccagtgttaaatccactcaaaaaattacaaaagccatgaaaatggtggcagctgcgaaacttcgtagagcgcaagaaatggctgagaaaggtaggccctatagtgataaaatggacattattattcaaaacttgagcaaagcaataaatgacccattaaacgcacccaaactcttagttggaaccggggaagataaaacctatctatgtgttgttatgacagcagacagaggtctttgtggaggatttaatagtaatatatgtaaatt

SEQ ID NO: 272986 - DNA, 586 bp, Unknown
  Bacterial polypeptide expressing nucleotide sequence isolated from the Sargasso Sea
attgtcaatgtttctgatggaattatcagaatacacggaatgggcgatgttatgtatggtgagctcgtagagtttgaaaatggtgtttttggacttgcacttaacttagagcaagactctgtaggtgttgttgtccttggtgactaccttgggctaagtgaagggcaaaaagttacatgtacaggtaagatcttagaggttcctgtaggtgaggaaatgctcgggcgagttgtggacgctctaggaaatccaatcgatggaaagggggaacttaaaacaaaacaaactgctcctattgaagtagttgcgccaggagttattgccagacaatcagttgaccaaccagtacaaattggacttaaatcaatcgatgcaatggttccaataggaagaggccaaagagagctcattattggcgatagacaaactggaaaaacagctgtagcaattgacgcaataattaatcaaaaaggtacaggaattaaatgtatttatgtagctattggccaaaaacaatcaacaatagctaatgtcgtagcaaaacttgaagagtatggagcaatggagcacacaattgttgtttcag

SEQ ID NO: 272987 - DNA, 613 bp, Unknown
  Bacterial polypeptide expressing nucleotide sequence isolated from the Sargasso Sea
agctaaacttaatgatgaaaacgggggcggttctcttacagctttaccaattatagagactcaagctggtgatgtatcagcctatataccgaccaatgttatatcaatcactgatggccaaatatttttaggtacagagttattcaatcaaggaataaggcccgcagttaacgtagggctttctgtttcacgagtaggatcagctgctcaaactaaagctatgaaaaaagttgcaggctcaattaaacttgaattagctcagtaccgtgaaatggcagcttttgcccaatttggatctgatctagatgcttcaacacaaaaacttttaaatcgtggttctaaacttactgagttgttaaaacaaaatcagtatagtcctatgactgtagcagaacaagtagttgtaatatatgcgggcgtaaaaggttatctggacagtattaatataagcgaaattggttcttttgaaaaaggacttttagagctggtaaaaagtgaaaaaccagaaatattagaatctattcaaaagagtggaaaaatagaagacgaaatagacaaaacgttgtcagaaattattactaattataaaaaaacaaattttgagaaaaaataa

SEQ ID NO: 272988 - DNA, 295 bp, Unknown
  Bacterial polypeptide expressing nucleotide sequence isolated from the Sargasso Sea
aatgcctagtcttgatgatttaaggaaaagaattactagtgtaaaatctacacaaaaaattacaaaagccatgaaaatggttgcagcagcaaagcttcgtaaggctcaagaaatggcagaaaaaggaaggccttatagtgataaaatggatgttatagtacaaaacctaagtaaggcaataagtgatctttcaaatgcaccaaaacttttggtgggaacaggacaagacaaaactcatttatgtattgtaatgactgcagacagaggtttatgtggaggatttaataccaatata

SEQ ID NO: 272989 - DNA, 689 bp, Unknown
  Bacterial polypeptide expressing nucleotide sequence isolated from the Sargasso Sea
caatcagttgatcaaccagtgcaaattggacttatttcaatcgatgcaatggttccaataggaagaggccaaagagagcttattattggtgatagacaaaccggaaaaacagctgtagcaattgacgcaataattaatcaaaaaggtacaggaattaaatgtatttatgtagctattggtcaaaaacaatcaacaatagccaatgtcgtggcaaaacttgaagagtatggagcaatggagcacacaattgttgtttcagcggcagcagctgatccagctgcgatgcaatacctctcagcatattcaggttgtgcaatgggggaatattttagggacacagggcaggatgcattaattgtttacgatgatttgtcaaagcaagcagttgcttacagagagatatcgctattacttagaaggcctccaggaagagaagctttccctggagatgttttttatcttcactcaagacttttagagagagcagcaagagtaaatgcggaatatgtagaaaaaattacagaaggaaaggtaaaaggtaaaacaggatctctcacagccttaccaattattgaaacacaagccggagatgtatctgcttttgttccaactaatgtaatttcaattactgacggacagatatttttagaaacagatctttttaattcaggcgttagaccagctattga

SEQ ID NO: 272990 - DNA, 407 bp, Unknown
  Bacterial polypeptide expressing nucleotide sequence isolated from the Sargasso Sea
ttctgagttaggaatatatccagctgtagatcctcttgattcaacaagcaggcagcttgatcctttcgtggtcggggatgatcattatgaggttgctcaaggagttcaaaagatcttacaaagatataatgagctcaaagatatcattgcaattctcggaatggatgagctttctgaagaagataaaggccttgtagcaagggcgagaaaggctcaaagatttttatcccagccgttctttgttgctgagatttttactggaactccaggaaagtatgtttcgcttgaggacactattaaagcatttaagggaattcttaatggagattacgaccatcttcctgaacaggcattttatatggttggaactattgaagaggctgtagaaaaagctaagactttataaa

SEQ ID NO: 272991 - DNA, 790 bp, Unknown
  Bacterial polypeptide expressing nucleotide sequence isolated from the Sargasso Sea
atgagaaaaggaaaaattacacagattattggagcagtagtggatgttaaattcgaaggagagttgcctgaaatattaaccgcattagagtgtaataatggaggtgttagactcgttttagaagttgcacaacatctaggagagtcaagcgtaagaacaattgctatggacgcaactgaaggattaaaaagaggagatgaagtaacagatactggcgctccaattaaagttcctgttggtccagaaactttaggtagaattataaatgtaatcggtgaacctattgatgaaaaaggagaagttaaaactaaagaaaaatggcctatccatagatctgcaccagaatttaatgaacaatcaacagaaacagaaattttagtgactggcatcaaagtcgttgaccttttagcgccctatgcaaaaggtggtaaaattggtttgtttggtggtgctggtgttggaaaaactgtacttattatggaattaattaacaacgttgctaaagctcacggaggattttcagtttttgcaggagttggcgaaagaactagagaaggaaatgatctttatcatgaaatgatagagtcaggagtaattaaaacagaaggagccggatctaaagctgctttagtttatggtcaaatgaatgaacctccaggagcaagagctagagttgcattatcaggactgacagttgctgaatattttagagatcaagaaggccaagatgttctttttttcgttgataatatttttagatttactcaagcgggatcagaggtgtctgcat

SEQ ID NO: 272992 - DNA, 657 bp, Unknown
  Bacterial polypeptide expressing nucleotide sequence isolated from the Sargasso Sea
tatgagaaaaggacaaattacacaaattattggagcagtagttgacgtaaaatttgatggagaattaccagaaatattaaccgcattagaatgtaataatgctggaaatagacttgttttagaagttgcccagcacttaggagagtctagcgtaagaactatagcaatggatgctacagaaggtttgaaaagaggagatgaagtaatagataccggatctccaataaaagttccagtcggtcctgaaactttaggaagaatcattaatgtagttggtgaacctattgacgaaaaaggagaagttaaaacaaaagaaaattggcctatacatagatcggcaccagaatttaatgaccaatcaactgagacagaaattttagtaactggaattaaagtagttgatttgttggccccatatgcaaaaggtggaaaaattggtttgtttggaggagctggagtcggaaaaacagttcttattatggaactaattaataatgttgcaaaagcacatggagggttttcagttttcgcaggagttggtgaaagaactagagagggaaatgatctttatcatgaaatgatagaatctggagtgattaaaccagaaggcgatggttcaaaagccgcattagtatatggtcaaatgaacgaacctcc

SEQ ID NO: 272993 - DNA, 613 bp, Unknown
  Bacterial polypeptide expressing nucleotide sequence isolated from the Sargasso Sea
aatgacaggtaaaacttcacaaataatgggtgcagtggtagatgtggcttttgaagatggccatttacctgaaataatgaatgcattaaatgttgatagaggtgatgaaggcaccttagttcttgaagttgcgcagcacttaggagataatatggttcggactgttgctatggattcaacagatggattaacaagaggtgtggaagtattagatactggaacgcctatttctgtgcctgttggtcaggaaacattgggtaggttatttgatgtattaggtaatacaatcgatggaaaaggtgatgtaggtactgataaaaaatacccaattcatagatctgctcctaagcatgaggatttaagtacttcaacagaaattttaataactggtattaaagttgttgatttaatggagccttatactaaaggtggtaaaacgggattatttggtggtgctggagtaggtaaaacagtattgattcaggaattaattagaaatattgcaactgagcatggtggtttttcagtattcgcaggtgttggtgagcgtacacgcgaagggaatgatctatataatgaaatgactgaatcaggagtgattgataagacaact

SEQ ID NO: 272994 - DNA, 868 bp, Unknown
  Bacterial polypeptide expressing nucleotide sequence isolated from the Sargasso Sea
ccgcgcgagggcaacgacctctatcacgagatgatggaatccggcgtgatcgtgcccgacggggaatccaaggccgcactcgtgtatggccagatgaacgagccgccgggggcccgtgcccgcgtcgcgctgaccggtctgacccaggccgagtatttccgcgacgaggaaggccaggacgtgctgttcttcgtcgacaacatcttccgcttcacccaggccggttccgaagtgtcggccctgctcggacgtatcccctcggcggtgggctatcagccgaccctgggcaccgagctcggcaacctgcaggagcgtattacctcgaccaataaggggtcgatcacgtcggtccaggcgatttacgtgcccgcggacgatctcaccgacccggccccggccacgaccttctcgcatctcgatgcgacgacaaccctgtcgcgtcagattgccgagctgggcatctacccggccgtggatccgcttgactctacgagccgaattctcgacgcccgggtcatcggcgaggaacattacgacgtcgcccgttccgtccaggaaacactgcagagctacaagggcctgcaggaaatcatcgccatcctgggcatggacgaactgtccgaagaggacaagctgacggtcgcgcgcgcgcgcaagatccagcgcttcctgtcgcaaccgttccatgtcgcggaagtgttcaccggttcgccgggcaagttcgtgaacctggaagatacgatcaagggtttccagcagatcgttgccggcgagcacgacgacctgccggaagcggcgttctatatggttggtaccatcgacgaggccgtcgagaaggcccagaccatggccgcggaagcggcctagc

SEQ ID NO: 272995 - DNA, 880 bp, Unknown
  Bacterial polypeptide expressing nucleotide sequence isolated from the Sargasso Sea
tggtgaaatggtagaatttcctggtagtattgctggtatggctttgaacctagaaagagataatgtcggtgtagttatatttggaagtgataaaacaattagagagggcgatattgtaaaaagaactgggtctattgttgacgttccaataggtaaaggcctcttaggaagggtcgttgatgcgcttggcaaccctatagatggaaagggtgctcttaaaaacgtcaaaagatcaagagttgagactaaagctccaggtattatgccaagagaatcagttagcgaacctatgcaaactggattaaaggctatcgattcgcttattcctgtgggaaggggacaaagagagcttattattggtgacaggcaaacaggtaaaacagctattgcgatagatacttttttaaatcaaaagagtactaatgataaagctggtaaagacgatactaagaaactgttttgtatttatgtagcagtaggtcaaaaaagatcaacagtagcccaaattgtaaaaaccttggaagaaagaggggcgttagaatattcgattgttgtagcagctacggcatctgatccagctccaatgcaatttcttgcgccttactctgctgctgctatgggggaatttttcagagataatggaatgcacgcagttgttgtttatgatgatttatcaaaacaagcagttgcttacagacaaatgtctctccttttaaggagacctccaggaagagaggcttatcctggtgacgttttttatctacactctcgcttgcttgaaagagctgcaaaattaaatggagaaaatggatctgggtctttaacagcccttccaataatcgaaacacaaggtggtgacgtttccgcatttattccaaca

SEQ ID NO: 272996 - DNA, 688 bp, Unknown
  Bacterial polypeptide expressing nucleotide sequence isolated from the Sargasso Sea
aatgttttttaattccttgctaacaaattttgcagcattagaagttggtcaacatctatattggcaaattggaaatatcagactacatgggcaggtatttttaacatcttggattttattaggagcgttattagtttttatttctttaggaactaaaaaaatggaaaatgatcctaaaggccttcaaaacttgcttgagttcctctgggattacataagagatctttcaaggacgcaaataggtgaaaaagtttatagagattggatgccatttataggtactttatttttattcgtctttgttagtaattggggaggagctttaattccttggagattgattaagttaccaagtggagaattaggagcacctactgctgatatcaatacaactatagccttggctttattggtttcactgtcttatttctatgcaggtttaagcaataagggttggagatacttcgaatactatgttcacccaactccgattatgcttcctttcaaaattctagaggattttacgaaacctttatcactctctttcaggctatttggaaatattttggctgatgaacttgttgttggtgttctagtctttttagttccgctaattctcccaatacctgttatgtttttaggattgtttactagtgcaattcaggcactaattttcgcaactttggcg

SEQ ID NO: 272997 - DNA, 793 bp, Unknown
  Bacterial polypeptide expressing nucleotide sequence isolated from the Sargasso Sea
atggaaataaatccttcagaagttacaaaaatattaaaagaacaaattaaaaagtttggagataaagctgaggttacagaggttggtcaagttttatcagtaggagatggtatagcaagaatttatggattagataatgttcaagctggagaaatggttgaattctctgacggctcaaaaggaatggcattaaacctagagagtgaaaatgtaggtgttgtaatttttggtgatgatagagcagttaaagaaggtgatactgtaaaaagaactggtgcaatagttgatacacccgttggaaaagaattacttggtagagtagttgatggtttaggaaacccaattgatggaaaaggtacactagataaaagtttaaaaagaagtagggttgaagtcaaagcgcctggcataattccacgtaaatctgttagtgaaccaatgcagactggtctcaaatcaattgatagtctagttccaattggaagaggacaaagagaattaattattggtgatagacaaactggcaaaacagcagtcgctattgatgctatcattaaccaaaaaaaaattaatgagtctggggatgaaaagaaaaaattatattgtatttatgtagctgtaggccaaaagagatctacagttagacagattgaaaaaacattagaggaagctggcgctatggaatatacaacaatagtagctgcaacagcatcagatgcagcacctctgcaatttttagctccttatactggatgcactatgggtgagtattttagagataatgggatgcatg

SEQ ID NO: 272998 - DNA, 916 bp, Unknown
  Bacterial polypeptide expressing nucleotide sequence isolated from the Sargasso Sea
aaagcaatagatagtttaatacctattggaagaggtcaaagagaacttattattggtgatagacaaactggaaagacagcagtcgcagtagacacaattataaatcaaaaagctataaacgagtctaacgatgagaagaaaaagctttattgtgtatatgttgcaattggtcaaaaaagatctaccgttgctcaaatcgttaaaacgttggaagatgcgggtgctatgaaatacacgacagtagtatcagctacggcctctgactcggctcctttacaatttttagcaccatatacaggatgtactattggggaatattttagagataatggaatgcatgctttaataatttatgatgatctttcaaaacaagctgtcgcataccgacaaatgtcattattattaagaagaccaccaggtagagaagcttacccaggagatgtattttatttacacagtagacttttggagagagcagctaaattaaatgaaaaaaatggtggcggctctttaactgcacttccaataatagaaacccaagcaggggatgtttctgcttatatccctacaaatgttatttcaataacggatggtcaaatatttttagaaactgagttatttaatcaagggataagaccagcagttaatgtaggtctatctgtttcgagagttggttcagcagctcaaacaaaagcaatgaaaaaagttgcaggttctattaagctagaacttgctcaatatcgtgaaatggctgcttttgcacaatttggatcagatttggatgtttcaactcaaaaacttttaaatagaggttccaaattaactgaattacttaagcaaaatcagtactctcctcttacagttgcagaacaagtaatatcaatctttactggtgtgagcggttatctcgataata

SEQ ID NO: 272999 - DNA, 898 bp, Unknown
  Bacterial polypeptide expressing nucleotide sequence isolated from the Sargasso Sea
gcggtagtagacgtaaaatttgatggtgaactaccagaaattttaacagcatgggaatgtaaaaacggtgataacagactagttttagaggtagcacaacacttaggtgaaactactgttagaacaattgctatggatgccactgaaggattaaaaagaggtgatgaagttaccaacacaaatgctcctattcaagttccggttgggcctgaaactcttggaagaattattaatgtaattggtgaaccaattgacgaaagaggcgaagttaaaactaaagaaagttggccaattcatagagctgcacctgaatttaatgaccaatcaacagaaactgaaatccttgtaacaggtattaaagtaattgatttgcttgcaccgtatgcaaaaggtggaaagatcggattatttggtggagcaggagtaggaaaaacagttttaattatggaattaattaataacgttgcaaaagctcatggtggtttttcagtttttgcaggagttggagagagaactagagaaggaaatgatctttatcatgaaatgatagaatctggagtaattaaaaaagaaggagccggttcaaaagctgctttagtttatggacagatgaatgaacctcctggagctagagcaagagttgcacttacagggttaactgtagctgaatactttagagatcaggaaggtcaggacgtacttttcttcgtagataatatttttagatttactcaggcaggatcagaggtttcagctttgttaggtagaattccatctgctgttggataccaaccgacattagctactgatatgggtaatctacaagaaagaattacgactacaaacaaagggtcaattacatctgtacaagctatttatgtacctgctgatgattaac

SEQ ID NO: 273000 - DNA, 823 bp, Unknown
  Bacterial polypeptide expressing nucleotide sequence isolated from the Sargasso Sea
tatggcttagataatgttcaagccggagaaatggttgagttcacagatggttctaaaggaatggctttaaatttagaaagtgagaatgttggggtagttatttttggggatgatagagcaattaaagaaggagacactgtcaaaagaactggtgcaatagtagatacacctgtaggaaaagaattattaggaagggttgtagatggtttaggaaatcccattgatggtaaaggagtattagataaaaaagttaaaagaagcagagttgaggtaaaagcaccaggaattattccacgtaaatctgttagtgagccaatgcaaactggattgaaatctatcgatagtttagttccaattggcagaggacagagagaattaattattggagacagacaaactggaaagacagcagttgcaatagatgcaattataaatcaaaagaaaataaacgaatcaaatgatgaaaagcaaaaattatattgtgtatacgttgcaatcggccaaaaaagatcaacagtaagacaaattgaaaaaactttagaagaagcgggagcaatggaatatactacaattgttgctgctacggcttctgatgcagccccactacaatttttagcaccatacacaggatgcgctatgggagaatattttagagataatggaatgcatgctttaattatttatgatgatctttcaaagcaagcagttgcgtatcgacaaatgtcacttttattgagaagacctcctggaagagaagcctatccaggagatgtattttatttacacagtagactgcttgaaagagcagctaaattgagtgatg

SEQ ID NO: 273001 - DNA, 850 bp, Unknown
  Bacterial polypeptide expressing nucleotide sequence isolated from the Sargasso Sea
ggatgcgtctgaagggttagttagaggtcaagaagttgtcgacacggatggtccaatttctgtccccgttggaaacgcaactcttgggagaattcttaacgtagttggcgagcctgttgatgagcagggtccggtaaaagccaaagagtccagagcgattcatcaaccagctcctgaatttagtgaacagtctactgagtctgaagtattggtaacgggcatcaaagtcatcgatcttctggcaccttactccaaaggtggaaaaattggtttatttggtggtgcaggcgttggtaagacagttttaattatggaattgattaataatattgcaaaagttcattctgggttttcagtttttgctggtgttggcgaacgaacccgtgaaggtaacgatttgtatcatgagatgatagagtccaatgttatcaagccagataatctggaagaatctcaagttgctctagtgtatggccaaatgaatgagcctccaggtgcacgagcgcgagttgctttgacaggtttaactttggcagagcaatttcgagaccagtctggcacagatgtgctttttttcgtggacaacatattccgctttactcaggcaggctcagaagtttcggctcttcttggccgtattccatcagctgtgggttatcagccaacccttgcaactgatatggggtcgatgcaggaacggattacttctactaagaatggttccattacttcaattcaggcggtttatgttccagcagacgatttaactgatccagctccagctacgacgtttgctcacttggatgctacaactgtgttatcgcgagcgatttcagaattagggatctat

SEQ ID NO: 273002 - DNA, 577 bp, Unknown
  Bacterial polypeptide expressing nucleotide sequence isolated from the Sargasso Sea
tatgagcaagggaataattacacaagttattggagcagtagtagatgtaaaatttgaaggcgagttgccagaaatattaacagctctagaatgtaaaaatggtaataacagacttgtactagaggttgctcaacatttaggagagtctacagcgagaacaatcgctatggatgcaactgaaggattaaaaagaggtgatgaggtaattaatacaaaagctccaataaaagttcccgttggtcctgaaacacttggaagaattattaatgtaattggagaaccaatcgatgaaagaggagaagttaagaccaaagaaagttggcctatccatagagcagcgccagagtttaacgaccaatccactgaaactgaaattcttgtgacaggtattaaagtaattgatttgttagctccttatgcaaaaggtggaaaaattggtttgtttggtggtgctggagttgggaaaacagttttaattatggaattaattaataacgttgcaaaagcccatggtggattttctatttttgctggagttggtgaaagaacaagagaaggaaacgatttatatcacgaa

SEQ ID NO: 273003 - DNA, 871 bp, Unknown
  Bacterial polypeptide expressing nucleotide sequence isolated from the Sargasso Sea
aaaaattttaaaagagcaaataaaaaaattggagagaaagcagaagtgtcggaggtgggacaggtgctttcagttggagacggtatagcaagagtatatggtttagacaacgtacaggctggagagatggtcgagttcactggtggacttaaaggaatggctttaaatttagaaaatgacaatgttggtgtagttatatttggtgacgatagaacaattaaagaaggagacgttgttaaacgaactggagcaattgtagatgctcctgtaggcaaaactttgttggggagagtagttgatgctttaggaaatcctatagatggaaaaggtgagctagataaaaaaattgaaagaaaaagagtagatgtaaaggcaccaggaataattccaaggcaatctgtgaatcagcctatgcaaacaggacttaaagctattgatagtttaattccaattggaagaggacaaagagaattaattataggtgacagacaaacaggaaaaactgcagtagcaattgatacgattattaatcaaaaagaaataaataaatctgcagaagaaaaagataaactttattgcatttatgttgcgattgggcaaaaaagatccacggttgcgcaaattttaaaatcactagaagatgcaggtgctatggaatacaccactattgtttcagcaacagcatcagatccagcaccacttcaatttttggctccctataccggatgcacaatgggagaatattttagagataatggtatgcatgcattaataatctatgatgatctatctaaacaagcagtcgcttatagacaaatgtcactattattaaggagaccacccggaagagaagcttatcctggagatgtat

SEQ ID NO: 273004 - DNA, 463 bp, Unknown
  Bacterial polypeptide expressing nucleotide sequence isolated from the Sargasso Sea
atgaataataatggaaaaattacacaaattataggagcagtcgttgatgtaaattttagtgctaatttacctgaaatttacactgctcttgaagttaacaattcgggaaacaaacttattttagaggtagcacagcacttaggtgaaaatgatgttcgaacaatcgcaatggatgccacagagggattaaaaagaggtgatatcgttactaacacgggggcaccaataagtgttccagttggtccagaaacacttggaagaatcataaatgttgttggagattctattgacgaaaaaggtgaagttaaaactaaagagaaatggcctattcatcgagcagcccctaagtttactgatcaagcaacagagactgaacaattagttacaggaataaaagtaatcgatcttttagccccatacgcaaaaggtggtaaaattggtttattggaggtgcaggagtaga

SEQ ID NO: 273005 - DNA, 881 bp, Unknown
  Bacterial polypeptide expressing nucleotide sequence isolated from the Sargasso Sea
agtttttgccggagtaggtgaacgaactagagaaggaaatgacctttatcatgagatgatggactctggagtaataaaaaaagatggtcctggatctaaagctgccctagtttatggacaaatgaacgaacccccaggagcaagagcaagagttgcgcttacaggtttaacggtcgctgaatatttcagagatcaagagggccaagatgttcttttctttgttgataacatatttagatttactcaagcaggctcagaggtttcagcactattgggaagaattccatctgcagttggttatcaaccaacattagctacagacatgggtaatttacaggaaagaataactacaacaaataaaggttcaattacatcagttcaagcaatttatgttccagctgacgacttaactgatccagctccagcaacttcatttgcacacttggatgcaacaaccgttctttcaagacaaattgctgaaattggtatttatccagcggttgatccactagactctacgtccagaattttggatccaagagttgtgggagatgagcactacaaggttgcaagagatgtccaaaaaatattacaatcttataaatcacttcaagatattattgcaattctaggtatggatgaattatccgaagaagataagttagtcgttgccagagctagaaaaatccaaagatttttatctcaaccattttttgtagctgaagtttttaccggctcacctggaaaattagtagatttagagtcaaccatcaaaggttttgatgcaatttgcaaaggtgaatacgatcatttaccagaagcagcattttatatggtgggtaccattgaggaaagcattgataaagctaagaaaatggaaa

SEQ ID NO: 273006 - DNA, 906 bp, Unknown
  Bacterial polypeptide expressing nucleotide sequence isolated from the Sargasso Sea
agcacatggaggattttcagtatttgctggtgtggagaaaggactagagaaggaaatgatctttaccatgagatgatagaatctggagttataaaaccagaaggttctggatcaaaagctgcattagtatatggtcaaatgaatgaaccgcctggagcaagagctagagttgcattatcaggtttaacagttgcagaatattttagagatcaagaaggacaagatgtactttttttcgtagataatatttttagatttacccaagccggatcagaggtttccgcactgttagggagaattccatctgcggttggatatcaaccaaccttagcaactgatatgggaaaccttcaagaaagaattactaccacaaacaaagggtctattacgtctgttcaagcaatatatgtaccagctgatgacttaactgatcctgcgcccgctacatcattttctcacttagatgcaacaacagttttatctagacaaatagctgaaattggaatttatccagctgtagatcctttagactctacatctagaattttagatcctagaatcgttggcgatgaacattacagagtagcgagagaagttcaaaaagttttacaaacatataaatctttacaagatattattgcaattttaggtatggatgaattatcagaagaagataaactaattgttgctagagcaagaaaaattcaaagatttttatctcaaccattttttgtagcagaagtgtttacaggatctccaggaaaattagtagatttagagtcaacaattaaaggttttgatgctatttgtaagggagaatatgatcatttacctgaagcagctttttatatggttggcacaatagaagaagctatagaaaaagctgagaaaatggcaaaggatgca

SEQ ID NO: 273007 - DNA, 721 bp, Unknown
  Bacterial polypeptide expressing nucleotide sequence isolated from the Sargasso Sea
ggcagagtattttagagatgaggaaggtcaggatgttttattttttgtagataatatttttagatttactcaagctggatcagaagtttcagctttattaggaagaattccatcagcggttggctatcaacctactcttgcaacggatatgggtgctttacaagaaagaataacctcaactaataaaggatccattacctctgttcaggctatttatgttcctgcggatgacttaactgatcctgctccagcaacatcttttagtcatcttgatgccacaacggttttatcaagacaaatagcagagctaggcatttacccagctgtcgacccattagactcaacttccagaatacttgatcctagagttttaggcgaagaacattatgatgtagctagagaggttcaaaaaatattacaaacctataaatctctgcaggatatcattgctatattaggtatggatgagttatctgaggaagacaagttaacagtatctagagctagaaaaattcaaagatttctgtctcaaccatttcatgttgcagaagtttttacaggttttcctggaaagtttgtagaaatagctgatactatcaaaggatttaaagatttatgttcaggtaaatatgatgatatacctgaggctgctttttatatggtgggcactatggatgaggctctggaaaaagctaaaaagatggctaaagagaatgtttaa

SEQ ID NO: 273008 - DNA, 916 bp, Unknown
  Bacterial polypeptide expressing nucleotide sequence isolated from the Sargasso Sea
aaaagcacacggtggttattccgtttttgctggtgttgcgaaagaactcgtgaaggtaatgatttataccacgaaatgatcgaatcaggcattattgatcttaaaggtaaagactctaaagttgccctcgtatatggtcaaatgaatgagcctcctggagcaagagcaagagtggcactatctggtttaacacaggcagaatatttcagagatgaagaaggacaagatgtgttattcttcgttgataatatttttagatttacgcaagcaggatctgaggtttcggcccttctaggacgtatcccatctgccgttggttatcagccaacacttgcaactgatatgggtgcattacaagagcgtatcacaactactaaaaaaggatctattacatcagttcaggcgatttatgttccagcggatgacttaacagaccctgctcctgcaacatctttctctcacttagacgcaacgacggttttgaatagagcaatttctgagaaaggtatttatcctgcagttgatccacttgactcaacatcaagaattctagacccacaagttgtgggtgatgatcactatagagttgcaagggaagtgcaaagagttcttcagacttataaaagtctgcaagacattattgcaattttaggtatggatgaattatcagaagaagataaactcaccgttgcaagagcaagaaaaattgagaaatttttaagtcaacctttctttgttgcagaggtatttacaggttcccctggaaaatatgtagaccttgaagacacaataaagagctttgatggtttagtaaaaggtgagtatgatcacatgccagaagcagcattttatatggttggtggcattgatgaggcaatagaaaaggctaaaaaattagaggctgaagcggcataat

SEQ ID NO: 273009 - DNA, 956 bp, Unknown
  Bacterial polypeptide expressing nucleotide sequence isolated from the Sargasso Sea
agcaccttatgcaagaggtggtaaaattggattatttggtggagctggagttggtaagacggttttaattatggaattaattaacaacattgcaaaggcacacggaggatattcggtatttgctggagtcggagaaagaactcgtgaaggtaatgatttgtaccacgaaatgattgaatcaggaattattgatctcaagggtaaagattcaaaagttgctcttgtttatggtcaaatgaatgaaccaccaggagcaagagctagagtggccttatctggtttaactcaagcagaatactttagagatgaagaaggtcaggacgtattattctttgtagataatatttttagatttactcaagcaggttctgaagtatccgctcttctaggacgtatcccatctgctgttggatatcaaccaacactcgcaactgatatgggcgctttgcaagaacggataacaactacaaaaaaaggttctattacgtcagtgcaagcaatatatgttcctgcagatgacttaactgatcctgcacctgcaacatctttttcacatttagatgcaacaacagttttaaatagagctatttctgaaaaaggaatatatcctgcagttgaccctttagattctacatctagaattttagatccacaagttgttggtgatgatcattacagagtagctagagaagttcagagagttttgcaaacatacaagagtcttcaggatattattgctattcttggaatggatgagctttctgaagaagataaactaacagttgcgcgtgcaagaaaaatagaaaagtttttaagccaaccattttttgttgcagaagtttttactggctctcctggtaaatatgtagatcttgaagatacgataaaaagttttgatggtctagtaaaaggtgaatatgaccatatgcctgaagctgctttttatatggtcggtg

SEQ ID NO: 273010 - DNA, 583 bp, Unknown
  Bacterial polypeptide expressing nucleotide sequence isolated from the Sargasso Sea
tggaggttctcttactgcgctgcccattattgaaacccaggagggtgatgtttcagcctacattccaacaaatgtaatttcaattactgatgggcagatatatcttgagactaacctttttaattcaggaataagacccgcaatcgatgttggcctatctgtttccagagtaggtggtaatgcccaaatcaaggcaatgaaatctgttgctggaactttgcgtttagacttagctcagtacagagagctagaggcatttgcaaaatttggttctgatttagataaggcgacactttcccagctaacaaggggcgagaggatggtagagatactaaaacaaaatcaatatgttccgatggatgttgaaaagcaaattgccatcatttttgctgcctccaaggggcagctagatgatttggatattgaagaaatatctgattttgagactggcttatttgaatatcttgatgcaaatgcatcagaaagtcttgcttcaatagtaaacgaaggaactatatcggaaaacactggagagaagcttgaaaaagcaatctcagatttcaaggcaggatttaaagcttag

SEQ ID NO: 273011 - DNA, 538 bp, Unknown
  Bacterial polypeptide expressing nucleotide sequence isolated from the Sargasso Sea
gatgtatctgcttttgttccaactaatgtaatttcaattactgacggacagatatttttagaaacagatctttttaattcaggcgttagaccagctattgacccaggactttctgtatcaagagttggtggagctgcacaaactaagataattaaaaaacttagtggaggaattagaactgaccttgctcagtacagagagcttgcggcattctcacagtttgcatctgatctagatgacgcaacaaaagaacaactagaacacggtaagcgaattacagagcttcttaaacaaaaacaatattctccaatgagtgttgctgatcaagctatgagtttatatgcagctgataaaggatatatgaaagatgttgatatagataaagtgggtgacttcgaatcagctttattagcctattttgaatcagaaaaatctgatctaaaaaagcaaattaatgataccggagactgggatgacgatattgaaaaccagtttaaggaattagttgaagactttaagaaaacacaaacatattaaa

SEQ ID NO: 273012 - DNA, 871 bp, Unknown
  Bacterial polypeptide expressing nucleotide sequence isolated from the Sargasso Sea
tgttagaggacaaaagctgcctatcttcagcgctgctggtcttcctcacaacgacattgcacttcagattgctaggcaagcaaagttggttggcagtgacgatgatttcgtcgtagttttctgtgctatgggtatcacagcggaggaatacaatttcttcgtccacgaccttgagcgaacaggtgcattggaaaattcagctctgttcgtcaacttagccgacgacccagcagttgagcgcctgattacaccacgtctagcattgactgctgctgagtatcttgctttcgagcacgattatcacgtactagttatctacacagacatgacaaactactgtgagtctttgagacaaatcggtgccgcccgtgaagaagttcctggacgacgcggttacccaggatacatgtacactgacttggcaatgctctacgagcgtgcaggtctggtcaagggcaagaaaggaagtatcacacaattcccaattttaactatgccaggtgacgatattacccacccaatccctgacctttcaggatatattacagagggtcaaattgttatttcccgtgaattacaccagaagggtatctatccaccaattaacgttctaccttcgctaagccgactaatgaacgccggtattggtgatggtaagactcgtgaagaccacaagtcggtatctgaccagttgtacgctgcttacgctcaaggtagggaattgcgagggctagttgcgattgtcggtgaagacgcattgaatgagcgtgatcttcagttactgaagttcgctgatatattcgaaaatgagttcttgcgacagagtcgtgacgaagaccgatcaatcggtgaaggtacactcgatcttgct

SEQ ID NO: 273013 - DNA, 450 bp, Unknown
  Bacterial polypeptide expressing nucleotide sequence isolated from the Sargasso Sea
aatggtagcaactccatcaacttcttcacaaactaaaggcgtagtacgtcaggtaattggtccagttctagatgtggaatttccagccggaaaattgcccaaaatattaaatgctttaagaattgaagctaaaaatccagctgggcaagacatagcgctcactgcagaagtccaacagctcctaggtgaccatagagttagagcagtggcaatgagcggcacagacggccttgtaagaggtatggaggcaatcgacacaggagcgccaatatctgtacccgtaggagaagcaactttaggaagaatatttaatgttttaggagaaccagtagatgaacaaggtccagtaaatactaaagatactgctccaattcatagatctgccccaaagttaactgacctagaaactaagccaaaagtttttgaaactggtattaaaagtatcgaccc

SEQ ID NO: 273014 - DNA, 652 bp, Unknown
  Bacterial polypeptide expressing nucleotide sequence isolated from the Sargasso Sea
tatccaggagatgtattttatcttcacagtagattgcttgaaagggcagctaaactaagtgatgaacatgggggaggttctttaactgcgcttccaatcatcgagacacaaggtggagatgtatctgcttatattccaactaatgtcatatcaattactgatggacaaatttttttagaaactgaattatttaatcaaggtattagacctgcaattaacgttggattatcagtatctcgcgttggctctgcggctcaaacgaaagcgatgaaaaaagtgtctgggtcaatgaaactagaattagcacaatatagagaaatggcagcttttgctcaatttggttctgatttagatgcctcaacacaacaacttttaaataggggatcaaaattaacagaacttttaaaacaaaaacaatattctccaatgacagtagcggaacaagttatttcagtattttgtggagttaaaggttatcttgatgatattgatttaaaaaatattgctgaattcgagaacaaaataattgaaagatgcaaatctgataaaccagagattatcgagtcaattttaggttctggaaaactagaggaagaatctgaaaaaaatttaatcgacgtgataacaaatcttaaaaaaactatcaaataat

SEQ ID NO: 273015 - DNA, 859 bp, Unknown
  Bacterial polypeptide expressing nucleotide sequence isolated from the Sargasso Sea
gctccgccaagctatgaagatcaggcagaatcatctgagattttagaaacaggaataaaagttattgatctaatgtgcccgtttgctaaaggaggtaaagtcggattgttcgggggtgccggggtaggaaagacagtcaatatgatggagctaatcagaaacatcgcttacgaaacaagcggttattctgtttttgccggtgtcggtgagaggacaagagaaggaaatgacttttatctagaaatgaccgaatcacaagtattggataaggttgctttggtttatggacaaatgaacgaacctcctggatgcagaatgagggtggctttatcaggactaaccattgccgagaaattcagagatgagggtaaagatgtactcttattcgttgataatatttatagatatactttggctggtgtggaatgttcatcgcttcttggaagaatgccatccgcagtgggctatcagccaacgcttgctgaagaaatgggagttcttcaagaaagaattacatcaactaagacgggttcaatcacatcagtgcaggcaatatatgttcctgcagatgatctaaccgatccatcaccggcaacgacgttcgctcacctcgatgcaacagtagtactttcaagacaaattgcgtctcttggtatctatccggcagttgatccgcttgactctaccagcagacagcttgatccagccattgttggtcaagagcattacgatgttgcaaaaggagttcaacaagttcttcaaagatatttagagctaaaagatatcatcgccattttgggtatggatgagctttcggacgaagacaagcagacagttaacagagcaagaagaatcgaga

SEQ ID NO: 273016 - DNA, 888 bp, Unknown
  Bacterial polypeptide expressing nucleotide sequence isolated from the Sargasso Sea
tatggagttaattaataatatagcaaaagcccatgggggcttttcggtttttgcaggtgttggagaaagaactagagagggtaacgatctttaccatgaaatgatagagtctggtgttattaaaacagagggtaaaggatctaaagcagcattagtttatggacaaatgaacgagcccccaggagcaagagcacgagtagctctaacgggattaactgtagccgaatattttagggataaagagggacaagatgtacttttctttgttgataatatatttagatttactcaggcaggatcagaagtttcagctctattgggtagaattccttcggctgtaggttatcaaccaactctggcaacagatatgggtaatttgcaagaaaggattacttcaacagataaaggatcaattacatcagtacaagcaatttacgtacctgctgatgatttaaccgatcctgcgcctgcaacgtctttttcacacttagacgcgactacagtactatcgagacaaattgcagaaatcggtatttatcctgctgttgacccattagactctacttctagaattttagatccaagaatagtaggagaggaacattacagggtagctagagacgttcaaagaattttacaagcatacaaatctcttcaggacataatagcaatacttggtatggatgaactttctgaagaagacaaattgacagttgcaagagctagaaaaatacaaagatttttatcgcaaccctttttcgttgccgaggtatttacaggctcccctggcaaattagtggatttagactctacaataaaaggatttgatgcaatttgtaaaagtgagtacgatcatttacctgaagcagcattttatatggttggcgg

SEQ ID NO: 273017 - DNA, 736 bp, Unknown
  Bacterial polypeptide expressing nucleotide sequence isolated from the Sargasso Sea
catggatattagtgctgctgaaatttcaaaaattttaaaagagcaaatttctgactatggaagcaaagcttctgtttccgaagttggaaaggttttaagtataggagacggaatagcaagagtttatggtcttgacgaggttcaactcggtgaaatggttgaatttgacggtggtgttaaaggaatggcactgaatcttgaatcagataatgttggtgtggttatcttcggggacgatagatcaatcaaagaaggggatacagttaaaagaacaaagtctatcgttgatgttcaagttggaaaagaattacttggcagagtagttgatggattaggaaatcctattgatggcaaagggcctattcctaaaagtgctaaacgtacaagagtagaggttaaagccccaggtatcatgcctagaaaatcagttcatgagccaatgatgactggactcaaagctattgatacattggttcctgttggtagaggccaaagagagctaatcattggtgatagacaaatcggtaaaacagcaattgctctagatacttttattaatcaaaaagaaaccaatgaagctgcaggaaaagatgatagtaagaagttattttgtatttatgttgcaataggacaaaagcgttcatctgttgctcaaattgttaagacactagaagaatacggtgcaatggactatacaattgttgtagctgcaacagcatctgagtcagcgccaatg

SEQ ID NO: 273018 - DNA, 208 bp, Unknown
  Bacterial polypeptide expressing nucleotide sequence isolated from the Sargasso Sea
caagggtactaaagctgccttagtatacggtcaaatgaacgagcctcctggagcaagggcaagagtaggtttaacaggattaacagtagcagaatactttagagataaagaaggacaagacgtactattttttgtagataatatttttagatttactcaagcaggctcagaagtttcagcactattaggaagaataccatctgcagtt

SEQ ID NO: 273019 - DNA, 400 bp, Unknown
  Bacterial polypeptide expressing nucleotide sequence isolated from the Sargasso Sea
atggctgctgctgctaccgccggtaccaagggtgttgtccgtcaggtcatcggtccggttttggacgtggaattccccgctggcaagctgcccaaaatcctgaatgcgattcggattgaaggcaagaacaccgcaggtgaacaggttgctctcaccgcagaagttcagcaactgcttggtgaccaccgcgtccgcgccgtggccatgagcggtactgatggtctggtgcgtggcatggatgccattgacaccggtgctgccatttccgtgcctgttggcgaggccaccctggggcgaatcttcaacgtgctcggtgagcctgttgatgagcaaggccctgtcaacaccaccaccacagcccctattcaccgtgacgctcccaagctcaccgagcttgaga

SEQ ID NO: 273020 - DNA, 763 bp, Unknown
  Bacterial polypeptide expressing nucleotide sequence isolated from the Sargasso Sea
gtttttgcaggagtaggtgaaagaactagagaaggaaacgacctttatcatgagatgatggactctggagtaataaaaaaagatggtcctggatctaaagctgcactagtttatggacagatgaacgagcctccaggagcaagagcaagagttgcgcttacaggcttaactgttgctgagtatttcagagaccaagaaggtcaagatgttcttttctttgttgataacatttttaggtttactcaagctggttcagaggtttcagcactattaggaagaattccgtctgcagttggctatcaaccaacactagctacagatatgggaaatctacaagaaagaattacaacaacaaacaagggttcaattacatcagttcaagcaatatatgtaccagctgatgacttaactgatccagctccagcaacttcattcgcacacttggatgcaacaactgtgctttcaagacagatagctgaaattggtatttatccagctgttgatccattagattctacctccagaattttggacccaagagttgtgggagacgaacactacaaggtagcaagagatgtccaaaaaatattacaatcttataagtcacttcaagatattattgcaattcttggtatggatgaattatctgaagaggataaattagtagttgctagagccagaaaaattcaaagatttttatctcaaccattttttgtagctgaagtttttactggttcacctggaaaattagttgatttagaat

SEQ ID NO: 273021 - DNA, 451 bp, Unknown
  Bacterial polypeptide expressing nucleotide sequence isolated from the Sargasso Sea
tatgaataaaaaaggaaaaataacacaaattataggagcagtcgtagacgtaaactttgataccgatcttcctgaaatttatacagctcttgaggctaataattcaggaaacaaattaatattggaggttgcccaacatcttggagaaaatgatgtaagaacaatagcaatggatgcaactgagggattaaaaagaggagatgaggtgattaacactggatctccaatcagtgtaccagtgggaccagaaactttaggcagaattataaatgtagtaggagagtctatcgacgaaaaaggcgatgtaaaaactaaagaaaaatggcctatacacagatcagctccaaagtttacagaccaagcaactgaaacagagcaattagtaacaggaattaaagttgttgatttattagctccatatgcaaaaggtgggaaaaattggattatttgg

SEQ ID NO: 273022 - DNA, 781 bp, Unknown
  Bacterial polypeptide expressing nucleotide sequence isolated from the Sargasso Sea
caaatgaatgagcctccaggagctagagctagagttgctcttacaggattaacagttgcagaatattttagagatcaagaaggtcaagatgttctttttttcgtagataatatttttagatttactcaagctggatcagaggtatcagctcttttaggcagaataccttcagctgttggatatcagcctacattagctactgatatgggaaatttacaggaaagaattactacaacaaataagggttcaattacatcagttcaagcaatttatgtacctgcagatgacttaactgatccagctccagcgacttcgtttgctcacttggatgctacaactgttctttcaagacaaatagctgaaattggtatatatccagcagtagatccactagactcaacatcaagaatccttgatcctagaatagttggagatgaacattacagagttgctcgtgaagtacaaaaaattttacaaacttataaatctttacaagacattatagcaattttaggtatggatgaattgtctgaggaagataaattagtagtagcaagagcaagaaaaattcaaaggttcttatctcagccttttttcgttgctgaagtgtttactggatcaccaggaaaacttgttgatttggaatcaaccattaaaggttttgatgcaatctgtaaaggtgagtatgaccatcttcctgaagctgctttttatatggttggtacaatagaagaggccatagaaaaaggagaaaaaatagctaaagacgctgcagcataat

SEQ ID NO: 273023 - DNA, 895 bp, Unknown
  Bacterial polypeptide expressing nucleotide sequence isolated from the Sargasso Sea
ggattatttggtggtgctggagtcggaaaaacagtaacgatcatggaattaatcaataacatcgcgaaagcacacggaggattttcagtttttgcaggtgtcggtgaaagaacaagagaaggaaatgatttgtatcatgaaatgattgagtcaggagtaattaaaaccgatggcaaaggatcaaaagcagcacttgtttatggacagatgaatgaacctccaggagcaagagcaagagttgctttaaccggtctgacagttgccgaatattttagagataaagaaggtcaggacgtattattctttgtcgataatatatttagattcactcaagctggttcagaagtatcagctctattaggaagaattccttcagccgttggatatcaaccaactcttgctacagatatgggtaacttgcaagaaagaattacttctacggacaaaggatctattacttcagtgcaggctatttatgtacctgctgatgacttaaccgatccggcaccagccacatctttctcacacttagatgcaacaacagtattatcaagacaaatcgcagaaataggaatttatcctgctgtagaccccttagactcaacttcaagaatcttagatccaagggtagtaggtgaagaacattatagagtagcaagagatgttcaaaaaattttacaagcgtacaaatctcttcaagatatcattgctattttaggaatggatgaactatcagaggaggataaattaaccgttgcaagagcaagaaaaatacaaagatttttatctcaaccattttttgttgctgaagtatttacaggttcccctggaaaattagtagacttaaacgatacgataaaaggttttgacgctatatgtaagggagaatacgatc

SEQ ID NO: 273024 - DNA, 529 bp, Unknown
  Bacterial polypeptide expressing nucleotide sequence isolated from the Sargasso Sea
atgagcggactaaacccatctgaaatttcaagtgttctcaaggacaaaatttcagggcttgatctaaaggctgaaaccaaaaacgaaggaaccatcgtcaatgtttccgatggaattatcagaatacacggaatgggcgatgttatgtatggtgagcttgtagagtttgaaaatggtgtctttggacttgcacttaacttagagcaagactctgttggagttgttgtgttgggtgattaccttgggataagtgaaggacaaaaagttacatgcacaggtaagatcttagaggttcccgtcggcgaggaaatgcttggtcgagttgttgatgctttaggaagcccaatcgatggaaagggcgaacttaaaacaaaacaaactgctcctattgaagtagttgcgccaggagttattgccaggcaatcagttgatcaaccagtgcaaattgggcttaaatcaatcgatgcaatggttccaataggaagaggccaaagagagctcattattggtgacagacaaactggaaaaa

SEQ ID NO: 273025 - DNA, 748 bp, Unknown
  Bacterial polypeptide expressing nucleotide sequence isolated from the Sargasso Sea
caagcagttgcttacagagagatatcactattgcttagaaggcctccaggtagagaagctttccctggagatgttttttatcttcactcaagacttttagagagagcagctagagtgaatgcggaatacgtagaaaaaattacggaaggaaaggtaaaaggtaaaacaggatctctaacagccttgccaattattgaaacacaagccggagatgtatctgcttttgttccaactaatgtaatttcaattaccgacgggcagatatttttagaaacagatctttttaattcaggcgttagaccagctattgatccagggctttctgtatcaagagttggtggagccgcacaaactaaaataattaaaaagcttagtggtggaattagaacagaccttgctcaatacagagagcttgcggcattctcacagtttgcatctgatctagatgacgctacaaaagaacaattagaacacggtaaacgaattactgagcttctaaaacaaaaacaatactctccaatgagtgttgctgaccaagctatgagcttatatgcagctgacaaaggctatatgaaggatgttgatatagataaagtgggcgacttcgaatcagctttattagcttattttgaatcagaaaaatctgatctaaaaaagcaaatcaacgatactggagactgggatgacgatattgaaaaccagtttaaagaattagttgaagactttaagaaaacacaaacatattaag

SEQ ID NO: 273026 - DNA, 733 bp, Unknown
  Bacterial polypeptide expressing nucleotide sequence isolated from the Sargasso Sea
tctgtcagtcgccgcccgtcagttctccacctcccagaaggttgatgccgccaaggccggagctggggagatctcctccatcctcgaggagagagtcctgggcgccgcccccgccgtcaatctggaggagaccggccgcgtcctgtccattggagacggtatcgcccgtgtctatggcctcaagaatatccaggcagaggaaatggtggaatttagctctggattgaaaggcatggccctcaacttggagcccgacaacgttggtgttgtcgttttcggtaatgacaagctcatcaaggagggagacattgtcaagagaactggagcaattgtggatgttcccgttggtaacgagatccttggacgtgttgtggatgccctgggtaaccccattgacggcaagggccccatcggctgcaaggagaggtacagggttggactcaaggcccctggcatcatccccaggcagtctgtcaaggagcctatgcagacaggtatcaaggctgtggacagcctggtgcccattggtcgtggccagcgtgagctgatcattggagacagacagactggcaagactgctgttgccattgacaccatcatcaaccagaagaggttcaacgatgccggagatgccaagaagaagctttactgcatctacgtcgctgttggccagaagagatccaccgtggcccagattgtgaagaggctcactgatgctgatgccatgaagtaa

SEQ ID NO: 273027 - DNA, 414 bp, Unknown
  Bacterial polypeptide expressing nucleotide sequence isolated from the Sargasso Sea
tatgagaaaaggacaaattacacagatcattggagcggtagttgatgtaaaatttgaaggagaactaccagaaattttaactgcactagagtgtgataatggcggaaatagattagttttagaggtcgcacaacatctaggagagtcaagtgttagaacaattgcaatggatgcaacggaaggtcttaaaaggggtgatgaagtaattgatacggcagctccaattaaagtaccagtgggaccagagacactcggaagaattataaatgtaataggtgaacctattgatgaaagaggtgaagttaaaagctcagataactggccaatacatagagctgctccggaatttaacgatcaatctaccgaaactgagatactagttacaggaattaaagttattgatcttttagcacc

SEQ ID NO: 273028 - DNA, 667 bp, Unknown
  Bacterial polypeptide expressing nucleotide sequence isolated from the Sargasso Sea
atggaaataaatccttcagaagtaacaaaaatattaaaagaacaaataaataaatttggagataaagctgaaatttcagaagttgggcaagttctttcggtgggagatggtattgcaaggatatatggtttagacaatgtccaggctggtgaaatggtcgaattttcagatggatctaaaggtatggctttaaacttagaaagcgataatgttggtgttgttatttttggagaagatagatctataaaagaaggagacactgtaaaaagaactggtgcaattgtagatacgcccgtgggtaaggaattattaggaagagtggttgacggtcttggaaatcctatagatggcaaaggtgctttagacaaaggtgttaaaagaagtagagttgaagtaaaagctcctggaattattccacgtaaatcagttagcgaaccaatgcaaacagggcttaaatctattgatagtcttgttccaattggaagaggccaaagagaattaattataggagatagacaaactggaaaaaccgcagttgctatagatgcaattattaaccaaaaaaaaattaacgagtctggtgatgagaagcaaaaattatattgtgtttatgttgcaattggtcagaaaagatcaacagtgagacaaattgaaaaaactttagaag

SEQ ID NO: 273029 - DNA, 392 bp, Unknown
  Bacterial polypeptide expressing nucleotide sequence isolated from the Sargasso Sea
ttacccagcggtagacccattagactcaacaagtagacagctagaccctcttgtagttggagaagagcattataatgttgcccaaggtgttcaaggcgtattacaaaaatataaagaacttaaagacattattgctattttgggtatggatgagctgtctgaagaagataagctagcagttgcaagagcaagaaaagttgaaagattcctttctcaaccctttactgttgcagaggtttttactggttccccaggtaaatatgtaaaattagaagataccattaagtcatttaaaggcatccttgctggagattatgatgatcttccagagcaagccttttatatggttggaacaattgaagaagctgtagaaaaagcaaaaaccttataat

SEQ ID NO: 273030 - DNA, 592 bp, Unknown
  Bacterial polypeptide expressing nucleotide sequence isolated from the Sargasso Sea
acttacagctctccctgttatagaaactcaagctggagatgtgtcagcttatattccaacaaatgtaatttcaattacagacggtcaaatttttttagaaacagaattattttttaaaggtatcagacccgccgtaaatgtaggtttatctgttagtagggttgggtctgctgctcaaattaaagcaatgaaacaagtttcaggatcaatcaagcttgacctcgcacagtttagagaaatggaatcgttctcacaatttgcttcagatttagatcaatcaacaagaaaccttctcgatagaggaagaaggttgacagaaatattaaagcaacctcaatattatcctctgaaggttgaagaacaagttgtaataatttttgctggtgttaaaggtcatttagacaatattgaaattaaaaatgtaacctcttttgaagaggtgttattgaaagaaattagaagctcaggaaaaaatattttacaaaaaatttcaactgaacaatctatttctgaagagttagaaaaggagataaatctatttatcgaaaatttaaaaaaaaaatttcttggagaaaatgatgccaagtcttaa

SEQ ID NO: 273031 - DNA, 825 bp, Unknown
  Bacterial polypeptide expressing nucleotide sequence isolated from the Sargasso Sea
cgttgagttcgataaagcccaaattccgaatatctatgatgccttggttgttaatgaaaacaatcttgttcttgaaacacaacaacaattaggtgatggagttgtcagaactgttgccatgggaaccactgaaggattaaaaagagggctagatgttgaaaacaccaaagcaccaataagcgtccctgttggcgaagcaactctaggaagaataatgaatgtattgggcgatccaattgatatgaaaggcgaagtcaagacaaaagaaagaatgcctatacacagaaagccacctgaatatgtagatttgtcagattcaaatgaaattctagaaacaggcattaaggttatcgatctagtttgtccatttgccaaaggcggaaaagttggattatttggcggtgctggcgttggaaaaacagtcaacatgatggagctgattagaaatatagcgattgagcattcaggctactcagtttttgccggcgttggagaaagaaccagagagggaaatgacttttaccatgaaatgacagattcaaatgttttagacaaagtttctcttgtttatggtcagatgaatgagcctccaggaaatagacttagagttgctttaactggcttaaccatggctgaaaaatttagagatgaaggaagagatgttctgctttttgtagacaacatctatagatatactttggctggggttgaagtatctgcattattagggagaatgccttcagctgttggatatcaacctacgcttgcagaagaaatgggagtgcttcaagaaagaattacatctacaaaaacaggctcaattac

SEQ ID NO: 273032 - DNA, 703 bp, Unknown
  Bacterial polypeptide expressing nucleotide sequence isolated from the Sargasso Sea
atgaaaaaaggaaaaattacacaaattattggagctgtagtagatgtaaaatttgatggtgagctaccagaaattttaacagcactagaatgtaaaaatggtgaaaatagattagtcttagaagttgctcagcatttgggagagaccagtgttagaacaattgctatggatgctacagagggattaaaaagaggagacgatgtaactgatacaggagcacctataaaggttccagttggcccagaaacgttaggaagaattgtaaatgtaattggcgaacctattgatgaaaagggtgaagttaaaacaaaagaaagttggcctatccatagagcagcaccagaatttaacgatcaatcaactgaaacagaaattttggtaacaggaataaaagtagtagatttattggctccttacgcaaagggtggtaaaataggtttgtttggtggtgctggagtaggtaagacagtattaattatggaattaattaataacgttgcaaaagcgcacggaggattttcagtttttgcaggagtaggagaaagaactagggaaggtaatgacctatatcacgaaatgattgagtcaggcgttattaagccagacggtgaaggttctaaagctgcattagtttatggtcaaatgaatgaaccacctggtgcaagagccagagtagcattatcgggtttaacagtagctgaat

SEQ ID NO: 273033 - DNA, 928 bp, Unknown
  Bacterial polypeptide expressing nucleotide sequence isolated from the Sargasso Sea
aatggttcaattttctgatggatcgaaaggtatggcattaaacttggaaagtgataacgttggtgttgtaatttttggggatgataggcaaattaaagagggagatgaagtaaaaagaacaaaatcaatcgtcgatgtccctgtaggtaaagagttgctcggaagagtcgttgacggattaggaaatccaatagatggcaaaggcaatcttccaaaaaatatcaaaagaaacagggtagaagtcaaagcaccaggaataattccaagacaatcagttaatgaacctatgcaaacaggtttaaaagcgattgatagcttaataccaattggaaggggtcagagagaattaatcatcggagatagacaaactggaaagacagctgtagcggttgatacaataataaaccaaaaagaggtgaataacactgatgatgaaaagaaaaaactttattgtgtttatgttgctataggacaaaaaagatccaccgttgctcaaattgttaaaactttagaggacgctggcgctatgaaatacactacagtagtatcagcgactgcttcagactcagcacctttacaatttttagccccatatactggttgtaccataggtgagtattttagggacaacggaatgcatgcattgataatttatgatgatttatcaaaacaggcagtagcatacagacagatgtcattacttttaagaagaccaccaggcagagaggcgtatccaggtgatgttttttaccttcacagtagattattagaaagagcagcaaaattaaatgagaataatggaggtggttcactaacagcacttccaattatagaaacccaagcgggtgatgtctcagcttatatacctacaaacgtaatctcaattaccgatggtcagatatttttagaaacagaactatttaaccaa

SEQ ID NO: 273034 - DNA, 542 bp, Unknown
  Bacterial polypeptide expressing nucleotide sequence isolated from the Sargasso Sea
tacattggaagggtcaataacatctattcaagctgtttatgtacccgcagatgacttaacggaccctgcccctgctactacatttgcccacttagatgctactactgttctagcaagagcactcgcggctaaggggatctatcctgcagttgacccattggactctacaagtactatgcttcaaccatcggttgtaggcgatgagcattacaaaactgctagagctgttcaatcaactttgcagagatacaaggaactacaagatatcattgcaattcttggtttagatgagctttcagaagaagatagattaacagtcgacagggctagaaaaattgagaaatttctatctcaacctttcttcgtagcagaaatatttactggtatgtctggtaaatatgtaaagttggaagataccatagctggtttcaacatgattttgtcaggtgaattagatgatttacccgaacaggcattttatttagttggtaacattgatgaagtcaaagctaaggctgaaaaaataaagtctgaaaaataaa

SEQ ID NO: 273035 - DNA, 640 bp, Unknown
  Bacterial polypeptide expressing nucleotide sequence isolated from the Sargasso Sea
atgttttttaattccttgctaacaaattttgcagcattagaagttggtcaacatctttattggcaaattggaaatatcagacttcatgggcaggtatttttaacatcttggattttattaggagcattattagtttttatttctttaggaactaaaaaaatggaaaatgatcctaaaggccttcaaaatctgcttgagttcctctgggattacataagagatcttgctaggacgcaaataggtgaaaaagtatacagagattggatgccatttataggtactttatttttattcgtctttgttagtaattggggaggagctttaattccttggagattgattaagttaccaagtggagaattaggagcacctactgcagatattaatacaactatagccttggctttattggtttcactttcttatttctatgcaggtttaagcaacaagggttggagatacttcgaatattatgttcacccaactcctattatgcttcctttcaagattctagaggactttacgaaacctttatcactctctttcaggttatttggaaatattttggctgatgaacttgttgttggtgttctagtctttttagttccactaattatcccaatacctgttagttcctagg

SEQ ID NO: 273036 - DNA, 505 bp, Unknown
  Bacterial polypeptide expressing nucleotide sequence isolated from the Sargasso Sea
ctatgtacctgctgacgatcttacagatccagcgccagcaacatctttttctcatttggacgccacaacagttttatctagacaaatagccgaacttggaatttatccagctgtagatccattagactctacgtctagaatacttgatcctagagtagttggagatgaacactatagagttgctagagaagtccaacggatactgcaagcttataaatctttacaagatataatagctattcttggtatggatgaactttcagaggaggacaaattaacagttgcacgtgcaaggaaaatacaaagatttttatcccaaccattctttgttgctgaagtatttacaggatctccaggaaagttagtcgatttagactcaacaataaaaggttttgatgcaatttgtaaaggtgaatatgaccatcttccagaggcagcgttttacatggtaggttcaatagaagaagtagttgaaaaagctgaaaaactaaaaaaagactcataa

SEQ ID NO: 273037 - DNA, 529 bp, Unknown
  Bacterial polypeptide expressing nucleotide sequence isolated from the Sargasso Sea
gcactgggctcgatcacctcattccaggctgtctacgttcccgcggatgacctgacggacccctcgccggcaacgacgtttgcgcacttggatgctacgttggtgctgtcgcggcaggtcgccgagctcggcatctatcccgcggtggatccgctggattccaccagccgccagcttgacccgctggtcgttggccaggagcactatgacaccgctcgggcggtgcagggaacgctgcagcgctataaggaattgcgcgacatcattgcgattctgggcatggacgaactgtccgaagaagacaagcaggtcgtcaaccgtgcccgaaagatccagcgctttttgtcccaacccttctttgtggctgaaacctttaccggatcacccggcaagttcgtatcgctcaaagacacgattcgcagcttccagggcatcatcgatggtcagtacgatgatattccggagcaggccttctatatggtcggcgggatcgaagaagctgtcgaaaaggcaaaaaccgttacctaat

SEQ ID NO: 273038 - DNA, 865 bp, Unknown
  Bacterial polypeptide expressing nucleotide sequence isolated from the Sargasso Sea
tgatactataataaatcagaaagaaaaaaataaatcaaaaaatgataaagacaagcttttctgtatatatgtatcagtaggacaaaaaaggtcaaccgttgctcaaatagtaaaaacattagaagagcaaggagctttggaatatacagtagttgtagcagctacagcctcagatccagctccattgcagtacttagctccttatactggttgtacaataggagaatggttcagagataacggtatgcatgcgctaataatttatgatgatctatcaaaacaagctgtagcatatagacaaatgtctctacttttaagaagaccacccggcagagaggcttaccctggtgacgttttttatcttcattctaggcttctggaaagagcagctaaattaaataaagacaatggttctggctctctcacagcactgccgattattgaaacacaggctggagacgtatcagcatacattcctacaaatgttatatctattactgatgggcaaatttttttagaaacagatttgttttatcaaggtattagaccagctattaatgttggattatctgtaagtagagtaggatcagcagctcaagttaagggtatgaagcaggttgctggatctattaaattagaattagcacaatacagagaaatggcagcttttgcacaatttggctcagatttagatgtatcaactcaaaaattattaaacagaggagaaagattaacagaactcttaaaacaaggacaatattctccactagcagtagaagaacaaattgtaataattttcgctggtgttaatggatatttagatgatctgaatgtaaatgtggttggagattttgaaaatttttaa

SEQ ID NO: 273039 - DNA, 670 bp, Unknown
  Bacterial polypeptide expressing nucleotide sequence isolated from the Sargasso Sea
atggaagaattaaacccatctgaaataagccaggtcattaagcaaaaaatagatgctctggataccacatcaactcctagcaatgaaggcacaattgtgttcttggctgatggaatagcaagaatacatggtttgggcgaggtaatgaatggtgagctcatagaatttgatcacggaattatgggaatggctctaaacttggaggtagattctgttggtgctgtgattcttggcgactataaacttttagctgaaggcggttcagctaaatgtacaggaagaattttagaagtacctgttggcgaggcattgatgggcagggttgttgatgcattgggcaatccgatagacggaaagggtgaagtgcaggcatccgaaacttcacctgttgaaaaagttgctccaggtgtaatttcaagaaagtcagttgatcagcctgtgcagctaggtatcaaagcggtcgacagcatggtccccattggtcgaggacagcgtgagttaattattggtgataggcagactggaaaaacagccatcgcgattgatgcaataatcaatcaaaaagacacaggtgttaagtgcatatatgtcgccataggacaaaagcaatcttcaatagctcaggtggttcgaacactcgagcaatatggtgcgatggaaaatactattg

SEQ ID NO: 273040 - DNA, 612 bp, Unknown
  Bacterial polypeptide expressing nucleotide sequence isolated from the Sargasso Sea
tatggttaatattcgtcctgacgaaattagtagtattattcgtcaacaaattgaaggctacgataaagaagttcaagtaaacaacgttggaacagttcttcaggttggagatggtatcgcacgtgtttacggtttagaccaagtaatgtctggtgaacttttagagtttgaagatggttcaattggtatcgctctaaatttagagaacgataacgtaggtgttgtactaatgggtactggtctagatgttctagaaggtagtacagtaactgcaacaggtaaaattgcacaggttgaggtaggtcctagtattctaggtcgtattgtaaacccactagctgctccaattgatggtttaggtgatatcgcaacagaggagtctaacctaattgaagctatggctcctggtattattagccgtaagtcagtttgtgagccaatgcaaacaggtattacagccattgatacaatgattccagttggacgtggtcaacgtgagcttatcattggtgaccgtcaaacaggtaagacatcaatcgctgttgatacaatcattaaccaaaaaacagaagatgttatttgtgtttatgtagcggttggtcaaaaagcatc

SEQ ID NO: 273041 - DNA, 283 bp, Unknown
  Bacterial polypeptide expressing nucleotide sequence isolated from the Sargasso Sea
tcaggacattatcgccatcctaggtatggacgagctgacagaggaagacaagatcattgtcggccgcgctcgccggatcgcccggttcctctcgcaaccattcttcgtggctgagcagtttactggcatttccggtaagtatgtaaaattggaagagacagttgagtcgtttgagcgggttgcgaacggtgaattcgatcacctcccggagcaggctttttatatgcagggtgggatcgacgaagtggttgcagaagctgaaaagctcgcggctgagggctga

SEQ ID NO: 273042 - DNA, 463 bp, Unknown
  Bacterial polypeptide expressing nucleotide sequence isolated from the Sargasso Sea
aatgccaagtttagacgatctcagaaaaagaattacgagtgttaaatcaactcagaaaataacaaaagctatgaaaatggtggctgcagctaagttgagaaaagctcaagagaatgctgaaaaaggcagaccttattctgaaaaaatgaataatgtaattttaaatctttcaaaaagtataacagataaagaaaatgcccccaaattactggttgggacaggtgaagagaaagttcatttatgtattgtactcactgctgatagaggtttatgtggaggttttaatactaacattattaaaaaagcaaaaagttatttcgaaaaaataatatctgaaaataaaactttaaagattattactgttggatctaaaggatatgatcaacttaaaagacagtataaaagttatattgtagagaacatttctttcaaagagtcaaaaaatataaattactttgatgca

SEQ ID NO: 273043 - DNA, 520 bp, Unknown
  Bacterial polypeptide expressing nucleotide sequence isolated from the Sargasso Sea
gtacaagcagtttacgtcccagcagatgacttaacagatccagctccagctactactttttctcacttagatgcaaccacagtattatcaagaaaaattgcggaattaggtatttatccagctgtagatcctcttgattctacatctagaattttaacacctgaaattcttggtgatgatcattacaattgtgctcaaagagtaaaagaaatgcttcaaaaatataaggaacttcaagatatcattgccattctaggtatggaagagctttctgaagaagataaattagttgtttctagagcaagaagggtgcaaagatttttatcacagccatttcacgttgctgaacaatttacaggaattcctggtgtattggttgatattaaagacacaattaaaggttttaacatgattatggatggagagcttgaccatttaccagaagcggcatttaatctaaaaggaactatagaggaggcaattgaagctggtgaaaaaatgattgctgaggctaagtaat

SEQ ID NO: 273044 - DNA, 538 bp, Unknown
  Bacterial polypeptide expressing nucleotide sequence isolated from the Sargasso Sea
gatgtttcggcatttgttcctaccaatgttatttctattacagacggccaaatatttttagaatcttctctttttagttctggtctaaaacctgctatggatcctggaatctcggtgtcgagagttggtggggctgcacaggttcctattattaaaaaactagggggtggaataaaaacagcactagctcaatacagggagctagaggcatttgctcaattcgcatctgacttagatgaggcctccaaggaacagttagaacatggagaaagggttacagagcttacaaagcaagaccaattttcaccaatgtcagttgcagaaatgggattgatgctcttcacggccaatgaaggcttcttgagagaagtagaagtagaaaaaattaaagattttgaaaaggccttaatttcttatatgaactctgaacacaaagaattaatggatcgcgtatctgaaacgggagaatacaacgacgaaattgagggagcgtttaaggaagcgttagataagtttatgtccactcaaacctggtaat

SEQ ID NO: 273045 - DNA, 589 bp, Unknown
  Bacterial polypeptide expressing nucleotide sequence isolated from the Sargasso Sea
ccctactccgcttgtgcgatgggtgaatacttcatggacaaaggcaagcacgttctagtcgtttatgatgacctttctaaacacgcggttgcttacagacagttatcactactactaaaacgtcctccaggtcgtgaagccttcccaggagacgtattctatttacattctagattattagaaagagctcttaagtattcagatgagaaaggtgctggttctttaaccgcattaccgatcattgaaacacaggccggcgacgtatcggcttacatcccaaccaacgtaatttcgattacagacggacagatctatttagaaaccgacctatttaactcaggtattaagcctgctgtaaacccaggtatttcagtatcaagggtaggtggtaacgcacagatcaaggcaacaaaacaggttgctggtagtttaagactagatctctctcagtactgggaaatggaagcctttgctcaatttggatctgatctcgacaaaaacactttagcacagttagagcgtggaaagagattaatcgaaatcttaaaacaagatcagtataaaccacttcgaatttctcaacagattg

SEQ ID NO: 273046 - DNA, 840 bp, Unknown
  Bacterial polypeptide expressing nucleotide sequence isolated from the Sargasso Sea
gtagtagatgttaagtttcaagacgatttaccagaaatttacacggctctagaaaccaataatggtggaaataagttaatattagaagttgcccagcatttaggtgaaaatagcgttagaacgatagctatggactctactgagggacttaaaagaggagacaaggttttaaatactaatgctcctatcagtgttccggtcggtccagaaacattaggaagaattataaacgtaattggccaacctattgatgagaaaggggatgtaaagacaaaagagaaatggcctattcatagaccttctccaaaatttacagatcaatctacagaaactgaaattttagtaacgggtataaaagtaatagatttgttagcaccgtatgcgaaaggtggtaaaatcggtttattcggaggcgcaggagttggaaaaactgtgacaattatggaattaattaataatatcgcaaaagctcatgggggattttcagtttttgcaggagtgggggaaagaactagagaaggaaatgacctttatcacgaaatgattgagtctggtgtaattaaaaaagatggtaaagggtccaaagccgcattagtttatggacaaatgaatgagccacccggtgcaagagcgagggtagctctaacaggtctaaccgttgcagaatattttagagatcaagaaggtcaagatgtattattctttgttgataatatatttagatttactcaagcagggtctgaagtttctgcgttattgggtagaattccttcagcagtggggtaccaaccaactttggccactgatatgggaaatttacaagagcgaattacatctaca

SEQ ID NO: 273047 - DNA, 938 bp, Unknown
  Bacterial polypeptide expressing nucleotide sequence isolated from the Sargasso Sea
caaaacagttttaataatggaacttataaataatatagcaaaagcccatggcggttactcagtttttgcaggcgttggtgaaagaactcgagaaggaaacgatctttaccacgaaatgatagaatcaggaattatagatttagaaggagataaatctaaagttgcattagtttatggtcaaatgaatgaacctcctggcgcaagggcaagagtagcattatctggtttaactcaagcagaatattttcgtgatgaagaaggtcaggatgtattgtttttcgttgataatatttttaggtttacgcaagctggatcagaagtttcggctttattaggtcgtataccttcagctgttggttatcaaccaactctagcaactgacatgggagctttacaagaaagaattacaactacaaataaagggtctattacatcagttcaagcaatatatgttccagcagatgatttaacagatcctgcaccagcaacatctttttcacatttggatgcaacaacagttttgaatagggcaatttctgaaaaaggtatttatccagcagtcgatcctttagattcaacttcacgaatattagatcctcaagttgttggagaagatcattatagagttgctagagaagttcaaaaagttcttcaaacttataaaagtttacaagacattatcgcaatacttggaatggatgaattatctgaagaagataaattaactgttacaagagcaagaaaaattgagaagtttttatctcaacctttttttgtagctgaagtctttactggttctcctggaaaatatgttgaattggaagataccattaaaagttttgatggtttggttaaaggagaatatgatcatatgcctgaatcagcattttatatggttgggggaattgaagaagccatgaaaaagctaaaaaattaga

SEQ ID NO: 273048 - DNA, 826 bp, Unknown
  Bacterial polypeptide expressing nucleotide sequence isolated from the Sargasso Sea
catgccaagtttagatgatttaaaaaaaagaatttccagtattaaatctacccaaaaaataacaaaagctatgaaaatggtagcggccgcaaagttaagaaaagctcaagagagcgcagaaaaaggaagacctttttctgaaaaaatgaacaacataatactaaatctaagcaagtcaatatctgataaaaataatgcttcaaaatttctagttggtactggaaaaaataatgttcatttatgtgtagttattactgctgatagaggactgtgtggtggatttaatacaaatatttgtagaaaagcaaaaagttattttgacaaaactataaaagaaggaaaaacacttaaaatttttacagttggatctaaagggcacgatcaaatcaaaagagcatatggcagctatataattgaaaaaataaatttcaaaggaatgaaaaaaatcacctatagagaagcagaaaaaattggtaataaaattatagatttatttaaaggggatcagtttgacgtgtgtaaaatattttataataaatttaaaaatgtaattacacaaataccgcaggcacagcaaattataccagttgaaagttcagaaaataaagaagaagaaaaaaaattagaaaatttttatgaatttgaaccagaggaaaatgaaatactaaatgatttactccctagaaatatttcgtatcaaatttttaaagcttttcttgaaaatgcggctagtgaacaaggctctagaatgacagcaatggataatgcctctagaaatgctggtgatttggttaataaattgacaataacttataacagaagcaga

SEQ ID NO: 273049 - DNA, 559 bp, Unknown
  Bacterial polypeptide expressing nucleotide sequence isolated from the Sargasso Sea
aatgggcgttcttcaagagaggatcacctcaacgaaaacagggtcaattacctcaattcaagcagtttatgtaccagcagatgacttgacagacccatcaccagcaactacttttgcccaccttgatgcaacagttgtattggcaagatcaattgctgagcttggtatttaccctgccgttgaccctcttgattcaaatagccgccaattagatccgggaattgtaggccaagagcactacgataccgcaagggctgttcagcaagttttacaaaggtataaagagttacaggacattatcgcaattcttggaatggacgaactatccgaagaagacaagctcactgtacaaagagcaagaaaaattcaaagattcttatctcaaccattttttgttgcagaggtctttactgggtccccagggcagtatgtgtcactgagggattctattaaggctttccaaggaatagtcgccggggattacgatgatcttccagaacaagcgttctatatggttggaacaatcgaagaagcggttgaaaaagcaaaaagtatgtaa

SEQ ID NO: 273050 - DNA, 250 bp, Unknown
  Bacterial polypeptide expressing nucleotide sequence isolated from the Sargasso Sea
tatggaaaatattggaaaaataactcaacttattggagccgttgtagatgtaagttttgaaaaagaattgccagaaatttatacagcattagaagtaaataacaaaggaaacaaactcgtacttgaagttgcccaacatttaggcgaaaacagtgtaagaacaattgcaatggactccacagaaggattaaaaagaggagacaaagttataaatactggcgctccgattagtgtaccagttgggccagag

SEQ ID NO: 273051 - DNA, 727 bp, Unknown
  Bacterial polypeptide expressing nucleotide sequence isolated from the Sargasso Sea
atggatagttcagaaggtttaaaaagaggagatgaagtaactgacactggtgaacccatacaagttcctgttggacctgaaacattaggaagaattataaatgtaattggtgaacctattgatgaaaaaggtgaaattaaaacaaaagaaaactggccaattcatagacaagctccttcttttaacgatcaatcaactgaaacagaaatattagtaactggaattaaggttattgaccttttagctccatatgcaaagggtggtaaaattggattatttggtggtgctggagttggaaaaacagtgatcattatggaattaataaataacattgcgaaagcacatggtggattttctgtatttgctggtgttggtgaaagaactagagaaggaaacgatctatatcacgaaatgattgagtccggagtaattaagcccgaaggcacaggttcaaaagctgcattagtttatggtcaaatgaatgaacctccaggagcaagagctagagttgcccttacaggtttaactgttgcagagtattttagggaccaggaaggacaagacgtattattttttgtcgataacatatttagatttacacaggctgggtcagaagtatcagctcttcttggaaggattccatcagctgttggttatcaacctacactagctacagacatgggtaatttacaagaaagaattacaaccactaacaaaggttcaataa

SEQ ID NO: 273052 - DNA, 574 bp, Unknown
  Bacterial polypeptide expressing nucleotide sequence isolated from the Sargasso Sea
aatgcctagcctagatgatttaagaaaaagaatttcgagtgtaaagtccactcaaaagataacaaaggctatgaaaatggttgctgcagcaaaacttcgtaaagcacaagaaatggctgaaaaaggaagaccctacagtgataaaatggacttaataatccagaatttaagtaaagcaattaatgatccttctaatgcgccaaaacttctggttggtaccggagaggataaaacgcatctttgtgttgtaatgacagctgatagaggactttgtggtggatttaatacaaatatatgtaaattagctaaaaaatattttgatgaagctatcaaatcctctaaaaatttgaaaataattactgttggcaccaaaggccttgaccaattaaaaagagattatggtcaatatattattaaaagaattaacttaaaagatagaaaaaaattatcttttttagatgcagaagaaatcggtaaacaaatagttgaattatttaaaaataatgaattcgataaatgtttcatattttataacaaatttaaaaatgttatttcacaaattcctcaacaacaa

SEQ ID NO: 273053 - DNA, 878 bp, Unknown
  Bacterial polypeptide expressing nucleotide sequence isolated from the Sargasso Sea
aactgttactatcatggaattaattaataatgttgcaaaagctcatggtggttattctgtttttgctggtgtcggagagagaacacgagaaggtaacgatttgtatcatgaaatggtagaatcaggtgtaattaaaactgatggaccaggatcaaaagctgctcttgtatatggacaaatgaatgaacctcctggtgcaagaagtagagttggtttaactggacttaccttagccgaatattttagagatgaagaaggtcaagatgtattattttttgttgataatatatttagattcacgcaagcaggatcagaagtttcagcattattgggaagaataccatcagcagttgggtatcaaccaactttagctactgatatgggtgctttgcaagaaagaattacttctacaaacaaaggttctattacctcagttcaagcaatatatgttccagcagatgatttgacagatcccgctcctgcaacttcgtttgctcatcttgatgccacaacagttttatcgaggcaaatttctgaaatgggaatttatccagctgttgatcctttggattctacctctagagttttagacccaagaatagttggtgatgaacattataatacagcaagggaagtccaagagattcttcagcaatataaatctcttcaagatatcattgcaatacttggaatggatgaattgtcagaggaagataaattagttgttgcaagagctagaaaaattcaaaaatttctatctcaaccatttcatgttgctgaagttttcactgggtctcctggcgcatttgttagtttagaagataatataaaaggttttaaaggtattgtttctggtgaatatgataatcttccctgaa

SEQ ID NO: 273054 - DNA, 297 bp, Unknown
  Bacterial polypeptide expressing nucleotide sequence isolated from the Sargasso Sea
tatggctaacaatttaactggaaaaatatcacaagttctcggagctgttgttgatgtagagttcgatggtgaacttcctgcaatcatgaacgctctagaagttgacaacaatggaacaagattaatgcttgaggttgctcagcatttaggagaaaatgctgttcgtacaattgctatggatacaacagatggactagttagaggtcaaacagctactgatacaggtgcccccatttcaatgcctgtaggcccagaaactttaggtagaattatgaatgtcgtaggagagccagttga

SEQ ID NO: 273055 - DNA, 367 bp, Unknown
  Bacterial polypeptide expressing nucleotide sequence isolated from the Sargasso Sea
agatcctagaatagtgggagaagaacattatacagtagccagagaggttcaaagaatattacaaacatataaatctttacaagatattatcgcgatattaggcatggatgaactatctgaagaagacaaattaacagtagcaagagcgagaaaaattcaaagatttttgtctcaacctttttttgttgcagaagtttttactggaacaccaggaaaacttgtagatctagaagctactatcaagggttttgacgcaatatgtaaaggcgaatatgatcatttgcccgaatcggctttttatatggtgggaacaattgaagaagcagtagaaaaagcagagaagatggcgaaggatgcagcagcttaa

SEQ ID NO: 273056 - DNA, 854 bp, Unknown
  Bacterial polypeptide expressing nucleotide sequence isolated from the Sargasso Sea
aaaaaaaagaatagctagtgtaaaatctacacaaaaaattaccaaggctatgaaaatggttgcagcagctaagttaagaagagcccaagaaagtgctgagaagggaaggccttattctgaaaaaatgaataatgttattttaaatttatcaaatggtatatctgataaagaaaatgcaccaaagttattgtcaggtactggtcaggaaaaaactcatctttgtgtagtgatgacttctgatagaggtttatgtggtggatttaattctaatattattaaaaaagctaaaagttattttgcaaaaattttagatgaaggtaaagaacttaaaattattacagtaggctcaaagggaaatgatcaattaaaaagagtttatggtgataaaataattgaaaatatttctttcaaagagtctaaaaatgcaaattattttgatgctgataaagttggaaaaatggtaattgaaaaatttgaagcaggtgaatttgatgtttgcacaatattttttaaccaatttaaaaatgtaattactcaaattcctcaagcacagcaaattatccctttaaataatgaaggagaagaaagtacttcagaggaaagttacgaatttgaaccagatgaagatgaaattttaagcaatttattgccaaagaatatttctacgcaaatatttaaagcaatgttagagaattcagctagcgagcaagggtctagaatgagtgcaatggataatgcaacccgaaacgcaggtgaaatggttgacaaacttactattgaatataatagaagtcgtcaggcagcaattacaaaagaactaatagaaatcatatcaggagcagaaagtttataat

SEQ ID NO: 273057 - DNA, 409 bp, Unknown
  Bacterial polypeptide expressing nucleotide sequence isolated from the Sargasso Sea
aattatcctgctgttgaccctctagattctacttccagagttctagatcccgcgatcgtaggagatgagcattataccgtggcgagagaagtccaaagaattttgcaaacttacaaaaatttacaagatatcatagctatattagggatggatgagctttctgaagaagataaattaacagtggctagagctcgaaaaattcagcgatttttatctcaaccctttcatgttgcagaggtttttaccgggtccccgggggtcttcgtcaacttggaagatacgataaagggctttaaggggatttgtgctggtgaatatgaccatctacccgaggcagctttttatatggtaggtacgattgaggaggcgacagaaaaggcccaaaagatggctgtagaggcagcatagg

SEQ ID NO: 273058 - DNA, 799 bp, Unknown
  Bacterial polypeptide expressing nucleotide sequence isolated from the Sargasso Sea
cgaatctggagtaattgataaaactgctctagtatttggtcaaatgaatgaacctccaggtgctagactgcgtgttggtttaagtgctttaaccatggcagagtattttagagatgatgaaggaagagacgtattattgtttgttgataatatttttagatttacacaagctggatcagaagtttcagctcttcttggaagaatgccatcagctgtaggataccaaccaacattatctactgaaatgggagatttacaagaaagaattacttcaacaaaaaaaggttctattacatctgttcaagctatttatgtgccagcagatgatttaacagacccagcacctgcaactgcatttgcacatttagatgctacttctgttttagaaagaaaaattgctgaacttggtatttatccagcaattgatcctttgacttcaacgtcaagaattttagatcctagagttattggtgatagacactacaatgtagctagatcagttcaggcgactcttcagcaatacaaagatttacaagatatcattgcaattctaggtatggatgaattatctgatgaagataagatggtagtttcaagagctagaaaaatgcaaaaatttatgtcacaaccattctttgtagctgaacagtttactggaattgaaggtagatacgttaaactagaagactctatagctggttttgaagcaatattaaatggtgaagttgacgatttacctgaaaatgctttttcatatgttggttcaattgatgaggccattgagaaaggtaaaaagtga

SEQ ID NO: 273059 - DNA, 508 bp, Unknown
  Bacterial polypeptide expressing nucleotide sequence isolated from the Sargasso Sea
attacagatggacaaatattcttgagtgcagatttatttaactcaggattaagaccagctattaatgttggtatttctgttagccgagttggaggagccgctcagacaaaagcaattaaaaaaattgcaggaactttaaaattagaactcgcacagtttgatgaactagctgctttttctcaatttgcatctgatcttgatgaagcaacacagcaacaacttgaacgaggcaaaagactaagagagttattaaagcaacctcaattctctccactgaaccttgcagaacaagttgcagttgtttatgcaggagttaaaggtcttatagatgaagttcctgttgaagacgttactaaatttgcaactgaacttagggaatacctaaagttaaataaagcggaatttatagaagagattcttaaagaaaagaaattaaatgatggattagaggcgacactaaaagaggtgataaatgaagttaaatcatcaatgcttgccacagtttaaa

SEQ ID NO: 273060 - DNA, 385 bp, Unknown
  Bacterial polypeptide expressing nucleotide sequence isolated from the Sargasso Sea
gaaacaagttgctggtactttacgtcttgacttggctcaatatagagaaaaagaagcatttgctcaatttggaagcgatctagaccaggctactcaaaaacaattagcgcgtggacaaagactcgtagaggttcttaaacagcaacagtaccaacctatgccttgggtggatcaggtagtttctatttttgccgcaactaatggatatctagatgatcttcctattgatgcagtaagtaaatttgaaaaagattttttaaattatatgaattctagtatgtcagatttgaaaaaatctattgaaaaagaagtacaactaaatgatcaatctgaaaagcaactaaagtctgctttagatgaattcgtaaaaacattttctcaataa

SEQ ID NO: 273061 - DNA, 880 bp, Unknown
  Bacterial polypeptide expressing nucleotide sequence isolated from the Sargasso Sea
gatggtaagggcgaagtgcagacagatcaaaccgccccagtcgagaaagtcgctcctggagttatttcaagaaagtctgtagatcaaccggtgcaattgggcataaaggccgttgacagcatggttcctattggacgaggtcagcgtgaattgattattggagacagacagaccggtaaaaccgctatcgccattgatgcaataatcaaccaaaaagacactggcgttaagtgcatatatgtagcaataggacaaaagcaatcttcaattgcccaggtggttagaacgcttgagcagtatggcgccatggaaaacacaattgttgtagtggctgcggcggctgacccggcaccaatgcaatatattgccccttttgcagcttgttccatgggtgagtatttcagggacaggggagaggatgctctaattatctacgatgacctttctaaacaagccgtcgcatatagacagatgtctctcttgctaagaagaccgcccgggagggaggcttatcccggtgacgttttctatcttcactcaagattattagaaagagctgcaagggtgaatgaggaatatgtagagaactacacaaatggtgaggtgaagggaaaaacaggttctttaactgcactaccaatcatcgaaactcaggccggagacgtttcagcgtttgttcctacgaatgtaatttctataaccgacggacaaattttcctcgagtcgtctttatttagttcaggattaaagcctgccatggatcctggtatttcagtttcaagggtaggtggcgctgcacaggttccaataattaaaaagcttggcggaggaattaaaacagcccttgctcaatatagagagttagaggctttgcccaatt

SEQ ID NO: 273062 - DNA, 595 bp, Unknown
  Bacterial polypeptide expressing nucleotide sequence isolated from the Sargasso Sea
acccaacctactcttgctgatgaaatgggatttttacaagagagaattacatctctaaaaggtagatccattacatcactacaagcggtatatgtgcctgcagacgatattactgaccctgcacctcacaccgcatttgctcacttagatgctagaacagtgttatcaagatctattgctgacttgggaatttatcctgctgtggatccacttgactcatcatcaagaatcttagatccaggcgttgtaggggatgaacattatgaaactgcacgtgaagtccaaagagtgcttcaaagatacaacgatcttcaagatattattgcaattcttggtatcgatgagttatcagaagaagataagcagatcgttggtagagcgaggagaatacagcgtttcttatctcaacctatgtttgttgctgaacaatttacaggaatagaaggtaagtttgtctctattaaagatagtgtcgaagccttcaaaacaatcttaagcggagaactcgattcagtgccagaacaggctttttatatgacaggtggattagatgaagtcatgtctaaagctaaagaattggaagaaaatctctaaa

SEQ ID NO: 273063 - DNA, 916 bp, Unknown
  Bacterial polypeptide expressing nucleotide sequence isolated from the Sargasso Sea
attggtgatcggcaaacgggaaaaactgctgttgcgattgatgcgatcataaatcaaaaatatacccatgaaacggatgaccctgtttattgtgtttatgttgccattggacaaaaagcatctactgtcgctagtttagtatcagaactggaagctcagggggctatggaatatacagtagttgtagctgcgaatgcctctgatccagcgcctatgcagtatatcgcgccatatgctggttgtgcaatgggagagttttttagagataatggtcaacattctttgatagtctatgatgatctatcaaaacaagcagtcgcatatcgacaaatgtcacttgttttaagaaggccacccggtcgcgaggcttttcctggtgatgtattttatctacatagtcgcttattagaacgagcatccaaattatcaaaagaccatggaggtggctcactgacagcccttccagttattgaaacacaagagggggatgtttcggcatacattcctacaaatgtaatctcgatcacagatggtcaaatttatttagagactaatctttttaattcgggtattcgtccagcgattgatgtaggtctttcggtatctcgtgtaggtggaaatgctcagattaaggcaatgaaaaaggtcgctggcacgcttcggttagatttggctcaatatagagaattagaggctttcgctaagtttggttcagatctagataaatctactcttgctcagttaactcgtggagagagaatggttgagattctaaagcagaaccagtacgtaccaatgaatgtagaaaaacaggttgcaataatttttgctgcctctgaaggttatctagatgacattgctgcagataaagtagacgaatttgaaagtggtctttttgaatatttagatgctaatg

SEQ ID NO: 273064 - DNA, 211 bp, Unknown
  Bacterial polypeptide expressing nucleotide sequence isolated from the Sargasso Sea
cagagatttttatctcaaccatttttcgttgcagaagtatttactggttctccaggaaaacttgttgatcttgattcaacaatcaaaggttttgatgcaatctgcaaaggtgagtatgacaacttacctgaagctgctttttatatggttggaacaattgaagaagctatagaaaaagctaagaaaatggaacaagaagctgctgcttaat

SEQ ID NO: 273065 - DNA, 856 bp, Unknown
  Bacterial polypeptide expressing nucleotide sequence isolated from the Sargasso Sea
atgagtaaaggaacagtaatacaaataataggagcggtaattgacgttgagtttccaaaggaaaatcttcccaagatttacgatgcgttaactgtagatgagaacggactagtactagaggtgcaacaacaattgggtgacggcgttgttaggacaatagcgatgggagcatcagaaggactaaaaagaggtgtggaagtaactaacacagagggcccaatttcggtgccagtgggggaagagactttgggtaggattatgaacgtacttggcgaacccattgacgaaaaaggcgatgtggcagccaaaaagacgatgcccattcacagaaacccgccttcttacgaagaccaggcagaaacaacagagctgcttgagacaggcataaaggttatcgatttaatttgtccttttgctaaaggaggaaaggtaggactgttcggtggagcgggagtaggaaaaacagtaaacattcaagagctaattagaaacatagcttatgagcacagcggctattcagtatttgcgggcgttggagaaagaactcgtgaaggaaatgatatgtaccacgaaatgatcgagggaggagtgttggataaagtagcactagtttatggccaaatgaatgagccccctggaaacagattaagggttgctctgtcaggattaaccatggcagaaaatttcagagacgaaggcagggatgtcttgctctttgtagacaatatttatcgatacactcttgctggaacagagtgttcggccttgttaggaagaatgccatctgcggtggggtatcagccaactcttgctgaagaaatgggcgtgtgcaagaaagaattgcatccaccaaaac

SEQ ID NO: 273066 - DNA, 655 bp, Unknown
  Bacterial polypeptide expressing nucleotide sequence isolated from the Sargasso Sea
tatccttggtgatgtattctatcttcatagtagattgttagaaagagcagctaaattaagtgatgagcatggtggaggatctttaacagcacttccaattattgaaacacaaggtggtgacgtatcagcctttattccaactaacgtgatttcaattactgatggtcaaattttcttagaaactgaactttttaaccaagggatcagaccagcaattaatgttggactatctgtttctagagttggttcttcagcacaaacaaaagcgatgaaaaaagtttctggatcaatgaaactagaattagcacagtatagagagatggctgcttttgcacaatttggttctgatttagatgcatcaacacagcaacttttaaatagaggatcaaaattgactgaacttcttaaacaaaaacaatattcaccaatgacagtagctgaacaagttatttctgttttctgtggagtaaagggatatttggatgatattgaattaaaagacattgctgagtttgaaaacaaaatcattgaaaaatgtaagtctgataaacctgaaataattgattcaattcaaagctcaggcaaacttgaagatgataaagaaaaattactaattgaagtaattacacagttaaaggaaaactttaaatcttaa

SEQ ID NO: 273067 - DNA, 768 bp, Unknown
  Bacterial polypeptide expressing nucleotide sequence isolated from the Sargasso Sea
ctcctggagcgagagctagagttgctttgacaggattgactgtagctgaatattttagagatcaagaaggtcaagatgtattattttttgtagataatatttttagatttacacaagcaggatcagaagtttctgctttgcttggaagaattccatcagcagttggatatcaaccaactctagctactgatatgggaaatttgcaagagagaattacaacaacaaacaaaggatctatcacatcagtacaagctatttatgttcctgctgatgacttaacagatcctgctccagcaacatctttttctcatttagacgcaacaacagtattatcgagacaaattgcggaattaggaatttatccagctgttgatccattggattcaacatctagaattctagaccccagaatagttggggatgaacactatagagttgctagagaagtccaaaaaatattacaaacttataaatctttacaagatatcattgcaattttaggtatggatgaattatcagaagaagacaaactaactgtagcaagagcgagaaagattcagagatttctatcacagcccttctttgtagctgaagtatttacaggttctccaggaaaactagttgaattagactcaacaataaaaggttttgatgcaatttgcaaaggcgaatacgatcatctacccgaagcagcattttatatggtgggaacaatagatgaggccatagaaaaagccgaaaaaatggcaaaagatgcagcagcttaat

SEQ ID NO: 273068 - DNA, 682 bp, Unknown
  Bacterial polypeptide expressing nucleotide sequence isolated from the Sargasso Sea
ttcaaatttttagttggaagtgggaaagaaagtatacatttatgtgtggttatgacttctgacaggggtctttgtggaggatttaatacaaatatctgtagaaaagctaaaaattattttgagaaaattttaaaggaaggaaaaacattaaaaatttttactgtgggaaccaaaggctacgatcagttaaaacgaacttacgcaaagtacatagtggaaaaaattgattttaagggacacaaaaaaattacttataaagaagctgaagaaattggcaataaaataataaaattatttgaagaagaacaatttgatatttgtaaaattttttataataaatttaaaaatgtaataactcaaataccccagtctcagcaaattatccctatagaagatgaaaaaaaagaagaggaaaaaaatttaaatagttattatgaatttgaacctgaagaaaatgaaattttagaaagtttgcttccaagaaatatttcaactcaaatttttaaagcttttcttgaaaatgcagcaagtgaacaaggatctagaatgacagcaatggataatgctacaagaaatgctggtgagttagttgaaaaactaaccataacttataatagaactagacaagctgcgattacaaaagaacttatagaaattatttcaggagcagaaagtttataga

SEQ ID NO: 273069 - DNA, 562 bp, Unknown
  Bacterial polypeptide expressing nucleotide sequence isolated from the Sargasso Sea
caagagagaattacatctacagacaagggttctattacatcggttcaagcgatatatgtccctgcagatgatttaacagatcctgctccagctacttcattctcacatttggacgctacaactgttttatctagacaaattgctgaaatcggtatttatccagcagtagatcccctagactctacatccaggatactagatccaagaatagtaggagaagaacactatagagttgctagggatgttcaaagaatattacaggcttataaatcattacaagacattatcgctattttgggaatggatgagctttccgaagaagataagcttacagttgctagagctagaaaaatacaaagatttttgtctcaacctttttttgtcgcggaagtttttacaggttcacctggaaaattagttaatttggacacaaccataaaaggattcgacgccatttgtaaaggcgaatacgatcacttgcccgaagctgcattttatatggtaggtggaattgaagaagtgatcgaaaaagcagaaaaattagctaaagacaacaaataat

SEQ ID NO: 273070 - DNA, 934 bp, Unknown
  Bacterial polypeptide expressing nucleotide sequence isolated from the Sargasso Sea
ctcccttcaattctcaatgcattaaggattgaaggcaaaaatcctgctgggcaagatgttgcactgactgctgaagttcaacaattattaggtgatcatcgggttagagccgttgctatgagcggaactgatggattagttagaggtatggaagctttagacacaggagctccaatttctgtacctgttggtgaagccacccttggaagaattttcaacgtccttggagaacctgtagatgagcaaggcgaccttaagaacgtaactacctctccaatacaccgatcagccccaagccttacagatttagaaacaaaaccaaaagtatttgagactggtatcaaagttatcgatttgctggctccataccgtcagggtggaaaagttggattgtttggtggggctggagtaggtaaaacagttctaattcaagagctcataaacaatattgccaaagagcatggtggcgtatcagtttttggtggagtgggagagagaactagagaaggtaacgatttatatgaagaatttaaagaatctggtgtgattaattctgaagatctaaccaagtcaaaagtagctttgtgctttggtcagatgaatgagcccccaggcgcaagaatgagggtgggtctatctgccttgactatggctgagcatttccgtgatgtaaataagcaagatgttcttctgttcatcgataatatcttcagatttgttcaggctggatcagaagtgtctgctttgctaggacgaatgccatctgcagttggatatcagccaaccttaggaactgacgtaggagagcttcaagaaaggattacctctacccttgaaggatctattacctcaattcaggctgtttatgtacctgccgacgacttaacggaccctgcacctgctactacttttgctcacttagacgcaactacag

SEQ ID NO: 273071 - DNA, 538 bp, Unknown
  Bacterial polypeptide expressing nucleotide sequence isolated from the Sargasso Sea
agatgtttcggcatttatccctaccaatgttatttcaataactgatggacaaatattccttgaaactgaattgttcaaccaaggaattagacctgctattaatgtaggtttatctgtatcaagggttggatcatctgctcagactaaagcgatgaaaaaagtttctggatcaatgaaactcgagctagcgcaatatagagaaatggcagcttttgctcaattcggatcagatttagatgcatctactcaaaaattattaaatagaggagcaaaactaactgaattacttaaacaaaaacaatattcacccatgacagtagctgaacaggtaatttcagtattctgtggagtaagaggtcacttagatgatgttgatcaaaaaaatattgtaaattttgagacaaaaataattgaaaaatgcaaatcagaaaaacctgaaatattaaactcaattatatcttccggaaaacttgaagaagatagtgaaaaattactaacagatttaattaatgatcttaaaaaaaacttaaattcttaa

SEQ ID NO: 273072 - DNA, 796 bp, Unknown
  Bacterial polypeptide expressing nucleotide sequence isolated from the Sargasso Sea
agagcagctcctgattttgttgatcaatctactgaaaccgaagttcttgtaactggtattaaagttatcgaccttttagctccgtattcaaaaggtggcaaaattggcctttttggtggtgctggtgttggaaaaactgttttaattatggaattaattaacaacgtggccaaagcgcatggtggatattctgttttcgctggagtgggtgaaagaacccgtgaaggaaatgatctttatcatgaaatgatcgagtcaggggttataaaccttgatggagatacttctaaagtgtcacttgtttacggtcaaatgaacgaaccccctggagcaagatctagagttgctttatcaggattaactcaagcagaatattttagagatgaggaaaaccaagatgttttatttttcgtggacaacatcttccgttttacacaagcaggttctgaggtttccgctctccttgggcgtataccttcagcggtgggttatcaacctactttggcaacagatatgggtgcacttcaggaaagaattactactaccaacaaaggttcaattacctctgtgcaagcaatttatgttcctgccgatgatttaactgacccggcacctgcaacatcattttctcacttagatgcaaccactgtgttgaacagatcgattgcagagcttggaatttatccagctgtggacccgttagactctacttctagaattttagaacctagaacattgggtgataagcactatcaagtagcaagagatgttcaaaaaactcttcaaacgtataaaa

SEQ ID NO: 273073 - DNA, 734 bp, Unknown
  Bacterial polypeptide expressing nucleotide sequence isolated from the Sargasso Sea
gcaaaatataattcttaatttaaccaaatcaattaatgatccacaaaatgcacctaagcttcttgttggaacaggacaagataaaacctatttatgtgtagtattaactgcagatagaggattgtgtggtgggttcaactcaaatatttgtaaacttgcgaagacaaattttaagaaaatcctaagcgaaggaaaagagttaaaaataattactgtaggaactaagggcctagaccaaattaaaagggaatatggaaaatacgtaactaaaaaatttagttttaaaaataagaaacaaattacctttagtgaagcagaaataataggaaatgaaatcataagtttattcaatgataatcaatttgataaatgtattttgttttataataattttaaaaatgtaattacacaaattcctcaagctcaacaaattattccagcagacaacaactcatctaaagaaaaagaagaagatccaacttcctatgaatttgaacctgaggaagatgagattttagaggacctactgcctaaaaatatatctactcaagtttttaaagcttttttagaaaatgcagcaagtgaacaaggatcaagaatgacagcaatggataatgctacaagaaatgcaggagaattagtggacaaacttacaattaattataatagaagcagacaagcttcaattacaaaagaattaatagaaattatatcaggagcagaaagcttataag

SEQ ID NO: 273074 - DNA, 559 bp, Unknown
  Bacterial polypeptide expressing nucleotide sequence isolated from the Sargasso Sea
attgcccagtcttgatgatttaaaaaaaagaataaaaagtgttaaatcaacacaaaaaattactaaagcaatgaaaatggtggcggcggctaaactcaaaaaagcacaagagaatgctgaaaagggtagaccatatagtgaaaagttacacaacataattttaaatttaaccaaatcaatttcggacgagacaaatgctccaaaactattaataggtagcggtaaagacgaagtatacctgtgcttagtaatgacggcagatagagggttatgtgggggttttaattctaatatttgtaaattagcaaaaaaccattttaaaaagattatcaaagacggaaaaaaattaaagattattactgttggaagcaagggacatgatcaaatcaaatctgaatacaactcttacataattgacaaattgaattttaaagagaaaaaacaaatttctttcaaagaagcagaagttgttggaaaaaaaattatcgatctatttaatcaagaacagtttgataagtgttttatattttacaacaactttaaaaacgttataactcaa

SEQ ID NO: 273075 - DNA, 385 bp, Unknown
  Bacterial polypeptide expressing nucleotide sequence isolated from the Sargasso Sea
gctggttcaattaaacttgagctggcacaatatagagagatggcagctttcgcacaatttggttcggatttggacgtttcaactcaaaagctattaaataggggctcaaaacttactgagcttttaaaacaaaatcaatactccccttttacagttgcagagcaagtaatttcgatttttacaggagtaaacggatacttagatgacataaaattaaatatgatcaaagattttgaaaagaatttaattgagaaggtaaaaaatgaaaattctgaaattttagaaacaataaacaaaaccggtaaacttgaagatgatgttaaaaataagctcatagaaatcatcgtaaagcaaaaaaagggagaaaaaattgcccagtcttgat

SEQ ID NO: 273076 - DNA, 892 bp, Unknown
  Bacterial polypeptide expressing nucleotide sequence isolated from the Sargasso Sea
atttgctggagtggggaaagaactagagaaggaaatgatctttatcacgaaatgatagagtcaggagtaattaaacccgaaggacctggatcaaaagctgcactagtttatggtcaaatgaacgagcctcctggagcaagatcaagagttgctctaacaggattaacagttgcagaatattttagagaccaagaaggtcaagacgtactcttttttgtagataatatttttagatttacacaagcaggttctgaagtatcagccttattgggaagaattccctcagctgttggttatcaacctactttagcaactgatatgggaaatttacaagaaagaataactacaactaacaaaggatcaattacatcagttcaggcgatctatgttcccgctgacgacttgacagaccctgcgccagcaacatcatttgctcacttagatgcaacaactgtattatcaagacagattgcggaacttggaatttacccagctgtggatcctttagattcaacttctagaattctagatccaagaattgtaggcgatgagcattatagagttgcaagagaggttcaaaaaattctacaaacatataaatctttacaagatattattgcaattttgggtatggatgaattatctgaagaagataaattaattgttgcaagagcaagaaaaattcaaagatttttatcacaacctttttttgtagcagaagttttcaccggctcttctggaaaactagtagatttagagtctacaatcaaaggatttgatgcaatttgcaaaggtgagtacgatcacttaccagaagctgctttttatatggttggcacaattgaagaagcagtgaaaaagcagagaagatggcaaaagaagttgcataatg

SEQ ID NO: 273077 - DNA, 287 bp, Unknown
  Bacterial polypeptide expressing nucleotide sequence isolated from the Sargasso Sea
ggatattattgctattttgggcatggatgaattatctgaggaagataaattaactgtagctagagctagaaaaatacaaagatttttatctcaacctttctttgttgcagaagtttttacaggctctccaggaaaactagtagatttagagtcaacgattaaaggcttcgatgcaatttgtaaaggtgagtatgaccacttaccagaagctgctttttatatggttggaacaatagaagaagcagttgaaaaggctgaaaaaatggcaaaagaagctgcagcataat

SEQ ID NO: 273078 - DNA, 870 bp, Unknown
  Bacterial polypeptide expressing nucleotide sequence isolated from the Sargasso Sea
tcaggttcaagctggagagatggtagaatttcctggtggcattaaaggtatggcattaaatcttgaaatggataatgttggtattagtatttttggtgatgatacaggtataaaagagggcgatactgttaaacgtacgggtgaaatcgttgatgtgccagtaggcaaagaactactgggaagagtagtagatggacttgggaatcctatagatggcaaaggaccaattaattcaactaataaaagaagaattgaattgaaagctcctggcattattcctcgtcaaagtgtgaaagaaccaatgcaaacaggcataaaagcattagatgcacttgttcctgttggtcgtggacaacgtgaattgattattggcgatcgccagacagggaaaacagcagttgctattgatacaattcttaatcaaaaaaatattaatcaatctaacaatgaaaaagaaaaactatattgtatttatgttgcgataggtcaaaaaagatcaactgttgcgcaaattgttaaaacattagaagataatggagctttggaatatactgttgttgtgagtgctacagcttctgagcctgctccattacaatttttatcagcttacacaggttgtactatgggagaatattttagagataatggtatgcatgcattaattatttatgatgatttatctaaacaggcagtagcatatagacaaatgtctttattgttgagacgtcctccgggaagagaagcttatccaggtgatgttttttatattcatagtcgtttgttagaaagagctgcaaaaatgagtgaagagcatggtggcggaagtttaacagcattacctataatagaaactcaagcaggcgatttgtc

SEQ ID NO: 273079 - DNA, 690 bp, Unknown
  Bacterial polypeptide expressing nucleotide sequence isolated from the Sargasso Sea
ctttccctggagatgttttttatcttcactcaagacttttagagagagcagctagagtaaatgcggaatacgtagaaaaaattacagaaggaaaggtaaaaggcaaaacaggatctttaacagccttgcctattattgaaacacaagccggagatgtatctgcttttgttccaactaatgtaatctcaattactgacgggcagatatttttagaaacggatctttttaattcaggtgtcagaccagctattgatccaggactttctgtatcaagagttggtggagctgcacaaactaagataattaaaaagcttagtggcggaattagaacagatcttgctcaatatagagagcttgcggcattttcacagtttgcatctgatctagatgatgcaacaaaagaacaattagaacacggtaaacgaattactgagcttctaaaacaaaaacaatactctccaatgagtgttgctgatcaagcaatgagcttatatgcagctgataaaggctatatgaaggatgttgatatagataaagtaggtgactttgaatcagccttattggcttattttgaatcagaaaagtctgacctaaaaaagcaaattaatgataccggagattgggatgacgatattgaaaaccagtttaaggaattagttgaagactttaagaaaacacaaacatattaaa

SEQ ID NO: 273080 - DNA, 674 bp, Unknown
  Bacterial polypeptide expressing nucleotide sequence isolated from the Sargasso Sea
cttagcagctttagtgtatggtcaaatgaatgaaccaccaggagcaagggctagagttgctttgtcaggtttaacagtcgctgaatactttagagaccaggaaggtcaagatgtattattttttgtagataatatttttagatttactcaagctggatctgaggtatctgctttgctgggaagaattccatctgcagttggatatcaacccactttagcaactgatatgggaaatcttcaagagagaataacaaccacaaacaaaggatcaataacttctgttcaagcaatttatgtgccggcagatgatttgactgatcctgctccagcaacatcattctcacacttagatgcaacaactgttttgtctagacaaattgcagaaataggaatttatccagcagttgatccattggactcaacctctagaatattagatccaagaattgttggtgatgaacattatagagttgcaagagaggttcaaaaaatattacaaacctataaatcattacaagacattattgcaattttgggtatggatgagttatcagaagaagataaactagttgtagctcgagcaagaaaaattcaaagatttttatctcaacctttctttgttgctgaagtatttactggttccccaggaaaacttgtagatttagagtcaacaa

SEQ ID NO: 273081 - DNA, 919 bp, Unknown
  Bacterial polypeptide expressing nucleotide sequence isolated from the Sargasso Sea
agtgtgagaactattgctatggatgcaacagaaggtttaaaaagaggtgacgaagtgacagatacaggagctccaattaaagtaccagttggtcccgaaaccttaggaagaattataaacgtaattggagaacctattgatgaaaaaggaaaagttcaaaccaaagaaagttggcctattcatagatctgcaccagagtttaatgatcaatcaacagaaactgaaattttagtaactggtatcaaagtagttgacttgttagcgccatatgcaaaaggtggtaaaattggtttgtttggtggtgctggagtaggtaaaaccgttcttattatggaacttattaataatgtggcaaaagcacatggaggattttcagtttttgctggagttggtgagagaactagagaaggaaacgatctttatcacgaaatgatagagtcgggagtaattaaaacagaaggtactggatcaaaagctgcgttagtttatggtcaaatgaatgaaccaccaggagcaagggctagagttgcattatcaggtttaactgttgctgaatatttcagagatcaagagggtcaagatgtactttttttcgtagataacatctttagatttacacaagctgggtcagaagtttctgctttgttaggaaggataccatctgctgtaggataccaacctactttagctacagatatgggaaatcttcaagaaagaattacaactacaaataaaggatcgattacatctgttcaagctatttatgttccagcagatgatttaacagatccagcacccgctacatctttttctcacttagatgcaacaacagtgttgtcgagacaaatagcagaaattggaatttatccagctgtagacccgttagattctacatctagaattttagatccaagaatgt

SEQ ID NO: 273082 - DNA, 829 bp, Unknown
  Bacterial polypeptide expressing nucleotide sequence isolated from the Sargasso Sea
tgcttattcaggctgctctatgggcgagtacttccgtgatcgaggagaagatgcactcatcatttatgatgatttaacgaaacaagcgtgggcttataggcaaatttcgcttttactgcgtcgtccaccaggaagagaagcttatcccggtgatgtattctacttgcactcacgattattggaacgcgcagcacgagttaatgcggactatgtagaaagcgctacaaatggtgaggtaaagggcaaaactggttcgttgacagccctcccaatcattgaaacacaagctggagacgtgtcagcgtttgttcctaccaatgtaatctctattacagacgggcagatcttcttagaaacagacatgttcaacgctggtaatcgaccggctatgaatccagggatctcagtttcccgagttgggggcgatgctcaagttaagtttatgagtaaaattagtggcggcatcaaactcgctctagctcagttcagagaattggcggctttctcacaattcgcatctgatctcgatgaagcaactcgcaggcagctggagcatggggagcgaatatccgagctaatgaagcagaaacaatattcgccgatgagtgttgctgaaatgggtgtcgtgctcttcgctgccaatgagggttatttagaagatgtagacacagaaaaggttttggactttgaagccgcattattatcctatatgaattcagaacattcagattttatggcggaagttaatgagaaaggtgaatacactgatgccgttgtggaagcaatgactaaggcattagatacttttaaatctacgcaaacctggtag

SEQ ID NO: 273083 - DNA, 475 bp, Unknown
  Bacterial polypeptide expressing nucleotide sequence isolated from the Sargasso Sea
tatgagtaaaaagggaaaaataacacaaattattggtgcagtagttgacgttaattttgaaactgacttaccagaaatttatacagctttagaagtaattaattcaggaaataaattaattttagaagttgcacaacatctaggggaaaacgatgttagaacaattgcgatggatgcaacagagggacttaaacgaggtgacgaagttttaaatactggagcaccaattagtgtaccagttggcccagaaacacttggaagaattattaatgttgttggtgagtcaatagatgaaaaaggtgaagttaagacaaaagaaagatggccaatacatagaacagcgccaaaatttacggatcaagcaactgaaactgaacagttagttacaggtataaaagtaatcgatttattagctccttacgcaaagggtggaaagattggattattcggaggagcaggagttggaaaaacagtt

SEQ ID NO: 273084 - DNA, 904 bp, Unknown
  Bacterial polypeptide expressing nucleotide sequence isolated from the Sargasso Sea
agagtagttgatggattagggaatccaattgatggaaaaggagcattaaataaaggagttaaaaaaagcagagtagaagtaaaggctccgggaataatcccaagacaatcagttaatgaaccaatgcaaactggtttaaagtcgattgatagccttgttccaataggaagaggacaacgtgaattaattattggtgacaggcagacaggaaaaacagcagtagcaattgatgctataattaatcaaaaaaaaattaacgagtcaggtgatgaaaaacaaaaactttactgtatttatgttgctgtaggtcagaaacgatcaactgtaagacaaattcaaaaaactttagaggaagctggagcaatggaatacactacgattgttgcagcaacagcatcagactctgcaccactacaatttttagctccttatactggttgtgcaatgggtgaatttttcagagataatggtatgcatgcattaattatttatgatgatctttcaaaacaagcagtagcatatagacaaatgtctcttattttaagaagaccaccaggtagagaagcttatccaggggacgttttttatcttcatagcaggctccttgaaagagctgcaaaattaagtgatgagcatggcggtggatctttaacagctcttccaattattgaaacacaaggtggagacgtatctgcatatattccaacaaacgttatttcgattacagatggacaaatatttttagaaacagaattatttaatcaaggtattaggccagcaattaacgttggactatctgtttctagagttgggtctgcagctcaaacaaaagcaatgaaaaaggtatcaggatcaatgaaacttgaactagctcaatacagagaaatggctgcctttgcacaat

SEQ ID NO: 273085 - DNA, 707 bp, Unknown
  Bacterial polypeptide expressing nucleotide sequence isolated from the Sargasso Sea
tatgagtaatgataattttggacaagtaatacaggttttgggaccagtcgttgatgtagagttctcttctgatgaactcccaccaataaatagtgcattaagattgtctaatcaattaattaatgatcaagaatggaatcttgtaatcgaagtcgcacaacaagtaggaagcaaaagagtacgatgtatcgctatggatacaactgatggtatacagaggggagaaaaagttctcgatacagggaaacccataagtatcccagtaggaaaatccgcacttggtagaatgatgaacgttgtcggcgaatctatcgatggtggaggaccaatagaatctgataaacttagcccgatacataagcctgcccctacttttcaagagcaaagtacgaaaacagaagtttttgaaacaggaatcaaagttatagatttgctagcaccatttttaaaagggggaaagattggactttttggtggagctggagttggaaagacagttcttcttatggaattaattaataacgttgctaaagaatatggtggttattctttcttcgctggcgtaggagaaagaacaagggaaggaaatgatttatatatggaaatgaaagaatcaggagttcttgggaatacaggtttagttttcggacaaatgaatgagccgcctggagcaagagcaagagttgcattaacaggtttgacattag

SEQ ID NO: 273086 - DNA, 685 bp, Unknown
  Bacterial polypeptide expressing nucleotide sequence isolated from the Sargasso Sea
cttttttttgttgataatatttttagattcacacaagcaggttcagaggtatctgctctacttggtagaataccttcggcagtcggatatcaacctactttagccactgatatgggtaatttacaagaaagaataacatcaacagacaaagggtctataacatctgtacaagcaatttatgtacctgcagatgatttaacagatcctgcaccagctacatctttttcacacttagatgccacaacagtgttgtcaagacaaattgcagaaataggtatttatcctgcagttgatcctttagactctacatcaagaatattggatccaagagttgtgggagaagagcattacagagtagcaagggatgtgcagagaattctacaagcatataaatctttgcaggatattatagctatattaggaatggatgaattatctgaggaagataaattgacagtagctagagcaagaaaaattcaaagatttctctctcaacctttttttgtggctgaagtatttacaggatcaccaggaaaattagttgacttagactcaaccattaaaggcttcgacgcaatttgcaaaggtgaatatgatcatttaccagaagcagcattttatatggtaggtggaattgaagaagtagtagaaaaagcagaaaaacttgctaaggataataaatagt

SEQ ID NO: 273087 - DNA, 595 bp, Unknown
  Bacterial polypeptide expressing nucleotide sequence isolated from the Sargasso Sea
gatgaacacggtgggtggatcacttactgctcttccaattattgaaacacaaggtggagacgtatctgcgttcattccaactaacgttatttcaattacagacggacaaatttttcttgaaacagaactatttaaccaaggtataagacctgcaattaacgtaggtttatcagtatctagggttggttcatccgcgcaaacaaaggccatgaaaaaagtttctggttcaatgaaattggagttagcacaatacagagaaatggcagcttttgctcaatttggatctgatttagatgcatccactcagcaacttttaaatagaggctctaaactaactgaacttttaaaacaaaaacaatattcacctatgactgttgcggaacaagttatttcagtattttgtggagtaaaaggttatctggatgatatagatctaaaagatgttgctgaatttgagagcaagattattgaaaaatgtaaatcagataagcctgaaattatagagtcaattttaacttcaggaaaacttgaggaagataaagaaaaattacttgttgaggtaatcactcaattaaaaggaaattttaaatcttaa

SEQ ID NO: 273088 - DNA, 781 bp, Unknown
  Bacterial polypeptide expressing nucleotide sequence isolated from the Sargasso Sea
catggtatctatacgccctgatgaaatcagttcaatcttaaaacaacaaataactgattatgaccaatctgtaagtgttagcaatgtaggaactgttctgcaaatcggtgatggcattgcaagaatatatggcttagatcaggtcatggcaggtgaattattggaatttgaggatggtactgaaggtatagctttaaatcttgaagatgataatgttggagccgttttaatgggcgaggcacttggtgttcaagaaggaagtaacgttaagtcaacaggtaaaatcgcatctgttccggttggtgaggcaatgcaagggagagttgttaatcctttaggacagccaatagatgggaaaggggaaatccctacaagtgatactagattgatcgaagaaatggctcctggaataattaagagaagatcagtacatgaacctatgcaaacaggtataacatcaattgatgcaatgattcctgtaggaagaggtcaaagagaattaattattggtgatagacaaactggaaaatctgcaattgcaattgacacaataatcaatcaaaaaggtcaagatgtagtttgtgtttatgtagctattggtcagaagtcagcttcagtagctaatattgtagaggttttaagagagagaggagctttagattataccgttgtagtaagtgcaggggcttcagaaccagctgcattgcagtacttagcaccttatactggcgcagcaattgctgaacattttatgtatcaaggtaaagcaacacttgttatt

SEQ ID NO: 273089 - DNA, 726 bp, Unknown
  Bacterial polypeptide expressing nucleotide sequence isolated from the Sargasso Sea
aagcagaatattttagggatgaggaaaaccaagatgttttatttttcgtggacaacatcttccgttttacacaagcaggttctgaggtttccgctctccttgggcgtataccttcagcggtgggttatcaacctactttggcaacagatatgggtgcacttcaggaaagaattactactaccaacaaaggttcaattacctctgtgcaagcaatttatgttcctgccgatgatttaactgacccggctcctgcaacatcattttctcacttagatgcaaccactgtgttgaacagatcgattgcagaacttggaatttatccagctgtggacccgctagactctacttctagaattttagaaccgagaactttgggtgataagcactatcaagtagcaagagatgttcaaaaaactcttcaaacgtataaaagtttgcaagacattattgcgatcttgggtatggacgaattatctgaagaagataaattagttgtatcaagagctagaaaaattcaaagatttttaagtcaacctttctttgtggctgaagtcttcacaggctcaccaggaaagtttgtttctttagaggatacaattaaaggttttgatggattggtcaaaggagactatgaccatattccagaggctgctttttatttagttggaacaattgaagaggccttggaaaaagcaaaaaaaatggctgaggaagcaactaagtaaa

SEQ ID NO: 273090 - DNA, 498 bp, Unknown
  Bacterial polypeptide expressing nucleotide sequence isolated from the Sargasso Sea
ctgatgacttaacagatccagcaccggcaacatctttttcacacttggatgctacaacagtgttatctagacaaattgccgaaataggaatttatcctgccgtagatccgttagactcaacttcaagaattttagatccaagagtagttggtgatgagcattacagagtagctagagatgtacaaaaaattttacaagcttataaatcccttcaagatataattgcaatacttggcatggatgaactttcagaagaagataaattgactgtagctagagctagaaaaatacaaagatttctttcccaaccattttttgtggcagaagtatttactggttctcctggaaaattagttgatcttgatgacacaatcaaaggttttgatgcaatttgtaaaggggaatacgatcatctacctgaagcagcattttatatggtaggtggtattgaagaagtaatagaaaaagcagaaaaactatcaaaagacagcaaataat

SEQ ID NO: 273091 - DNA, 883 bp, Unknown
  Bacterial polypeptide expressing nucleotide sequence isolated from the Sargasso Sea
agaccggcaccagtatttaatgatcaatcaacagaaacagaaattttagtaactggaattaaggtagttgacttgttagctccttatgcgaagggtggtaaaataggtttattcggcggtgcaggagtaggaaaaacagttattattatggaacttataaacaatattgctaaagcacatggtggattttcagtttttgctggagttggagaaagaacaagagagggaaatgacctttatcatgaaatgatagagtcaggagtaattaaaccagaaggacccggatcaaaagctgccttagtttatggtcaaatgaatgaacctccaggagcaagatcaagagtcgcattaaccggactaactgttgcagaatattttagagatcaagaaggacaagatgtacttttctttgtagataacatttttagattcactcaagcaggatctgaggtttcggcattacttggaagaattccatcagcagtgggataccaacctactttagcaactgacatgggaaatttacaagagagaattacaacaaccaataaaggctcaataacttctgtgcaagcaatttatgtacccgcagatgatttaactgacccagctccagcaacatctttttctcacctggacgcaacaacagtgttgtctagacagattgctgagcttggaatttatccagcagtagatccattagactctacatctagaattttagatccaagaatagtaggagatgaacactacagagttgctagagaagttcaaaaaattcttcaaacttataaatctttacaagatattattgcaattttaggcatggatgaactttcagaagaagataaattaacagttgcaagagcaagaaaatccaaag

SEQ ID NO: 273092 - DNA, 805 bp, Unknown
  Bacterial polypeptide expressing nucleotide sequence isolated from the Sargasso Sea
tatggaaaaaaaatttggaaaaattacacaagtaattggggcagtagttgatgttcagtttcagggtatgttacccgaaatattaacagcgttggagtgtgataattctggtaatagacttgtattagaggttgctcagcatttaggagaaactactgtaagaacaattgctatggatagtacagagggtcttaaaagaggtgataaagtcacagatactggttctcctattaaagtgccggtaggacctgaaactctaggaaggataataaatgttattggagaaccaattgatcaaaaaggtaaagtttccacaaaagaaaattggcctattcatagaccggctccaaagtttactgatcaatctacagaaacagaaattttagtaacgggaataaaagttgtagatttacttgctccatattccaagggaggaaaaataggattatttggtggggcaggagtaggtaaaacagtaattataatggaattaataaataatatcgccaaagcacatggtggcttttctgtttttgctggtgtaggtgagagaacaagagaaggaaacgacttgtatcatgaaatgatagaatctggtgtaattaaacccaatggaaaaggatccaaagcagctttagtatacggtcaaatgaacgaacccccaggtgcacgtgccagagttggtttaacaggcttaacagttgctgagtattttagagacaaagaaggtcaagatgttttatttttcgtagataatatatttagatttactcaggcaggatcagaagtttcagctcttcttggt

SEQ ID NO: 273093 - DNA, 778 bp, Unknown
  Bacterial polypeptide expressing nucleotide sequence isolated from the Sargasso Sea
catgggtgaatattttagagacaatggtatgcatgctttgataatttatgacgatttatcaaaacaagctgtagcttacaggcaaatgtcacttttattgagaagacctccaggaagagaagcgtatccaggtgatgtattttatttacatagcagattgcttgaaagagcagccaagttaagtgatgaacatggtggtggatctctgactgctttacctattattgaaacacaagggggggatgtttcagcatttataccaacaaatgtaatttctattaccgatggtcaaatatttttagaaacagagctttttaaccaaggtattagacctgcaataaatgttggattatcagtttcaagagtgggatcttcagcccaaactaaagcgatgaaaaaagtttctggttcaatgaaattagaattagcacaatacagagagatggcagcatttgcacaatttggttcagaccttgatgcatcaactcaaaaattacttaatagaggttcaaaattaactgagcttctaaaacaaaatcagtattcaccaatgactgtggcagaacaagtaatttctattttctgtggcgtaaaagggcatcttgatgatatcgaacaaaaagatatctcaagtttcgaaaataaaataattgaaaaatgtaaagctgaaaaacctgaaatcatcgaagctattactacatctggtaaacttgatgatgaacatgagaagattttaaacgaaattattctccaacttaaaaaagattttagcgcttaa

SEQ ID NO: 273094 - DNA, 778 bp, Unknown
  Bacterial polypeptide expressing nucleotide sequence isolated from the Sargasso Sea
tatggcaagtttagatgatctcaaaaaaaggatagctagcgtaaagtctacacaaaaaatcacaaaagctatgaaaatggttgcggcagcaaaattaagaagagctcaagaaagtgctgagagagggagaccttattccgaaaaaatgaataatattattttaaacttgtctaatggtgtatccgataaggaaaatgccccaaaattattatctggcacaggtgagaataaaattcatttatgtgtagtaatgacatcagatagaggcctttgtggaggttttaattctaacattattaaaaaagcgaaaagttatttttcaaaaattttagacgaaggtaaacaattaaaaatcattaccgtaggttcaaagggaaatgaccaactaaaaagagtttatggaggtaaaattattgaaaatatatcttttaaagaatctaaaaatgcaaattattttgatgctgacaaagttggaaggatcataattgaaaaatttgaggctggtgagtttgatatatgtactattttttataatcaatttaaaaatgtaatcactcaaatacctcaagctcaacagattatacccttaaacaatgaagaggatcataataattcagacgaaagttatgaatttgagccagatgaagacgaaattttaagcaatttactaccaaaaaatatttcaacacaaatatttaaggcaatgttggagaattcagctagcgaacaagggtccagaatgagtgcaatggacaatgctacccgtaacgcaggtgaa

SEQ ID NO: 273095 - DNA, 812 bp, Unknown
  Bacterial polypeptide expressing nucleotide sequence isolated from the Sargasso Sea
ggtgatggcattgcaagaatatatggcttagatcaggtcatggcaggtgagttgttggaatttgaggatggtaccgaaggtatagctttaaatcttgaagatgataatgttggagccgttttaatgggagaagcacttggtgttcaagaaggaagtaacgttaagtccacaggtaaaatcgcatctgttcccgttggtgaagcaatgcagggtagagttgttaatcctctcggacaaccaatagatgggaaaggggaaattccaacaagtgatactaggttgattgaagaaatggctcctggaataatcaagagaagatcagttcatgaaccaatgcaaacaggtatcacatctattgatgcaatgattcctgttggaagaggtcaaagagaattaattattggtgatagacaaactggaaaatctgcgattgctattgacacaataatcaaccaaaaaggtcaagatgttgtttgtgtttacgtagctattggtcagaagtcagcatcagtagcaaacattgtagaggtcttaagagagagaggagccctagattatacagtcgtagttagtgcaggagcttcagaaccagctgctttacagtacttagcaccttatactggtgcggcaatcgctgaacattttatgtatcaaggtaaagcaacacttgttatttatgatgatctaacaaaacaagctcaggcttatagacaaatgtctcttcttttaaaaagaccaccaggaagggaggcttatcctggagacgtgttctacttacacagtagattactagaaagagctgcaaaactttc

SEQ ID NO: 273096 - DNA, 901 bp, Unknown
  Bacterial polypeptide expressing nucleotide sequence isolated from the Sargasso Sea
aaccaaaaaggtgggagatttaatttgcatatatgttgctattggacaaaaagcagggaaggtagctcagattgttggccaattggaagaaaatggagccatggagcatacgatcgtggtttctgcgagtgcttctgagtccgctgctttgcaataccttgctccttatgcaggatgtgcaatgggtgaagagattatggaatctggaagagatgccttaatcgtttacgatgatcttagtaaacatgcgtgggcgtataggcagatttcattgttactcagaaggcctcctggccgagaggcatatccaggagacgttttttatcttcatagtcgattattagagcgtgctgcaaagttagctgctggtggttctcttacagccttgccaattattgaaacacaagcgaatgatgtttccgcttatattccgacaaacgttatctcgataactgatggacaaatttacttagaacccgatctatttaatgctggcatacgtcctgcgttaaacgttggtatttcggtaagtcgagtcggaagtgctgcgcaaacgaaaatcatgaaagatgttgctggccgcttaaaactagatcacgcgttatttagggaacttcaggcgtttgctcaatttggaactagcgacttagatgctgtcaccagacgtcaattagaacgggggctcagagcaaatgaggtcttaaaacaaggtcaatttgtacctatgagtcttgctgaagaagtagctattctttttggcttaactgaaggattgatagatgatgttgaagttgaaaaggtgcaatcttttgaaggggcactgtgttcctatttacagagtaataaaccagaacttctttccacaattgaggatcaaaaagaattgactgagaaacccgga

SEQ ID NO: 273097 - DNA, 678 bp, Unknown
  Bacterial polypeptide expressing nucleotide sequence isolated from the Sargasso Sea
ttgttgataatatattcaggtttacacaggctggttctgaggtttctgctcttcttgggagaatgccttcagcagtagggtatcaaccaacactggctactgagatgggaacaatgcaagaacgaattacttctacaaaaaaaggatctattacatcagtacaagcagtttatgtcccagcagatgatttaactgatcctgctcctgctacaacttttgcacacttagatgctactactgtattatcaagaaaaatctcagaacttggaatatatcctgctgtagatcccctagattcaacttctagaattctaactcccgaaatattaggagatgaacattataattgtgctcaaagagtaaaggagttattacaaaagtataatgagcttcaagatataattgcaattctaggtatggaggagctatcagaagaagataagcttgctgtagctagggcaagaagagtccagcgttttctctctcaaccatttcatgttgcagaacaatttactggaataccaggcgcactagtagacataaaggatactatcaaagggttcaatatgataatggacggtgagctagaccatcttccagaagctgcttttaacttaaaaggaaatattgaagaggcaattgaggcaggagagaagatgttatcagaagcaaaataaa

SEQ ID NO: 273098 - DNA, 808 bp, Unknown
  Bacterial polypeptide expressing nucleotide sequence isolated from the Sargasso Sea
atgaagatggttgcagcatcaaaacttagacgagctcaggaaagtgcagaaaaaggaagaccttactctgataaaatgaataatataattctaaacctatctagcagtgttacggataaagaaaattctcctaaattattgataggctcaggtgaagacaaagtccatttatgtgttgtaatgacttctgacagagggttatgtggtggatttaatacaaacattattaaaaaagcaaaatcattttttcaaaaaatttctaaaaatggaaaaactttaaaaattattaccgtaggatctaaaggttatgatcaactaaaaagatcttttaaagataatataattgaaaaaatttcattcaaagattctaaatatgcaaactattttgatgcagacaaagtaggtaaaattattattgataaatttgaaaaaaatgaatttgacgtttgtacaattttttataatcaatttaaaaatgtgataactcaagtaccacaagaacaacaaattatacctttaaaaacaaataatatagataaaaattcctctgaggataattatgagtttgaacctgaggaagatgaaattttaaataatcttttaccaaaaaatatttctactcaaatttttagagcaatgttggaaaattcagctagcgaacaaggctcaagaatgagcgctatggataatgcaactagaaatgcaggagaaatggttgacaagcttactattcagtacaatagaagtcgtcaagcagcaataactaaggagttaattgaaattatatcaggagcagaaagtttataat

SEQ ID NO: 273099 - DNA, 568 bp, Unknown
  Bacterial polypeptide expressing nucleotide sequence isolated from the Sargasso Sea
gctttaccaataatagaaacacaagctggagatgtttctgcttacattccaactaatgtaatttcaattacagatggacaaatctttttagaaacagaattgtttaatcaaggtatacggccagctgttaatgttggtttgtctgtatctagagttggttcggcagctcaaacaaaagctatgaaaaaagttgctggatcaataaaattggaattggcccagtacagagaaatggctgcgttcgctcaatttggatcagatttagatgcatcaacacaaaaattattaaacagaggatcaaaattaacagagctattaaaacaaaatcaatactctcctatgacagtagctcaacaagttatagcaattttttctggtgtaagaggctttttagatgatgtggatttaccaaaaattaaaagtttagaaaaagatatttacgaagaagttaaatcatcaaatcctgatattattgacagcattaatagcacaggaaaattgaatgaagatatagaaaaaagattaactgcagttatcgaagaatttaaaaaaaagaaaattaaataat

SEQ ID NO: 273100 - DNA, 782 bp, Unknown
  Bacterial polypeptide expressing nucleotide sequence isolated from the Sargasso Sea
agaagttgaacaacttggggttggaaataattgggcacgatgcttagctttaggttctacagacggattggcaagaggacaggaagttattgatactggagctgcagtacaagttcctgttggtgatccttctttaggtagactgtttaacgtaaaaggtgaagccatagatgacggagaccctattccttcagatgcggagagatggccaattcatagaccagcaccttcatttgatcaacaaagaagtactactgaaatattagaaactggtattaaagttattgatcttatgactccttttgctaaaggaggaaaagttggagcttacggcggtgctggagttggaaaaactgttattattacagaactaattcgaaatattgctcaagaacattcaggagtatctgtatttgcgggtgttggagaaagatcaagagaaggaaatgatctttggaatgaaatgaaagaatatggtgtgttggattcaactgcattggtttttggtcaaatgaatgaacctcctggaacaagagcaagaattgctttaacagggttaacaatggctgaatattttagagatgtaagaaaacaagatgtacttttattcgtagataatgtgtatagatatattcttgccgggatggaagtttcagcgttattaggtagaatgccttctgctgttggatatcagcctacattaagtacagaaataggagatttggaagaaagaattacatctactaatgatggttccattacttctttccaagctgtatatg

SEQ ID NO: 273101 - DNA, 659 bp, Unknown
  Bacterial polypeptide expressing nucleotide sequence isolated from the Sargasso Sea
tatggaaataaaaactgatcaattaacacaattactcagagaacaaattgaaaaatttgatgggtcggtagacatatcggaagtaggtgaagttattcaagttggagatggtgttgcccgtgtatcagggctagagaatgtaatgagttctgagctggtagaacttccaaatggtgtgtttggaatggccttaaatcttgaagaagataatgttggtcttgttctttttggagaatcccgtttggttaaagaaggagacctagccaagaggacaggtcgtgtagtggaagtgcccgttggagattctatgctcggtagagtggtaaatcccctaggacagcctattgatggtaaaggaacaataaatacagaacattcgttacctatagaaagaaaagcattgggcgtgatggcacggcaccctgttaaagagccactgcagacgggtataaaagcaattgatagtatgattccaatcggtagaggtcagagagaattaattatcggcgatcgccaaacagggaaaacagctgttgcaattgatgcaattatcaatcaaaaatatacccatgaaacagataatcctgtctattgtatatatgtggcgattgggcaaaaagcttcaacagtggccgctctggtcactgaattagagaaca

SEQ ID NO: 273102 - DNA, 894 bp, Unknown
  Bacterial polypeptide expressing nucleotide sequence isolated from the Sargasso Sea
aatgttggtcactggagtaaaggttatggacctcctttgtcccttccttaaaggaggaaaaattggattattcggtggagcaggggttggaaaaactgttgtgattatggaactgatcagaaatattgcagcagaacatggcggattctcagtttttgcgggggttggagagcgaacacgcgaaggaaacgatctatggaatgagatgaaggaatccggggtactggacaaaacaagccttgtatatggtcaaatgaatgagcctccaggtgctcgtgcccgggtggcactgactggcttaaccgttgcagaatattttcgtgatgaagaggccgcagatgttctaatgttcatagataatattttccgatttactcaggcaggctcagaagtttccgcactgcttggacgaataccttctgccgtgggttaccaaccgacgctttctactgaaatggggaacttacaggagcgtattacctcaaccaacaaagggtcgattacttccgttcaagcgatttacgttcctgctgacgacctaactgatcccgcaccggcaactactttttctcatcttgatgcaacagtcgtcttaagccgtgcaatcaccgaactgggtatatatccggcagttgatccgcttgattcaacatcacgcattctttctgcggatgttttgggtgaagatcactatagtgttgcacacgaagtccaaatactcctgcaacgctataaggacttgcaggacataattgcaatacttggaatggatgaattgtctgaagaagacaaagtcgtagtgagccgcgccagaaaagtacagagattcctctcccagccattctttgtggcagagacttttactgggacttcaagtgaatatgttgatattaa

SEQ ID NO: 273103 - DNA, 548 bp, Unknown
  Bacterial polypeptide expressing nucleotide sequence isolated from the Sargasso Sea
aatggcaagcttagacgatttaaaaaaaagaatatcaagtgttaaatccactcaaaagattactaaagcaatgaaaatggttgcagcatctaaattaagaagagctcaagagagtgcggaaaaaggaagaccatattctgacaaaatgaataatataattctcaatctttcaagtagtatttcggacaaagaaaattctcctaaattactttcaggctcaggcgatgataaagttcacttatgtgttgttatgacgtctgatagaggattatgtggaggctttaatacaaatattattaaaaaagcaaaatcttattttcaaaaaattttagatgaaggaaaaaatttaaagatcattactgttggttcaaaaggttatgaccaattaaaaagagtttataaggataaaatcattgaaaaaatttcatttaaagaatccaaatacgtcaattattttgatgcagacaaagtgggaaaaattattattgaaaagtttgaaaaaaaagaatttgatgtatgtacaattttttataatcaatttaaaaatg

SEQ ID NO: 273104 - DNA, 652 bp, Unknown
  Bacterial polypeptide expressing nucleotide sequence isolated from the Sargasso Sea
actcaagctggttcagaagtatccgcattattaggaagaataccttctgctgttggatatcaaccaaccttatctacggatatgggggcactacaagaaagaattactactactaaaaaaggatccattactagtgtccaagcaatttatgttcctgcggatgatttaactgaccctgctcccgcaacttcttttgcccatcttgatgcaacgactgtattaagcagatctcttgctgaattagggatatatccagctgttgacccactagattcaacttctagaattttagatcctacaattgttggcgatgaacattatcaagtagcaagaaaaattcaggaagttttacaatcttataaatcattacaagatatcattgctattcttggtatggatgaactttcagaagaagacaaattgacagtatcaagggcaagaaaaatccaaagatttttatcacaacctttctttgttgcagaagtttttacaggaactcctggaaaatttgttaaattagaagatactatcaagggatttaaaagcattgtagatggcgagcatgataatatacctgaatcagctttttatatggtaggaactattgaagaagcgctagaaaaatcaaaaaaaatatctaaagaagaataat

SEQ ID NO: 273105 - DNA, 898 bp, Unknown
  Bacterial polypeptide expressing nucleotide sequence isolated from the Sargasso Sea
aaattggccaatacatagatcggcaccaaaatttacagatcaatcaactgaaacagaaatattagtaacaggaataaaagttgtagatttacttgctccctactctaaaggcgggaaaataggtctattcggtggagcaggcgtgggtaaaacagtaattattatggaattaataaataatattgcaaaagcccatggagggttttcagtttttgcaggtgttggagaaagaaccagagaaggaaatgatttgtatcatgagatgatagagtctggcgtaattaaaccagatggaaaaggttctaaagcagcactcgtttacggtcaaatgaacgaaccacctggcgcacgtgcaagagttggcctaacaggattaactgtagctgaatattttcgggataaggaaggacaagatgtattattttttgttgataatatatttagatttactcaagcaggatcagaagtttcggcgcttttaggaagaataccttcggctgtaggatatcaaccaactttagctacagacatgggaaatttacaagaaaggattacaacaactaacaaaggttcaattacttcagtccaagcaatttatgttcctgctgatgatttaacagaccctgctccagcaacatcttttgcacacttagatgcaacaacggttttatctagacaaatcgcagaacttggaatctatcctgctgttgatcctttagactctacttcaagaattttagatccaagaatagttggagaagaacactataaagttgctagagaagttcaaaaaatattacaaacttataaatcattacaagatataattgctattttgggtatggatgaactgtcagaagaagataaattaacagttgcaagggcaagaaaaatcaaa

SEQ ID NO: 273106 - DNA, 829 bp, Unknown
  Bacterial polypeptide expressing nucleotide sequence isolated from the Sargasso Sea
agctctagaatgtaaaaacaatggcaatagactagttttagaagttgcacagcatttaggagagtcaactgctagaactatagcaatggatgcaaccgaaggattgaaaagaggtgatgaggtcgtaaacactaatgcccctatcaaagttccagtcggacctgaaactttaggaagaatcattaatgtagttggagaaccaatagacgaaaggggtgaagtaaaaactaaagaaagctggccaattcataggcctgcaccagaatttaatgaccagtctacagaaacagaaattcttgttacaggtattaaagtaattgatttattagctccatatgcaaaaggtggtaaaattggtttatttggaggtgctggtgttggaaaaacagttttgattatggaattaattaataacgttgctaaagcacatggtggtttttcagtttttgctggtgtaggggaaagaaccagagaaggaaatgatctgtatcatgagatgatggagtcaggagtaataaaacctgaaggtcctggatctaaagcagcattagtttatggacaaatgaatgagcctcccggggcaagagccagagttgctcttacaggactaactgttgctgagtacttcagagatcaagaaggtcaagatgttctttttttcgtagataatattttcagattcactcaagcaggttcagaggtttcagcccttttaggtagaataccttctgcagtaggatatcaaccaactctggcaactgatatgggtaatttacaggaaagaattacaacaacaaacaaaggatctattacatcagttcaagcaatt

SEQ ID NO: 273107 - DNA, 916 bp, Unknown
  Bacterial polypeptide expressing nucleotide sequence isolated from the Sargasso Sea
attgaagtagttgcgccaggggttattgccagacaatcagttgatcaaccagtgcaaattggacttaaatcaatcgatgcaatggttccaataggaagaggccaaagagagcttattattggtgatagacaaactggaaaaacagctgtagcaattgacgcaataattaatcaaaaaggtacaggaattaaatgtatttatgtagctattggtcaaaaacaatcaacaatagctaatgtcgtagcaaaacttgaagagtatggagcaatggagcacacaattgttgtttcagcggcagccgctgacccggctgcgatgcaatacctctcagcatattcaggttgtgcaatgggagaatattttagagatacagggcaggatgcattaattgtttacgatgatttatcaaagcaagcagttgcttacagagagatatcactattgcttagaaggcctccaggtagagaagctttccccggagatgttttttatcttcactcaagacttttagagagagcagctagagtgaatgcggaatatgtagaaaaaattacagaaggaaaggtaaaaggtaaaacaggatctctaacagccttgccaattattgaaacacaagccggagatgtatctgcttttgttccaactaatgtaatttcaattaccgacgggcagatatttttagaaacagatctttttaattcaggtgttagaccagctattgacccaggactttccgtatcaagagttggtggagctgcacaaactaagataattaaaaaacttagtggaggaattagaacagaccttgctcagtacagagagcttgcggcattctcacagtttgcatctgatctagatgacgcaacaaaagaacaactagaacacggtaagcgaattacagagcttctaaacaaaa

SEQ ID NO: 273108 - DNA, 590 bp, Unknown
  Bacterial polypeptide expressing nucleotide sequence isolated from the Sargasso Sea
attagctactgacatgggtaacctacaagaaagaattactactacaaacaaaggttcaattacatctgtacaagcaatttatgtacctgctgatgatttaactgaccctgctccagctacatcgtttgcacacttagatgcaacgacagtactttcaagacaaattgctgaaattggtatttatccagcagtagatccacttgattctacatcaagaattttagatccaagaattgttggagatgagcattatagagtagcaagagatgttcaaagaattctacaatcctataagtcactacaagatattatagctattcttggtatggatgagttatccgaagaagataaattagttgtagcaagagctagaaaaatccagagatttttgtctcaaccattcttcgttgcagaagtatttactggttcaccaggaaaacttgttgatcttgattcaacgatcaaaggttttgatgcaatctgtaaaggtgagtatgatcacttacctgaagctgctttttatatggttggaacaattgaagaagctatagaaaaagctaagaaaatggaacaagaagctgctgcttaat

SEQ ID NO: 273109 - DNA, 772 bp, Unknown
  Bacterial polypeptide expressing nucleotide sequence isolated from the Sargasso Sea
atattttagagataacggtatgcatgcactgattatttatgatgatttatctaagcaagctgttgcttataggcaaatgtcacttcttttaagacgccctccaggacgtgaagcatatccaggagatgtattttatattcatagtcgtctgcttgagagggcagccaagatgagtgatgaacatggtggtggaagcttaacagcattaccaattattgagacacaagcaggtgacttatctgcttatattccaacaaacgtgatttctataactgatggtcaaattttcttggaaacaaacttgttttttgcaggtattcgtcctgctattaatgttggtttatccgttagtcgtgttggttcagctgctcaaaccaaagccatgaaaaaaatagctggtcctgtaaagctggaattagctcagtatcgtgagatggcagcatttgcacaattcgcgtctgacttagatgcatctactaaacagttactagatcgtggagcaagattagtagaaatattgaaacaaggtcaatactctccgttaactgtttcagagcaagttgtatctatttatgcaggtgttcgaggatatctagacaaagtagctgttaacgatgttgttcgttttgaattagaagttttgaatgaaattagaaataaccactcagatttattagattccattgctaatgaaaaagaattatcaaaagatagtgatgataagttaaaatcaatcttagatagtcttgttgaaaaatttgcgagtaattaa

SEQ ID NO: 273110 - DNA, 551 bp, Unknown
  Bacterial polypeptide expressing nucleotide sequence isolated from the Sargasso Sea
aatgccaagcttagatgatttaagaaaaagaatttctagtgttaagtccacccaaaaaataacaaaagcgatgaaaatggtggctgcggccaaacttcgaaaagcacaggaaatggctgaaaaaggaagaccttatagtgataaaatggatgtaataattcaaaacttaagtaaagcaataaacgatccttctaatgcaccaaaacttttagttggaacaggagaggacaaaacacacctttgcgtggttatgactgccgacagaggcctttgcggaggatttaatacaaacatatgtaagttagccaaaaaatattttgatgaagctattaaaacatctaaaaatttaaaaataattactgttggtactaaaggccttgaccaattaaaaagagattatggcaaatatatcattaaaaaaataaatataaaagacaaaaagaaattaacattttcggatgcagaagaaattggtaagcaaatcgttgaattatttagaaataaagagtttgataaatgtttcatattttataataaatttaaaaatgtga

SEQ ID NO: 273111 - DNA, 426 bp, Unknown
  Bacterial polypeptide expressing nucleotide sequence isolated from the Sargasso Sea
aatgccaagtctagacgatctaaaaaaaagaattaagagtgttaaatctactcaaaaaattactaaagctatgaaaatggtagcagcggcaaaacttagaaaagctcaagaaaatgctgaaaaaggacgtccttatagccaaaaaatgcaaaatataattctgaatctcactaaatcacttaacgatcctcagaatgctccaaagttacttgttggaacagggaaagataaaatatacttgtgtgttgtcttaacggcagatagaggcttgtgtggcggtttcaattcaaatatttgcaagcttgcaaaaacaaaatttcaagagatcctaaaagatggaaaagatcttaaaataataactgtaggctctaaaggattagattcaattaaaagagaatatggaaaatttgtgattaagaaatttag

SEQ ID NO: 273112 - DNA, 787 bp, Unknown
  Bacterial polypeptide expressing nucleotide sequence isolated from the Sargasso Sea
aaaagagaaaattgctggccttgatctatcagctgaaagaaaaaatgaaggcatagttgtaagtgtctcagacggtattgtaagaattcatggtatgggtgacgtcatgtatggtgaggttatcgaatttgaaaatggtacaaaaggaatggcacttaacctagaacaagattctgttggtgcagttgttcttggtgattatcttgaaattattgaaggtcaaaaagctgtttgtactggaaaagttttagaggtgcctgttggggaggctatgcttggtagggttgtaaatacattgggcgcacctattgatggtaagggtgaaattaatgctgaacactcttcaccagttgaggttgttgctcctggggttattgcacgtcagtcagtagatcaacccgttcaaattggcttaaaagctgttgatgctatggttccaataggaagaggccaaagggagttaattattggtgatagacaaactggtaaaacagccgttgcaattgacgcaattattaatcaaaaaggcacgggtattaaatgtatttatgttgctatcggtcaaaaacaatcaactgttgctaatgttgttagaaaactagaagaatatggagctatggaacataccattgttgtttcagccacagctgcagatccagcacctatgcaatatctgtcagcctatgctggatgcacaatgggagaatactttagagacaagggagaagatgctctaattgtttacgatgacctttcaaaacaagctgtcgcatatagacaggtatca

SEQ ID NO: 273113 - DNA, 615 bp, Unknown
  Bacterial polypeptide expressing nucleotide sequence isolated from the Sargasso Sea
tatgagcaaaggaataattacacaggttattggagcagtagtagatgtcaaatttgatggagaacttccagaaattttaacagcattagaatgtaaaaatgggaacaacagattagttttagaagtagcacaacacttgggtgaaactacagttagaactattgcaatggatgctactgaaggtttaaaaagaggtgatgaggtaatcaacaccaatgctcctatacaagttccagtaggacctgaaactcttggaagaattattaatgtgattggagagccaattgacgaaagaggagaagtaaaaactaaagaaagttggccaattcatagaggtgcccctgaattcaatgatcaatcgactgaaactgaaatacttgtaactggtattaaagtaattgatttacttgctccttatgcaaaaggaggaaaaattggtttgttcggtggcgctggtgttggaaaaactgttttgattatggagttaatcaataacgttgcaaaagcacatggtggcttttcagtttttgcaggtgtaggagaaagaacaagggaaggaaacgatctttatcatgaaatgattgagtctggtgttatcaaacaggacggaccagg

SEQ ID NO: 273114 - DNA, 811 bp, Unknown
  Bacterial polypeptide expressing nucleotide sequence isolated from the Sargasso Sea
aaaatagcaggtcttgatctttctgcagaaagaaaaaatgaaggcataatcgtcagtgtttcagacgggatcgttcgaattcatggtatgggtgatgttatgtacggtgagcttatagagtttgaaaacggtgttctcggcttggcactaaatctcgagcaagattctgttggagcagtggtgctaggagactatttgggactaatcgaaggtcaaaaagctgtttgtacaggaagaattttagaggttccagtgggcgaagggttattaggtagagttgtagatgccttaggcaatcctattgatggtaaaggagaaattaaaacagagatgaccgctcctgtagaagttgttgcaccaggtgttattgcgagacagtcagttgatcaaccagttcaaattggattaaaagcagttgatgcaatggtaccaattggccgtggccaaagagagcttattattggcgacagacaaacaggcaagactgctgttgcggttgatgcaatcattaaccaaaaaggaaccggcatcaaatgcatatatgttgctattggccaaaaacaatcaaccgtagttaatgttgttaaaaagcttgaggaacatggagcgctagaacatacaattattgtttcagcttcagcatctgatcctgcgcctatgcagtatctttctgcttactcaggctgttcaatgggtgaatatttcagggataaaggtgaggatgcattgattgtttatgatgacctctctaaacaagcagttgcatataggcaggtatctttgcttttaaagagacccccaggaagagagg

SEQ ID NO: 273115 - DNA, 685 bp, Unknown
  Bacterial polypeptide expressing nucleotide sequence isolated from the Sargasso Sea
aatgacaattaatccaacagaaataagcgatatcataaaagataagattaagaatcttgatattaaaacgcagtcacataatgaaggtacagtcgtatctctaacggacggcatagctagaatttatggaatcacagatgcgcttcagggtgaaatgttagaattcccaaataatatttatggacttgctcttaatttagagagagactcggttggtgctgtgattctaggtgactacaagtcaatttctgagggagatatcgttaagtgtactggtaatattcttgaggtacctgttggagacgaactacttggtagagttgtgaattcacttggagaacctctagataatagtggtccaatttcatctgcaaataaatcacccattgaaaaaattgcgccaggcgttatcgagagaaaatcagtagaccagccagttcagactggacttaaatcaattgatgcgatggtaccaattggccgcggacaacgtgagctcattatcggggatagacaaacaggtaaaactgcagttgccatcgatgcaatcatcaatcaaaaagatacaggagttaaatgtatttatgtagctataggacaaaaagcatcatcaatagctgcagtcgtaagaaaacttgaagaacacgatgctcttaaacatacaattattgtagcagcttcagca

SEQ ID NO: 273116 - DNA, 532 bp, Unknown
  Bacterial polypeptide expressing nucleotide sequence isolated from the Sargasso Sea
tcaacaaaagacggctcaatcacatctattcaagccgtgtatgtgccggcagatgatttaacagatccatcaccagctacaacttttgctcacttagacgctactgttgttctttcaagacaaattgccgagcttggaatatacccagcggtagatccacttgattcaactagcagacagttagaccctcttgtggttggagaagagcattacaacgttgcccaaggcgttcaaggtgtattacaaaaatataaagagctaaaggacattattgctattttaggtatggatgagctgtctgaagaagacaagttagcagttgctagagctagaaaagttgaaagatttctctctcagcctttcactgttgcagaggtttttaccggttccccaggcaaatatgtaaaattagaagatactattaagtcattcaaaggcattcttgctggagattatgacgatcttccagagcaagccttttatatggttggaacaattgaagaagccgtcgaaaaagcaaaaactttataat

SEQ ID NO: 273117 - DNA, 631 bp, Unknown
  Bacterial polypeptide expressing nucleotide sequence isolated from the Sargasso Sea
aggctgcttgaacgtgcagctaaacttaacgatgataatggaggtggttcacttacagctttaccaattatagaaacacaagcaggagatgtttcagcttatataccaacaaacgttatctcaattacagatggtcaaatttttttaggaacagagttatttaatcaagggataagaccagctgtgaatgtcggactttctgtttcaagagtcggttcagccgctcagactaaggctatgaaaaaggtagctggttcaattaaacttgaattggcacagtatcgtgaaatggcagcatttgctcaatttggttccgacttagacgcttcaacacaaaaacttttaaacagaggatctaaacttacagagttactaaaacaagatcagtacagccctatgacagtagcagaacaagtggttacaatatacgctggggtcaaaggttatttggatagtattgatataagccaaattcgttcttttgaaaaaggtttactggagttagtgaagagtgaaaagccagaaatattggaatcgattcagaaaagtggaaaaatagaagaggatatagataaaattttatcagaagttatcactaattataaaaaaacaaactttgagaagaaataat

SEQ ID NO: 273118 - DNA, 492 bp, Unknown
  Bacterial polypeptide expressing nucleotide sequence isolated from the Sargasso Sea
aatggaaattaaagctgcagaaatatcttctgtaattaaagaccaaatagctaattttgaaactaaagcggatgttgctgaggttggaacagtactaagtgttggagacggaattgcacgtgtgtatggtcttgatcaagtacaagctggagagatggtagaattcccaggcggcattaaaggtatggccctcaaccttgaaatggataacgttggtgtttcaatcttcggtgatgatactggaattaaagaaggtgatacagttaaacgtacaggagaaattgttgacgttcctgttggaaaaggattgttaggacgtgttgttgatggtttaggaaatcctattgatggtaaaggtcctattcaatcttctgaaaagagaagaattgaattaaaagccccaggcattattcctcgtcaaagtgtatctgaacctatgcagacaggtattaaagcccttgatgctcttgttccagttggaagaggacaacg

SEQ ID NO: 273119 - DNA, 502 bp, Unknown
  Bacterial polypeptide expressing nucleotide sequence isolated from the Sargasso Sea
cattactgacggacagatatttttagaaacagatctttttaattcaggcgttagaccagctattgacccaggactttctgtatcaagagttggtggagctgcacaaactaagataattaaaaaacttagtggaggaattagaactgaccttgctcagtacagagagcttgcggcattctcacagtttgcatctgatctagatgacgcaacaaaagaacaactagaacacggtaagcgaattacagagcttcttaaacaaaaacaatattctccaatgagtgttgctgatcaagctatgagtttatatgcagctgataaaggatatatgaaagatgttgatatagataaagtgggtgacttcgaatcagctttattagcctattttgaatcagaaaaatctgatctaaaaaagcaaattaatgataccggagactgggatgacgatattgaaaaccagtttaaggaattagttgaagactttaagaaaacacaaacatattaa

SEQ ID NO: 273120 - DNA, 785 bp, Unknown
  Bacterial polypeptide expressing nucleotide sequence isolated from the Sargasso Sea
aatggaaattaatccttccgaagttacaaaaatattaaaagaacaaataaaaaaatatggagataaagcagaagtaacagaagttgggcaagttttgtctgttggtgatggtattgctagaatttatgggcttgataatgttcaggctggggaaatggtagagttttctgatggttcaaaaggaatggcactaaatttggaaagcgaaaacgttggtgttgttatttttggagatgataaggcaattaaagagggagacactgttaaaagaaccggagctattgtagatactcctgttggaaaagaattacttggtagagtagttgatggattaggaaacccaatagatggaaaaggagctttagataaaggaattaaaagaagcagagtggaggtaaaagctccggggattattccacgtaaatcagttagtgaaccaatgcaaactggacttaaatctattgatagtttagttccaattggaagaggtcaaagagaattaattattggagacagacaaactggtaaaacagcagttgcaattgatgcaattataaatcaaaaaaaaataaatgagtctgacaatgagaaacaaaagctatattgcgtttatgtagcaataggtcaaaaaagatctactgtaagacaaattgaaaaaactttagaagaagctggagcaatggaatatacaactattgttgcagctacagcttcagatgcagctccactgccatttttagcaccttacactggatgtgcaatgggcgaatattttagagataatg

SEQ ID NO: 273121 - DNA, 844 bp, Unknown
  Bacterial polypeptide expressing nucleotide sequence isolated from the Sargasso Sea
actacaatcgtagcagctacagcatctgactctgcacctcttcaattcttagctccatacaccgggtgtactataggtgaatattttcgtgacaatggcatgcatgcattaatagtttatgacgatttgtcaaagcaggcagttgcttatagacaaatgtctttattattaagaaggccaccaggcagagaagcttatccaggagacgtattttatttacatagcagactattagagcgtgcggctaagttaaacaataaaagcggtggaggctcgctaacagctttacctattattgaaactcaagccggtgacgtttctgcttacatacctacaaatgtaatttcaataacagatgggcaaatttttttagaaactgagttgtttaaccaaggcatccggccagcagtaaatgtaggactttctgtttccagagttggctcagccgctcaaaccaaagctatgaaaaaagttgcaggatctattaagttagaattagcccaatatagagaaatggcagcatttgcacaatttggctctgatttagacagttcaactcaacaattacttaatagaggagcaaaactaactgaacttttaaaacaagatcaatactctccaatgacagtcgcggagcaggtaatctcagtgttttcaggtgttaaaggatatttagatgacgttgaactaactgaaattaaaaaatttgaattagaccttattgaaaaagtcaaatctgaaaaaccagaaatattagagaatgttcaatccactggaaaattagatgaaaatactgaaaagcttttaagtcaattgattgaggagtataaaaaaggaaattaat

SEQ ID NO: 273122 - DNA, 799 bp, Unknown
  Bacterial polypeptide expressing nucleotide sequence isolated from the Sargasso Sea
atgcaacagctcaacccctcggaaattagcgacctgatcaagcagcgtatcgaccagcttgaagtcacttcgcaggccaccaacgagggcactattgtctcggtgacggacggcattatccgcatccacggcctgacagaggtccagtacggcgagatgatcgagttcgatggcggtgtctacggcctggccttgaatctcgagcgcgactcggtgggagcggtggtattaggcgactacaaacagctggcagaaggccagacctgtcgctgcacggggaggattctcgaagtgccggtcggcccggcgctgcaggggcgcgtcgtggactctcttggcaacccgattgatggtaagggtgccatcgagaccaccgagaccgacgccattgaaaagattgcgccgggcgtgatcgccagacagtcggtcgaccagccggtgcagattggcctgaaagcgatcgacgcgatggtgccgattggtcgtggtcagcgcgaactgattattggcgaccgccaggtaggtaagactgccatcgcggtcgacgcgatcatcaaccaaaagggtactggcattaagtgtatctatgtggcggtcggccagaaggcctcatccgttgcatcagtggtccgcaagcttgaagagcacggcgcgatggagcacacgatcgtggtggccgccaacgcttctgatccggcggcgatgcaatacctcgcaccgtttgcgggctgcaccatgggtgagtactaccgcgaccgcggtgaggacgcgctgatcatttatgacgatctgtccaagc

SEQ ID NO: 273123 - DNA, 610 bp, Unknown
  Bacterial polypeptide expressing nucleotide sequence isolated from the Sargasso Sea
gttaggaagaatgccctctgctgtgggttatcagccgaatcttgcagaagagatggggactctccaagagcgcatcacgactactaaaactgggtctgtaacctcaatccaggcagtatatgtgccagcggacgacttgactgatccttctccggctactactttcgcgcatctggactctacagtaactttatcaagggcgattaccgatctaggtatttatcccgcggtagaccccttagattctactagtcagcagcttgatcctctgatagtcggtgaagagcactacaatgttgcccaagaggttatgcaagtacttcagaggttgaacgaattaaaagatattattgcgatattaggtatggatgagctttcagaggaagataagcaattagtttatagagcgagaaagatccagaaatttttctcgcagcctttcttcgtcgcggagcagttcagcggaagccctggtacctatgtctcacgagatgacaccgtacggagcttcaaagcgattttgaatggtgagcatgatgatttgcccgaggatgcctttatgatggtcggaagcattgaagatgcgattgaaaaggctaaaacgctttag

SEQ ID NO: 273124 - DNA, 694 bp, Unknown
  Bacterial polypeptide expressing nucleotide sequence isolated from the Sargasso Sea
atgtcattgctattgagaagacccccaggacgtgaggcttatcctggagatgtattttatcttcatagtagattacttgaaagagcagctaaattaagtgacgaacatggtggtggatcacttactgcactgccaattattgaaacacaaggtggagacgtatccgcgttcattccaactaacgttatttcaattacagatggacaaattttccttgaaacagaactatttaaccaaggtataagacctgcaattaacgtaggtttatcagtatctagggttggttcatcagctcaaacaaaagcgatgaaaaaagtttctggttcaatgaaattagagttagcacaatacagagaaatggcagcttttgctcaatttggatctgatttagatgcatctacccagcaacttttgaatagaggctctaagttaactgaacttttaaaacaaaaacaatattcacccatgactgttgcagaacaagttatttcagtattttgtggagtaaaaggttatcttgatgatattgatttaaaagacgttgctgaatttgagagcaagattattgaaaaatgtaaatcagataagcctgaaattatcgagtcaattttaagttcaggaaaacttgaggaagataaagaaaaattacttgtagatgtaatcactcaattaaaaggaaattttaaatcttaat

SEQ ID NO: 273125 - DNA, 469 bp, Unknown
  Bacterial polypeptide expressing nucleotide sequence isolated from the Sargasso Sea
atggaaattaaagctgcagaaatatcttctgtaattaaagaccaaatagctaattttgaaactaaagcggatgttgctgaggttggaacagtactaagtgttggagacggaattgcacgtgtgtatggtcttgatcaagtacaagctggagagatggtagaattcccaggcggcattaaaggtatggccctcaaccttgaaatggataacgttggtgtttcaatcttcggtgatgatactggaattaaagaaggtgatacagttaaacgtacaggagaaattgttgacgttcctgttggaaaagaattgttaggacgtgttgttgatggtttaggaaatcctattgatggtaaaggtcctatccaatcttctgaaaagagaagaattgaattaaaagccccaggtattattcctcgtcaaagtgtatctgaacctatgcagacaggtattaaagcacttgatgctcttg

SEQ ID NO: 273126 - DNA, 831 bp, Unknown
  Bacterial polypeptide expressing nucleotide sequence isolated from the Sargasso Sea
atcaggcaggcttgggagtgaagtgcatctatgtcgcggttggccagaaaggctcgactgtcgctcaagttgtcaacaccttagaagaacgcggagcgatggaatacaccgtggttgtctcggcaccggccgccgacgcagcaccgtttaagtaccttgctccatatgcaggctgcgccatgggccagcactggatggagaatggcgaacacgcgttaatcgtttatgacgacctctcgaaacaagcggaggcataccggcagttgtctctgttgctcagaagaccaccagggcgtgaagcgtacccgggtgacgtgttctacctccatagtcgtctactagaacgcgcagctaagttgtctgatgaacagggtgcgggctcgctcaccgctttacccgtgatcgaaacaaaagcgggtgacgtctccgcttacattcccacgaatgtgatttcgatcaccgacggccagatctacctccaagacgatctattcaaatcgggtgtgcgaccagctgtagacgtcggtgtatctgtttcacgcgttggaggtgacgctcagaccaaagctatgaagagcgttgcgggaaccttaaagatcgaccttgctcagttccgtgatcttgaagccttcgcaaccttcggctccgagttggatgctgcttctgcggcgcaacttggtcgcggttaccgcttagtcgaacttcttaagcagggactcaacagcccaatgccggtcgaggaacaagttgtttcgatttacacgggaacgaacggccatctagatgacttaccagttgaggatgtccaacggttcgaagcagagctttaga

SEQ ID NO: 273127 - DNA, 401 bp, Unknown
  Bacterial polypeptide expressing nucleotide sequence isolated from the Sargasso Sea
tgttgacccattagattcaacttcaagaattttggaccctagaattgttggagatgagcattatagagttgcaagggaagtacaaaaaattttacaaacttataaatctcttcaagatataattgcaattcttggtatggatgagctatcagaagaagataagcttgttgtagcaagagcaagaaaaatccaaagatttttatctcaaccattctttgttgcggaagtatttactggatctccaggaaaattagtggatcttgactcaacaattaaaggtttttcagctatttgtaagggggattatgatcatttgcctgaagcggctttttatatggttggaactattgaagaagctatagaaaaagctgaaaaaatggcaaaagatgctgcagcttaat

SEQ ID NO: 273128 - DNA, 746 bp, Unknown
  Bacterial polypeptide expressing nucleotide sequence isolated from the Sargasso Sea
cagacttagagttgctttaactggtttgactatggctgaaaagtttagggatgagggtagagatgtcttattgtttgttgacaatatttacagatatactttggctggtgttgaggtatcagctttgcttggtcgtatgccgtcagcagttggttatcagccaactctagcagaggaaatgggtgttttgcaagaaagaattacctcaacaaaaacaggttcaattacatctattcaagcagtctatgtgccggccgatgacttaacagacccatcaccagccacaacttttgcgcacctcgatgcaacggttgttttatcaaggagaattgcagagctaggtatatacccagccgtagatccactcgactcaacctcaagacagcttgacccaaatgtagttagtcaagaacactacgatgtggcacaaagagttcaaggtgtattacaaagatataaagaattaaaagacattattgcaatactcggtatggatgagctttcagacgatgataaaaacacagtctcaagagcaagaaaagttgaaaaatttctatcacaacccttttttgttgctgaggtttttactggttcaccaggaaaatacgtctctatcaaggataccattcaaggatttaaagaaattttggacggagttcatgatgatgtgcctgaacaagcattttacatggttggctctatggacgaagtattagagaaagctaagaccataaaaagtgattaat

SEQ ID NO: 273129 - DNA, 581 bp, Unknown
  Bacterial polypeptide expressing nucleotide sequence isolated from the Sargasso Sea
aatggaaataaatccttcagaagtcactaaaatattaaaagagcaaataaaaaaatttggagataaagcagaggtttcagaagttggtcaagttctctcagttggggacgggattgcaaggatatatggtctagataatgtacaagctggggaaatggttgaattttcggacggatcaaagggaatggctcttaatttagaaaatgacaatgttggggttgtaatttttggtgatgatagagctgttaaagaaggtgacacggtaaaaagaactggtgcaattgttgatacacctgttggtaaagaattattaggaagagtagttgacggtcttggtaatccaatagacggaaaaggcaccttggataaagatgttaaaagaagtagagttgaagtgaaagctccaggaattattccgcgtaaatcagtaagtgagccaatgcagactggtctgaagtcaattgacagtttagttccaataggaagaggtcaaagagaactaataattggtgatcgtcaaactggaaaaactgctgtcgctatcgatgcaataattaatcaaaaaaaaatcaatgagtctg

SEQ ID NO: 273130 - DNA, 634 bp, Unknown
  Bacterial polypeptide expressing nucleotide sequence isolated from the Sargasso Sea
gtggtattaacatcagatagaggtctttgtggaggttttaactcaaatattattaaaaaagcaaaagcatactttagcaaaattgttagtgaggggaaaaattttaaaattataactgtaggatctaaaggagatgatcagcttaagagacaatataatgataaaatagtggaaagaatatcgtttaaagattcaaaaaatgtaaatttttttgacgctgaaaaggtctcaaagataattattgaaagcttccaaaaaaatgaattcgatgtatgtacaattttttataataggtttaagaatgtaatcactcaaattccacaagctcagcaaataatacctttggaaaactctgacactaaaaaggaagatgaaaaggataattatgaatttgagccggaagaagatgaaatattaggaaatttgttgccaaaaaatatttctacacaaatttttaaagctatgttagaaaattcagctagcgaacaaggttctagaatgagtgcaatggataatgcaacaagaaatgctggagaaatggttgataagttgacaattcagtataatagaagcagacaagcagctattacaaaagaactaatagaaataatatcaggagcggaaagtttataat

SEQ ID NO: 273131 - DNA, 305 bp, Unknown
  Bacterial polypeptide expressing nucleotide sequence isolated from the Sargasso Sea
tatgagaaaaggaaaaattacacaaattattggtgcggtagttgacgttaagtttgacggagaactgccagaaattttaactgccttagagtgcaaaaatggagataataggctagtgttggaagttgcccaacatcttggagaaacaagtgtaagaactattgcaatggatgcaacagaaggtttaaagagaggagacgaagttatagatactggagctcctataaaggtaccagttggtccagaaactttaggaagaattgtaaacgtaattggagagccaattgatgaaaagggtgagataa

SEQ ID NO: 273132 - DNA, 248 bp, Unknown
  Bacterial polypeptide expressing nucleotide sequence isolated from the Sargasso Sea
agaggaagataaacttacggttgccagagcaagaaaaatacaaagatttctttctcaacctttctttgttgcagaagtgtttacaggttcacctggaaaattagttgatctagatgataccatcaaagggtttgacgctatttgtaaaggtgaatatgatcatttgcctgaagcagcattttatatggtaggcggtattgaagaagctatagaaaaagcagaaaagttatctaaagatagcaaataat

SEQ ID NO: 273133 - DNA, 849 bp, Unknown
  Bacterial polypeptide expressing nucleotide sequence isolated from the Sargasso Sea
tttgggagataaagccgaagtttcagaaattgggaaagtcctttccgtaggagatggaattgctagagtttatgggctagacaatgttcaagctggtgaaatggttgtgtttcaggacaattcaaaaggtatggctcttaatcttgaaaacgataatgttggtattgttatttttggagatgatagatcaattaaagaaggtgatacggttaaaagaactggagcaatagttgatgtacctgttggtaaagagttgcttggcagagtagttgacgcattaggaaatccaattgatggtaaagaaaatttagataaaaatattaaaagaaaaagggttgaagttaaggctccaggaattataccaagaaagtctgttggggaacctatgcaaacgggtttaaaagcaattgatagcttaattccagtaggaagaggacaaagagaattaataatcggagatagacaaactggaaaaactgcagttgcagtagatacaatcattaaccaaaaaaaaataaatgtgtcagatgatgaaaaaaagaaactttattgtatttacgttgcaattggtcaaaaaagatcaacagttgctcaaatagtcaaaaccttacaagatgcgggtgcaatggattatacaattgttgtttctgctacagcgtctgatcccgctccattacaatttttagcaccatatacaggatgtacatttggcgaattttttagagataatggaatgcatgctctaataatttacgatgatttgtccaaacaagctgttgcatacagacaaatgtctcttttattaagacgacctccgggtagagaagcatatccaggagatgtatttta

SEQ ID NO: 273134 - DNA, 757 bp, Unknown
  Bacterial polypeptide expressing nucleotide sequence isolated from the Sargasso Sea
gctagatcaagagttgctcttacaggattaacagttgcagaatatttcagagatcaagaaggtcaagacgtactttttttcgtagataatatttttcgatttacccaagcaggctctgaggtatcagctttattaggtagaattccatcagcagttggttatcaacctactttagcaactgatatgggaaatttacaagaaagaattactacgactaacaaaggatctattacatcggtacaagcaatttatgttcccgctgacgatttgacagacccagcaccagcaacatcatttgctcacttagatgcaactactgtattatcaaggcagattgcagaacttggaatttatccagctgttgatcctttagattcaacttctagaattttagatcctagaattgtaggtgatgaacattatagagttgcaagagaagttcaaaaaatccttcaaacatataaatctttgcaagacataatagcaattttaggtatggatgaattatcagaagaagataaattaattgttgcaagagcaagaaaaattcaaagattcttatcacaaccttttttcgtagcggaagtttttacgggttcgccaggaaaactagtagatttagagtctacaattaaaggatttgatgcaatttgtaagggtgaatatgatcatttaccagaagctgctttttatatggttggtacaatagaagaagcaattgaaaaagctgagaagatggctaaagaagttgcataat

SEQ ID NO: 273135 - DNA, 601 bp, Unknown
  Bacterial polypeptide expressing nucleotide sequence isolated from the Sargasso Sea
tttgcttgcaccgtatgcaaaaggtggaaagatcggattatttggtggagcaggagtaggaaaaacagttttaattatggaattaattaataacgttgcaaaagctcatggtggtttttcagttttcgcgggagttggagagagaactagagaaggaaatgacctttatcatgaaatgattgagtctggagtaattaaaaaagaaggagatggttcaaaagctgctttagtttatggacagatgaacgaacctcctggagcaagggcaagagttgcacttacagggttaactgttgctgaatattttagagatcaggaaggtcaggacgtacttttcttcgtagataacatctttagatttactcaggcaggatcagaggtttcagctttgttaggaagaattccatctgctgttggatatcaacctacattagctactgacatgggtaacctacaagaaagaattacgactacaaacaaagggtcaattacatctgtacaagcaatttatgtgcctgctgatgatttaacagatcctgctccagcgacatcgtttgctcacttagatgcaacgactgtactttcaagacaaatgcagaaa

SEQ ID NO: 273136 - DNA, 910 bp, Unknown
  Bacterial polypeptide expressing nucleotide sequence isolated from the Sargasso Sea
ggagctgttcttttagggtcttctaacgaaattaaagaaggggacacagttaaaagaactagcaggatagcctccgttaatgttggagaaaacttgttaggtagagttgtagatacacttggaaatccaattgatggtaaggggccaattaagggagaattattccagatgccaatagaaaggaaagcccctggagttatctatagacaaccggtaaatgaacctttacaaaccgggattaaagcaattgatgcaatgataccaattggaaggggacaaagagaattagtcattggagatcggcaaacaggcaagactacagtctgtatagataccattattaatcaaaaagagttttatgatcgtggtgagccagtatattgtatatatgtagctattggtcagaaaggatctacaattgcaggtattgttaacaaacttgaacagtcaggggctatgaagtacactgtaattgttgctgctaatgcttctgattctgcccctatgcagttttatgcaccttttaccggagctgcaattggggaatattttagagatacaggaagaccagcattaattatttttgatgatttatctaagcaagccgttgcatatagggaagtttctttactattaagacgtccacctggaagagaagcgtatccaggagatgtattttatttacattcaagattattagaaagagcagcaaaaatcactaattctaatgaaattgctaaaaggatgaatgacttgccagactcaataaaaaacaaagttaaaggcggtggttcattaacagctttgcctataatagaaacccaagctggggatgtttctgcgtatattcctactaatgttatttctattacagatggacaaatttttttagaagcccaatttatttaat

SEQ ID NO: 273137 - DNA, 865 bp, Unknown
  Bacterial polypeptide expressing nucleotide sequence isolated from the Sargasso Sea
aaaataaacgaatttggtgatgaaaaacaaaaattatactgtatatatgttgcagttgggcaaaaaagatcaactgtaagacaaattcaaaaaacattagaagaagcaggtgcaatggaatatacaactattgttgctgctacagcgtctgattctgcacctttgcaatttttagcaccatatacaggatgtgctatgggagagtactttagagataatggaatgcatgcattaattatatatgatgatctgtccaagcaagcagtagcatacagacaaatgtctcttcttttaaggagacctcctgggcgtgaagcttatccaggagatgtattctacttacatagtagattactagaaagggccgcaaaattaagtgatgagcatggtggtggatctctaactgcacttccaattattgaaacgcaaggtggggatgtatctgcatttattccaaccaatgtaatttcaattacagatggccaaatttttttagaaacagaattatttaatcaaggtattaggccggcgattaatgtaggtttgtcagtatctagagttggatcatcagcacaaacaaaagctatgaaaaaggtttcaggatcaatgaaactagaattagctcaatatagagaaatggcagcatttgcacaatttggatctgatttagatgcctcaactcaacaacttttaaacagaggttctaaactaaccgaacttttaaaacaaaaacaatattcaccaatgactgttgcagagcaagtaatatcagttttttgtggtgttaaaggttatcttgataacattgagttaaaagacgttgctgaatttgagagcaaaatcattgaaagatgtaaatcagaaa

SEQ ID NO: 273138 - DNA, 465 bp, Unknown
  Bacterial polypeptide expressing nucleotide sequence isolated from the Sargasso Sea
tttcacacctggatgcaactacagtgttatctagacaaatagcagaaatcggaatctatccagctgtagatccattagattcaacttctaggattctagatccaagaatagttggtgatgaacattacagagttgcaagagaagttcaaaaaattttacaaacctataaatctttgcaagatattattgcaattttaggtatggacgagttatcagaagaggataaattaattgtagcaagagcaagaaaaattcaaagatttttatctcaaccattttttgtagcagaagtttttacaggatcaccaggaaaattagttgatctagagtctacgattaaaggatttgatgctatctgcaaaggagaatacgatcacttaccagaagccgcattttatatggttggaacaatagaagaagccattgaaaaagctgagaaaatggcaaaagatgctgcagcttaat

SEQ ID NO: 273139 - DNA, 863 bp, Unknown
  Bacterial polypeptide expressing nucleotide sequence isolated from the Sargasso Sea
aaatgatctttaccatgaaatgatggagtctggtgtaataaaacaagacggcccaggatctaaagctgcattagtatatggacaaatgaatgaacctcctggtgcaagagcaagagttgcattaacaggtttaacagtggctgaatattttagagatcaagaaggccaagacgttcttttctttgttgataatatttttagattcactcaggcgggatctgaggtttcggctcttttgggaagaattccatcagcagttggttaccaaccaactctagcaactgatatgggtaaccttcaagaaagaattactactacaaataaaggatcaattacttcagtacaggcaatttatgttcctgctgatgatttaacagatcctgcaccagcaacctcatttgctcacttagatgcaacgactgtactttcacgacaaattgcagaaattggtatttatcctgcagtagatccccttgattctacatcaagaattttggatccaagaattgttggagatgagcattatagagtagcaagagatgttcaaagaatactacaatcttataaatcactacaagatattatagctattcttggtatggacgagttatctgaagaagataaactggttgtagcaagagctagaaaaatccagagatttttatctcaaccgttctttgttgcagaagtatttactggttctccaggaaaacttgttgatcttgactcaactatcaaaggttttgatgcaatctgtaagggtgagtatgatcacttacctgaagctgctttttatatggttggaacaattgaagaagctatagaaaaagctaagaaaatggaacaagaagctgccgcttaat

SEQ ID NO: 273140 - DNA, 809 bp, Unknown
  Bacterial polypeptide expressing nucleotide sequence isolated from the Sargasso Sea
gatggttgaattttccgatggttcaaaaggcatggccttaaacttagaaagtgataatgttggtgttgtaatttttggtgatgatagagctgtaaaagaaggtgatactgtaaaaagaactggagcaattgttgatactccagtaggcaaagagttattaggaagagttgttgatggattgggaaatccaatagatggaaaaggtgcactagataaaagtataaaaagaagcagagttgaagttaaagctccaggaataattccaagaaaatctgtaaatgaaccaatgcaatcaggactaaaatcagttgatagtttagttcctataggaagaggacaaagagaattaattattggtgacagacaaacaggaaaaactgcagttgcaattgatacaataattaatcaaaaaaaaattaatgaatccaatgatgaaaaacaaaaattatattgtatttatgtagcaattgggcaaaaaagatccaccgtaagacaaatagaaaaatcattagaagaagctggagctatggagtatacaacaatagttgcagcaacagcatcagatgcagcaccacttcaatttttagccccatacaccggatgtgctatgggggagtattttagagacaatggaatgcacgctttaatcatttatgatgatttatctaagcaagcagttgcatatagacaaatgtcattattattaagaagacctcccggaagagaagcttatccgggtgatgttttttatttacacagcagactacttgaaagagcggctaagcttagtgatgaacatggaggaggat

SEQ ID NO: 273141 - DNA, 565 bp, Unknown
  Bacterial polypeptide expressing nucleotide sequence isolated from the Sargasso Sea
atgccaagtttagatgatttaaaaaaaagaataaaaagcgtcaaatcaactcagaaaattactaaagctatgaagatggttgcagccgccaagctaaggaaagctcaagaaagtgctgaaaaaggaagaccttatagtaaaaaaatgcaaaatattatttttaatctaacaaaatcaattaataactcagagaatgctccaaaacttctagtcggaacaggaaaagatgatgtttatttatgcttagttttgacagctgatagaggtttatgtggaggatttaactctaatatttctaaattagcaaaaaatcattttaaaaaattattgagcgaaaggaaagaaataaaaattattacagttggctccaaaggattagatcaaataaagagagaatatggaaagtacattgtaaaaaaatttagctttaaagaaaaaaagcaaattagttttaaagaagcagagctaataggtggagagattataaaactatttaataacaatgaatttgacaaatgtataatgttttataataattttaaaaatgtgataactcaaatacctc

SEQ ID NO: 273142 - DNA, 475 bp, Unknown
  Bacterial polypeptide expressing nucleotide sequence isolated from the Sargasso Sea
cctgcaacttcgtttgctcacttggatgcaactacagttctgtcaaggcaaattgctgaattaggtatttatcctgctgtagacccacttgattctacttccagaatgttagacccaagggttgttggtgaagaacattacaatgttgcaagaaatgtacaagaggttcttcagcaatacaagtctttgcaagatataattgcaattctaggtatggatgaattatcagaagaggataaattagttgtagcaagagcaagaaaaattcaaagatttttgtctcaacctttccacgttgcagaggtttttactggatctcccggaaaattagttagtctagaagatacaataaaaggttttaaaggtatcattgagggaaattatgatgaattacctgaggcagcattctatatggttggaacaatagaagaggcagtagaaaagggtaaaaaactatctaaagatgctgcataaa

SEQ ID NO: 273143 - DNA, 843 bp, Unknown
  Bacterial polypeptide expressing nucleotide sequence isolated from the Sargasso Sea
tgcactcacccttaaagacggagaattagtttttgaggtccagcagcaacttggtgatggcatagtcagaaccattgcaatgggagcaagtgagggcttaaaaagaggccttgaagttgaaaacacaggcgccccaatcagtgttcctgtaggacaggaaacccttggaagggttctggatgttctaggcaacccgatagatgaaaaaggccctgttggcgccaaaacaaatagaccgattcatgcaaaagcacccacttttgaagaacagtctaccgaagcggatgtattggaaacagggattaaggttattgaccttctctgcccatttgcaaaaggaggaaaagttggtttatttggtggtgctggtgtcggtaaaacagttacagttatggaattgattagaaacattgctgcagagcatgacggcttctctgtttttgctggggtaggagaaagaacaagagaagggaatgatttctatcatgaaatgatggagtcaaacgtactagacaaggttgcacttgtgtatggacaaatgaacgagcccccaggaaacagacttagggttgcattgactgggctgactattgcagaaaactttagagacgaaggaagggacgtattgatgtttatcgacaacatatacagatatactcttgcaggcacagaagtatccgccttgcttggaagaatgccatccgcagtgggatatcagcccaacttagcagaagaaatgggcgttcttcaagagaggatcacctcaacgaaaacaggctcaatcacatcaattcaagcggtttatgtaccagcagacgacttgacagaaccatcgccagcgac

SEQ ID NO: 273144 - DNA, 820 bp, Unknown
  Bacterial polypeptide expressing nucleotide sequence isolated from the Sargasso Sea
atgagcaacggaacagttacacaaattatcggagcggttatcgatgtagagtttgataaagataatattccaaaagtttacgaagcgcttatggttgatgagagtggtacaacccttgaagttcagcagcaattgggtgacggtgtggttagaactattgctatgggagccacagaaggtctaaaaagaggacttactgcctcaagaactaatgctccaatttcagttccagtaggaccagaaacactaggtaggattgtcgatgttttaggtaatcctatcgatgagaaggggccaattggtgaaaaatcaaaaatgccaattcacagaaaacctccttcatatacagatcagtcagcatctaatgaggtccttgaaaccggcattaaagttattgatcttatgtgtccatttgctaaaggtggaaaaattggtttatttggtggagcaggtgttggtaaaacagtaaatatgatggagcttataaataatattgcgcttcaacattcaggtctttctgtttttgctggtgttggcgaaagaaccagagaaggaaacgatttttattatgaaatgcaagaatcaggagttgtaaatattgataatttaggcgaatcaaaagttgcgatggtatacggacaaatgaatgagccaccgggaaatagattaagagttgctttaactggattaactatggctgaaagctttagagatgaaggtaaagatgttttgttatttattgataatatttatcgatataccttagcaggtgttgaggtgtctgctcttttaggcagaatgccatctgctgttggatatc

SEQ ID NO: 273145 - DNA, 259 bp, Unknown
  Bacterial polypeptide expressing nucleotide sequence isolated from the Sargasso Sea
aatggatgaattatcagaagaagataagctcacagttgctcgagcaagaaaaatacaaagatttttatctcaaccatttttcgtagctgaagtatttacaggatcaccaggaaaattagttgatttagagtcaacaataaaaggttttgatgccatttgcaaaggtgattatgatcatttaccagaagcagctttttatatggtaggatcaattgaggaagttgttgaaaaagcagaaaaactggaaaaagattcttaa

SEQ ID NO: 273146 - DNA, 445 bp, Unknown
  Bacterial polypeptide expressing nucleotide sequence isolated from the Sargasso Sea
gcgataaatgctggcctatctgtttccagggtaggcggggcagcgcaaacaaaaatcattaaaaaactcggtggtggtgtcaggctggcattggctcaatatcgtgagcttgcagcatttgcccagttcgcatctgatcttgatgaagccacaaggaagcagttagaaagaggccagagagtaacagagctaatgaagcaaaaacaatacgcaccattgactgtggcagaaatggctgtatctctatatgctgcgaacgagggctatctcgacgatgtcccagcagacaagattgtcgatttcgaggcagcattacacgcaaactttgttgaatcagcctctgatcttgcacaaaagatcaatgatactggtgactacaacgatgaaattgaagccgaactcaaaaagttcgttgaagattttaaagcaaccggcacctattaat

SEQ ID NO: 273147 - DNA, 340 bp, Unknown
  Bacterial polypeptide expressing nucleotide sequence isolated from the Sargasso Sea
tatggcaaacgaaaaggaaattcgaacaaaaattgggagtgttaaaaacactcaaaaaattacaaaggccatggagatggttgcggcaagcaagatgcgtcgaacacaagaaacaatgaaaaaagcgttgccatatgcagacaaaatcagagctgtgataggacatatttataaggctaatccagactataaacatccttttcttgaaaagcgtgaagtcaaaacagccggctacattgttgtcagttccgatagagggctttgtggcggactcaatgtaaacatgttcagagggttaattgccgaactaaaagaaaacaaaagcaagcaaattgattca

SEQ ID NO: 273148 - DNA, 472 bp, Unknown
  Bacterial polypeptide expressing nucleotide sequence isolated from the Sargasso Sea
atgagtaatggagttgtgacacaaattatcggagcggttatagatgtcgaattcgatagagagaacataccaagcgtgtatgaggctcttaatattgtcggtcttgaaactgtgcttgaggttcaacagcaactaggtgatggaattgtaagaactatcgctatgggttcaacagaaggactaaaaagaggtttagaggttgttagaactaatgcacctatttctgttcctgttgggcaagaaactctgggaagaattatggatgttttaggaaatcccattgatgaaaagggtgacattggtgagaaagaaagacaaccaattcataaaagcccgccaagctatactgatcaagctggatcaaacgagttactagaaacaggcatcaaagttattgacctaatgtgtccctttgcaaaaggaggaaaagttgggttatttggaggagctggagtaggtaagactgttaaca

SEQ ID NO: 273149 - DNA, 744 bp, Unknown
  Bacterial polypeptide expressing nucleotide sequence isolated from the Sargasso Sea
acagtaacaaaatgagtataataataaaaaatctgagcagtgcaatcaatgatcctgaaaatgcaccaaaacttctcataggaaccggcgaagataaaattcatttgtgtgtagtaatgacagcagatagaggcttatgtgggggttttaacacaaatatagttaaacaagccaagaaatattttaacaaaattttaaaggaaaataaaaatctgaaaataattaccgttggttctaaaggtttagatcaacttaagagagattatggtaaatatattataaaaaaaataaactttaaaaataagaaaaatatactttttgatgatgcagagtccattggaaatgaggttgtaaaattatttaaagataaacaatttgatatatgcgttatttttttcaataaatttaaaaatgtaatgactcagatacctcaagccgaacaagttattcctgcaaaaacagacgataaatcaaaagaagaaaatagtttttcatatgaatttgaaccagaagaagatgagattttggaggaccttctccctaaaaatatttctacacaaatatataaaggttttttagaaaattcagctagtgaacaaggctcaaggatgacagcaatggataatgcaacaagaaatgcgggagatttggtagaaaaattaactatcaactataatagaagcagacaagctgctattacaaaagaactaattgaaataatatcaggggctgaaagtttataaa

SEQ ID NO: 273150 - DNA, 874 bp, Unknown
  Bacterial polypeptide expressing nucleotide sequence isolated from the Sargasso Sea
attgaaagtaagaatcctgccgggcaagatgttgctttgactgcagaagttcaacaattacttggtgaccatcgagttagagccgttgctatgagcggaaccgatggattagttagaggtatggaagcaatagacactggagcgcccatttctgtacctgttggtgaagcaacgctcggaagaattttcaacgtccttggagagcctgtagatgaacagggtgatcttaaaaacgtaactacttcaccaattcaccgttcagcgccaagccttacagacttagaaaccaagccaaaagtttttgagacaggtatcaaagttattgatttgcttgctccttaccgtcaaggtggaaaagttggattattcggaggagcaggagtaggtaaaacagttctgatccaagagcttatcaataatattgctaaagagcatggcggtgtatcagtttttggtggagttggagagagaacaagagaaggtaacgatttatatgaagaatttaaagaatctggagtcatcaattcagaagatctaaccaagtcaaaagtagctttgtgctttggtcagatgaatgagcccccaggggcaaggatgagagtaggcctatcagcattaacgatggcagagcattttcgtgatgtaaataagcaagatgttctgttgttcattgataatattttcagatttgttcaggctggatcagaagtatctgcattgttaggtcgtatgccatcagccgttggatatcaaccgaccctaggaactgacgttggagagcttcaggaaaggatcacctcaacccttgaagggtccattacctcaattcaggctgtttatgttcctgctgatgacttaacagatcctgcacctg

SEQ ID NO: 273151 - DNA, 724 bp, Unknown
  Bacterial polypeptide expressing nucleotide sequence isolated from the Sargasso Sea
atgacagtacaagctgctgaaatttcagcgattttaaaacaagagataaagaattttggtgaagaatccacgatctcagaggttgggcaggtcttatctgttggtgacggtatagctcgcgtgtacggtcttgataatgttcaagcaggagagatggtagaattcccaggtgaaattaggggaatggcactaaatctcgagtcagataatgttggtgtagttatttttggctctgatcgtgacataaaggaaggggattctgtaaagaggactaagtccattgtagacgtacctgtaggtgaagagttattaggaagggttgtggatggcctaggtaatcccattgatggcaagggtccaattaagacaaaaacgagatcgatagctgacgttaaagcaccaggtataatacctagaaagtcagtccatgaacctatggcaacaggtttgaaatctgtagactcactgatcccaattggtagggggcagcgtgaattgataattggagatagacagactggcaaaactgcagttgccttagacgcaatactaaaccagaagagttataatgatgcagctggatctgatgagagtaaaaaactatattgtgtttatgttgcaattggacaaaaaagatcatcagtagcacagttggtaaaaaaactggaagagacgggagctatggagtactctatagtggtggcagcaaccgcatcgaaccagc

SEQ ID NO: 273152 - DNA, 809 bp, Unknown
  Bacterial polypeptide expressing nucleotide sequence isolated from the Sargasso Sea
ggagtaggaaaaacagttcttattatggaattaattaacaatgtcgcaaaagctcatggaggattttcagttttcgctggagttggagagagaactagagaaggaaatgatctttatcatgaaatgatagagtctggagtaattaaaccagaaggcactggatcaaaagcagctttagtttatggccagatgaacgaaccaccaggagcaagagcaagagttgcattatcaggattaacggttgctgaatattttagagatcaagaaggacaagatgtacttttttttgtagataatatttttagatttacccaagctggatcagaagtgtctgcgttattaggaaggattccttcagcggtaggatatcaaccaacattagccactgatatgggaaatcttcaagaaagaattacaactacaaacaaaggatctattacttctgttcaagcaatatacgtgccagcagatgatttaacagatccagcccccgcaacttctttttcacatttagatgcaacaacagtgctatctagacaaattgcagaaatcggaatttatccagctgtagatccattagactctacttctagaattttagacccaagaatagttggagatgaacactatagagttgctagagaagttcaaaaagtattacaaacttataaatctttacaagatattattgcaattttaggaatggatgaactgtccgaagaagacaaactaaccgtagctagagcaaggaaaattcaaagatttttatcacaacctttctttgttgcagaagtatttactggttcgcc

SEQ ID NO: 273153 - DNA, 565 bp, Unknown
  Bacterial polypeptide expressing nucleotide sequence isolated from the Sargasso Sea
gatccagcacctatgcaatacatcgcaccatatgctggttgtgcaatgggcgagttttttcgagataatggtcaacattctttaatagtctatgatgatctatcaaaacaagcagttgcgtatcggcaaatgtcacttgttctaagaagaccgcctgggcgtgaggcctttcctggtgatgtattttatttacacagtcgcttgttagaacgagcatccaaattatcaaaagatcatggaggtggatcactaacagccctaccagttattgaaacgcaagagggagatgtttcggcatacatacctacaaatgttatttcaatcacagatggtcaaatttatttagaaacaaatctctttaattctggtattcgtccagcgattgatgtaggtctttccgtatctcgcgtagggggtaatgctcagatcaaggcaatgaaaaaggtcgcgggtacgcttaggttagatttggctcaatacagagagttagaggcattcgctaagtttggttcagacttagataaggctacccttacccaattaactcgtggagaaaggatggttg

SEQ ID NO: 273154 - DNA, 699 bp, Unknown
  Bacterial polypeptide expressing nucleotide sequence isolated from the Sargasso Sea
tatgagcaaaggaataatcacacaagttattggagcggtagtagacgtgaaatttgatggtgaactaccagaaattttaacagcattggaatgtaaaaacggtgataacagactagttttagaggtagcacaacacttaggtgaaactactgttagaacaattgctatggacgctactgaaggactaaaaagaggtgatgaagttattaataccaatgctcctattcaagttccagttggacctgaaacacttggaaggattataaatgtaattggtgaacctattgatgaaagaggtgaggttaagactaaagagagttggccaattcatagagctgcacctgaatttaatgaccaatcaacggaaactgaaatacttgtaacaggtattaaagtaattgatttgcttgcaccttacgcaaaaggtggaaagattggattatttggtggagcgggagtaggaaaaacagttttaattatggaattaattaataacgttgcaaaagctcatggtggtttttcagtttttgcaggagttggagagagaactagagaaggaaatgatctttatcatgaaatgattgaatctggggtaattaaaaaagaaggaactggctcaaaagctgctctagtttatggacagatgaatgaacctcctggagcgagagcaagagttgcacttacagggttaactgttgc

SEQ ID NO: 273155 - DNA, 874 bp, Unknown
  Bacterial polypeptide expressing nucleotide sequence isolated from the Sargasso Sea
tttagctccttacagacaaggaggaaaagtcggattatttggaggcgctggtgtaggcaagacagttcttattcaagaattaatcaataacattgcgaaggaacatggtggagtttctgtttttggaggtgttggagaaagaactagagaagggaacgatttatatgaagaatttaaagaatcaggtgttataaatgcagatgatttaactcaatcaaaagttgctttatgctttggccaaatgaatgagccacctggtgcaagaatgagagtaggtttatcagcacttacaatggctgaacattttagagatgtaaataaacaagatgttcttctttttgtagataacatttttagattcgttcaagctggctctgaagtatcagctttactaggaaggatgccttcggcggttggataccaaccaactcttggaactgatgttggtgaattgcaagagcgtattacatctacattagaaggatcaataacatctattcaagctgtttatgttcctgctgatgacctgaccgaccctgccccagcaacaacctttgcccatttagatgctactactgtgcttgcaagagcgcttgcagctaaggggatttatccagcggttgacccattagactccacaagtactatgcttcaaccatccgttgttggagacgaacattacaaaacagctagagccgttcaatcaactttgcaaagatataaagaactacaagacattattgcaattcttggtttagacgaactttctgaagaagatagattgacagtcgatagggctaggaaaattgaaaaattcctttcccagcctttcttcgtagcagaaatatttacaggaatgtctggtaaatatgta

SEQ ID NO: 273156 - DNA, 444 bp, Unknown
  Bacterial polypeptide expressing nucleotide sequence isolated from the Sargasso Sea
tatttttattcgtctttgttagtaattggggaggagctttaattccttggagattaattaagttaccaagtggagaattaggagcacctactgctgatatcaatacaactatagctttggctttattggtttcactttcttatttctatgcaggtttaagcaataagggttggagatacttcgaatactatgttcacccaactccgattatgcttcctttcaaaattttagaggattttacgaaacctttatcactctctttcaggctatttggaaatattttggctgatgaacttgttgttggtgttctagtctttttagttccattaattctcccaatacctgttatgttcctaggattgtttactagtgcaattcaggcattgattttcgcaactttggcggcctattacattggagaagctgttgaagaacatcattagc

SEQ ID NO: 273157 - DNA, 878 bp, Unknown
  Bacterial polypeptide expressing nucleotide sequence isolated from the Sargasso Sea
attggaaaaaaaatttggaaaaattacacaagtaattggtgccgtggtggacgtacaatttgaaggacagttaccagaaatattaactgcattggagtgtgataattccggtaatagacttgtattggaagtagctcaacatttgggcgaaacagctgtaagaactattgcgatggatagtacagagggccttaaaagaggagataaggtagctgatactggttcgccaattaaagtaccagtagggccagaaactttaggaagaataattaatgtcattggtgaaccgatagatcaaaaaggcaaagtctcaacgaaggaaagttggccaatacataggccggctccaaaatttacagatcaatctaccgaaacagaaatattagtaacgggaataaaagttgtagatctacttgccccctattctaagggtggaaaaataggactatttggaggagccggggtaggtaaaacagtaattattatggaattaattaataatattgccaaagcccacggtggtttttctgtttttgcaggtgtcggcgaaaggacaagagaaggaaatgatttgtatcatgaaatgatagagtctggcgtaatcaaacctgatggaaaaggatctaaagctgcacttgtttatggtcaaatgaatgaaccaccaggagcacgtgcaagagttggtctaacagggttaactgtagctgaatattttcgggataaggaaggtcaagatgtattatttttcgttgataatatatttagatttactcaagcaggttcagaagtttctgctcttttaggaagaataccttcagcagtaggatatcaaccaactttagccacagatatgggaaatttacaagaaagaattacca

SEQ ID NO: 273158 - DNA, 665 bp, Unknown
  Bacterial polypeptide expressing nucleotide sequence isolated from the Sargasso Sea
aggaagagaagcttaccctggtgatgttttctatcttcatagtagacttttagaaagatctgcaaaattaagtgacgctaatggaggtggatcattaactgcattaccaattattgagacacaagcaggtgacgtctctgcttatattcctacaaatgtaatttctattaccgatggacaaatatttttagaaactgaattatttaaccaaggaataagacctgctgttaacgttggtttatcggtatcgcgagtaggatctgcagcacaaactaaagcgatgaaaaaagtcgctggctcaattaaattagaacttgctcaatatagagaaatggcagctttcgcccaatttggatcagacttagatgcttctactcaacaactattaaatcgaggagcaaaattaacagaattattaaagcaagaccaatactcaccaatgactgtcgcagaacaagtaatttcagttttcgctggagtaaaaggttatttagatgacgttgatttaggaaaaattaaaggatttgagaaagatataatcgaaaaaatcaaaagtagtaaaccagaaattattgaagctattcaatcttcaggaaaattagatgaagatatagaaaatcaattaaaacaagttatagaggaatataaaaaaaataatgcctagt

SEQ ID NO: 273159 - DNA, 944 bp, Unknown
  Bacterial polypeptide expressing nucleotide sequence isolated from the Sargasso Sea
gatggcgaccggcctgaaatcggtcgacgcgatgatcccgatcggccggggtcagcgggagctgatcatcggtgaccgtcagaccggcaagaccgccgtggcgctggataccatcctgaaccagaaaacctacaacgaagccgccggcgacgatgaaggcaagaaactctactgtgtttacgtcgctgtcggccagaagcgttcgaccgtggcgcagctggtgaagaagctggaagagtcgggcgcgatggaatattccatcgtcgtggccgccaccgcctcggaccccgcgccgatgcagttccttgcaccgtattcggcgaccgcgatggccgagcatttccgcgataatggccgccatgccctgatcgtttacgatgatctgtcgaaacaggccgtggcctatcgtcagatgtcgctgctgctgcgtcgtccgccggggcgtgaagcctatccgggtgacgtgttctaccttcactcccgcctgctggagcgttcggcgaagctgaacgaagaaaacggcgcagggtcgctgacggcgctgccgatcatcgaaacccagggcggtgacgtttcggcctttattccgaccaacgtgatctcgatcaccgacggtcagatcttccttgaaacggaactcttctaccagggtatccgcccggctgtgaacaccggtctgtcggtgtcgcgtgtgggctcgtcggcccagaccaacgcgatgaaatcggttgccggtccggtgaaactgtcgctggcccagtaccgcgagatggcggcctttgcccagttcggctctgacctcgacgccgccacccagcagttgctgaaccgtggtgcgcgcctgaccgagctgatgaaacagccgcagtattcgccgctgaccaacgccgagatcgtctgcatcatctatgcgggcaccaatggctacctcgacaagatcgacg

SEQ ID NO: 273160 - DNA, 346 bp, Unknown
  Bacterial polypeptide expressing nucleotide sequence isolated from the Sargasso Sea
gagcattatagagtagctcgagaggttcaaaaaatattacaaacctataaatctttacaagatataatagcaattttgggtatggatgaactttctgaagaagataaattaacagtatcaagggcgagaaaaattcaaagatttctatcacaaccattttttgtggctgaggtatttactggttcgccaggaaaattagtagacttgcaggcgacgatcaaaggttttgatgcgatatgcaaaggagaatacgatcatttgccagaagcagctttttatatggtaggaactattgaagaggcggtagaaaaagctgaaaaaatggcaaaagatgcagctgcttaat

SEQ ID NO: 273161 - DNA, 625 bp, Unknown
  Bacterial polypeptide expressing nucleotide sequence isolated from the Sargasso Sea
ggtcgaataccatctgcagtaggttatcaaccaacattggctacggatatgggaaatttacaagaaagaataactaccacaaacaaaggatctattacttctgtccaagctatttatgttccagctgatgatttaacagatccagctccggctacatcatttgcacatttagatgcaacaactgttctttccagacagatagctgaattaggaatatatcctgcagttgatcctctagattccacatctagaattttagatcccagaatagttggtgaagaacattacagagtagctagggaagttcaaagaatattacaaacttacaaatctttacaagatataattgcaattttaggtatggatgagctttctgaagaagataaacttacagtagcaagagcacgaaagattcaaaaatttttatctcaacctttttttgttgcagaagtatttactggcacaccaggaaagttggtagatcttgaagctacaattaaagggtttgatgctatatgtaagggtgagtatgatcacttacctgaagctgctttttatatggtaggtactattgaagaagtaattgaaaaagcagaaaaaatggcaaaagaagcagcagcttaat

SEQ ID NO: 273162 - DNA, 715 bp, Unknown
  Bacterial polypeptide expressing nucleotide sequence isolated from the Sargasso Sea
aaggcggctccaattgcttgcgggaacaggcgccgaggatacccacttgatagtcgttgtgacatccgaccgcggcctgtgcggtggcttcaattccagcatcagtcgggaagcacgtaatcgtattcgcgacctgcaagcgggaggcaaaacggtcaagcttctctgcgttggccgaaaaggccgtgaccaacttaaatcagagtttaacgataatattcttgaaacttacgagggtatcggtcgcagtggtgtgaccttcgatgaagctgataaggtcgcaaatcagatcattggaatgtttgatggcggtgaatttgatgtctgcactttagtttacaataaatttgtctccgccattacgcaggtagtcacgcctcagcagattattcccgtcgaaattaacgtagcagaagagacggcaaaggacgacgcagcgcccgccaatggagggcccgtagcgacctatgagtatgaaccatccgagcaggaaattctgtcagaaatcctgccgggaaacttaaaaatacaggtgttcagggcacttttggagagcagcgcgtctgaacatggcgcacgcatgtccgccatggacaatgcgacacggaacgcgggagatatgattgacggcctgacacagacctttaaccggacacgtcaggcgaaaattaccagcgagttgattgaaattatttctggcgcggaagcgctctaa

SEQ ID NO: 273163 - DNA, 697 bp, Unknown
  Bacterial polypeptide expressing nucleotide sequence isolated from the Sargasso Sea
ggggcaaaaaagatcaacagtaagacaaatacaaaaaacattagaagaagctggagcaatggaatacacgactattgttgcggcaactgcatcagactccgcacctttacagtttttagcaccatatactggatgtgctatgggtgagtattttagagataatggaatgcacgcattaattatttatgatgatttatcgaagcaagcagttgcttacagacaaatgtctttacttttaagaaggcctcctggacgagaagcttatccaggagatgtattctatttacatagtagattacttgaaagagcagcaaaattaagtgatgaacatggtggaggatctcttacagcacttccaattattgaaacacaaggtggtgacgtgtcagcttttatacctactaatgtaatttctataacagatggacaaatatttttagagacagaactttttaatcaaggtattagacctgcaatcaacgtaggtttgtctgtatctagagttggatcttcagctcaaacaaaagctatgaaaaaggtttctggatcaatgaagctagagttagcccaatatagagaaatggctgcatttgctcagtttggatcagatctggatgcttccactcagcaacttttaaacagaggttcaaaattaacagaacttttaaaacaaaagcaatattcaccaatgactgtt

SEQ ID NO: 273164 - DNA, 682 bp, Unknown
  Bacterial polypeptide expressing nucleotide sequence isolated from the Sargasso Sea
atgagtaaagaaggggtaataacacaattaattggcgccgtagttgatgtaaaattcaaggacgaattacctgaaatatatacagctttagaaacaaataatagtggaaacaaattaattttggaagttgctcagcatttgggggaaaatagtgtaagaactattgcaatggactcaaccgaagggcttaagaggggagataaagtattaaataccaacgctcctatcagtgtgcccgtgggacctgagacactaggaagaattataaatgtgataggtcaaccaattgatgaaaagggagacgttaagacaaaagagaaatggcctatacatagacctgctcctaaatttacagaccaatcaactgaaacagaaattcttgtgaccggtattaaggtaattgatctattggcaccttatgctaaaggaggaaaaattggattgtttggtggagcgggagttgggaagacggtaaccataatggaattaattaataatattgccaaagctcacggaggattttcagtttttgctggcgtaggtgaaagaacaagggaaggtaatgacctttatcacgaaatgattgagtctggagtaatcaagaaagatgggaaaggatcaaaggcagcattagtttatggtcaaatgaatgaaccgcccggcgctcgtgctagagtagctt

SEQ ID NO: 273165 - DNA, 775 bp, Unknown
  Bacterial polypeptide expressing nucleotide sequence isolated from the Sargasso Sea
caaatgaacgaaccgccaggtgctagagcaagagtagctttaacaggattaacagttgcagagtattttagagatcaagagggccaggacgttttattttttgtggacaatatttttcgttttacacaagcgggctctgaggtttctgcgctattaggaagaataccctctgcagtaggctatcaacctactttagcaactgatatgggaaatcttcaagaaagaattacaacaacaaataagggttcaattacgtctgtacaagcaatttatgttcctgcagatgatttaacagacccggcaccagctacatctttctcacacctagatgcaactacggtattgtctagacaaattgcagagttaggtatttatccagcagtcgacccgttagactcaacttcaagaatactagatccgagagtcgttggagatgagcactatagagtagcaagggaagtacaaaaaatactacaaacttataaatctttacaagatattattgctatattaggaatggatgaattatctgaggaagacaaacttacagttgcaagagctagaaaaattcaaagattcttatctcaaccttttttcgttgcagaagtttttacagggtctccaggtaaacttgttgatttagaatcgacaatcaaaggttttgatgcaatttgtaaaggtgaatatgatcatttaccagaagcggctttttacatggttggtacaattgaagaagcagtagaaaaggcagaaaaaatggcaaaagaagcagcag

SEQ ID NO: 273166 - DNA, 748 bp, Unknown
  Bacterial polypeptide expressing nucleotide sequence isolated from the Sargasso Sea
agttgttgatttacttgcgccatattcgaagggtggaaaaatcggactttttggaggagccggagttggaaagacagtaattataatggaattaattaataatatagcaaaggcacacggtggattttctgtgttcgcaggagttggtgagagaactagagaaggtaatgatctttatcatgagatgattgagtctggagttataaaacctgatggcaaaggatcaaaagcagctttagtatatggacaaatgaatgagccgccaggtgcccgtgctcgggttgggttaacaggtctaactgttgctgaatattttagagacaaagaaggccaagatgtattattttttgttgataatatatttagatttactcaagctgggtcagaagtttcagcacttctgggtagaatcccatctgcagtaggataccaacctaccttagcaaccgacatgggaaatttacaagaaagaattacaacaacaaataaaggctcaattacttcagtgcaggctatctatgttcctgcagacgacttaactgatcctgcgccagccacttcgtttgctcacttggatgctaccacagtgctttcgaggcaaatagctgagctaggaatatatcctgcggttgatcctttggattctacttctagaattttagatcccagaattgttggtgaagaacattatcgcgtagcaagagaggtacaaaagatattgcaaacttataaatcattacaggacatc

SEQ ID NO: 273167 - DNA, 588 bp, Unknown
  Bacterial polypeptide expressing nucleotide sequence isolated from the Sargasso Sea
gcaaacccggctcattaacagcattgcccatcattgaaacacaggctggcgacgtttctgctttcgttccaaccaatgtcatttcaatcaccgatggccagatttacctggaaactgacctgttcaactccggctttcgtcccgccatcaacgcgggcctttccgtgtcgcgtgtcggtggcgctgcacagacgtcaatcatcaaaaaactgggcggcggtgttcgcctcgctctagcccagtatcgcgagctggcggccttctcacagttcgcctctgacctcgacgaggcaacccgcaagcagctcgaacgcggtcagcgtgttatggagctgatgaagcaaaagcagtacacgccgttatcggtcgcacacatggcagtcagtctttacgccgttgaacacggttatctcgatgacatcgatctcgaaaagatcattgattttgaagctgcgttgcacagttttttcgattcgtcacacagtgacctgatcgacaacatcaattcgagtggcgaatacggcgacgatacgcaagcggcactcaaggccgcgatcgacgacttcaaagccaaccattcctggtaat

SEQ ID NO: 273168 - DNA, 525 bp, Unknown
  Bacterial polypeptide expressing nucleotide sequence isolated from the Sargasso Sea
tatggcaaacgaaaaggaaattcgaacaaaaattgggagtgttaaaaacacccagaaaattacgaaggccatggaaatggttgcggcaagtaagatgcgccgaacacaggaaacaatgaaaaaagcgttgccatatgcagacaaaatcagagctgtgataggacatatctataaagcgaacccggactacaaacacccctttcttgaaaagcgtgaagtcaaaacagccggctacattgttgtcagttccgatagagggctttgtggcgggctcaatgtaaacatgttcagaggattaattgccgaactaaaagagaacaaaagcaatcaaattgattcaaagctttgccttgttggagcaaaggcagtccagttttttaggtctgtggatgtggatgtcatagcagcagcatcacatcttggtgaagagccacaagttgaagatttggttggggcaatcaaaaccatgttggatgaatacaatgaaggcaaaatagaccagctttttattgtgcacaatgattt

SEQ ID NO: 273169 - DNA, 715 bp, Unknown
  Bacterial polypeptide expressing nucleotide sequence isolated from the Sargasso Sea
gatctatcaaaacaagctgtagcttacaggcaaatgtctttattacttagaagaccaccaggtagggaggcgtatccaggagatgtattttatttacatagcagattattagagcgagcagctaaactaaataaaaaaagtggcggtggatcattaaccgccttacccataattgagactcaagcaggagacgtatcagcttatattcccacaaatgtaatttccataaccgacgggcaaatttttttagaaacagagctatttaaccaaggcatacggcctgcagtaaatgtgggtttatcagtttccagagttggttctgctgctcaaactaaagcgatgaaaaaagttgcaggttctataaaattagagttagcccaatacagagaaatggccgcttttgctcaatttggttcagatttggacgcttcaacccaacaattactaaatcgtggtgcaaagctaacagagcttttgaaacaagatcaatattcaccaatgacagttgccgaacaagttatctcagtttttactggggtcaaagggtatttagacgatattgatttgaacaatataaaaaaatttgaacaagatattatagaaaagataaaaaatgaaaaacctgaaatcatagacgagatacaatcctctggaaagcttgaagaaagtatagagaaaagtttgtctcaaataattctggaatacaaaaaaggga

SEQ ID NO: 273170 - DNA, 620 bp, Unknown
  Bacterial polypeptide expressing nucleotide sequence isolated from the Sargasso Sea
tatgagcaaaggaataataacacaggtaattggcgcagttgtagatgtgaaatttgatggagaattgccagaaatcttaacagctttagagtgcaaaaatagtggaaatagacttgtattagaagtagctcaacacttaggtgagtcaacagctagaacaatagcaatggatgcaacagaaggattaaaaagaggcgatgaagtcatcaacactaaagcaccaataaaagttccagttggaccagaaacactaggaagaattataaatgtggtaggagagccaattgatgaaagaggagttgtaaagactaaagaaagttggccaattcatagacctgcacctgaatttaatgaccaatcaactgagacagagattcttgttacaggtatcaaggtaatcgacttactagctccttatgcaaaaggtggaaaaattggattattcggaggtgcgggagttggtaaaactgttttgattatggaattaattaataacgttgcaaaagcacacggtggtttttctgtttttgctggtgttggagagagaactagagaaggaaacgacttatatcatgaaatgatggagtcaggtgtaattaaatcagagggtcctggatcaa

SEQ ID NO: 273171 - DNA, 860 bp, Unknown
  Bacterial polypeptide expressing nucleotide sequence isolated from the Sargasso Sea
ttatggggagaggcacttgggtgtccaagaaggaagtaacgttaagtccacaggtaaaatcgcatctgttccagttggtgaagcaatgcaggggagagttgttaatcctctcggacaacctatagatgggaaaggggaaattccaacaagtgatactagattgattgaagaaatggctcctggaataatcaagagaagatcagtgcatgaaccaatgcaaacaggtatcacatctatagatgcaatgattcctgttggaagaggtcaaagagaattaattattggtgatagacaaactggaaaatctgcgattgctatcgacacaataattaaccaaaaaggtcaagacgtagtttgtgtttacgtagctattggtcagaagtcagcatcagtagcaaatatcgtagaggtcttaagagagagaggagctctagattatacagtcgtagttagtgcaggagcctcagaacctgctgctttacagtacttagcaccttataccggtgcagcaattgctgaacattttatgtaccagggtaaagcaacacttgttatttatgatgatctaacaaaacaagctcaggcttatagacaaatgtctcttcttttaaaaagaccaccaggaagagaggcttatccaggagatgttttctacttacatagtagattgttagaaagagcagcaaaactttctgatgctatgggagggggttctatgacagctcttccaattattgaaactcaggcaggggacgtttcggcttacatcccaactaatgttatttcaattacagatggacaaattttcttaagtgcagatttatttaactcaggattaagaccagctattaatgttggta

SEQ ID NO: 273172 - DNA, 385 bp, Unknown
  Bacterial polypeptide expressing nucleotide sequence isolated from the Sargasso Sea
gaagaaggttgcaggatcaattaaacttgagcttgctcagtacagagaaatggctgcctttgctcaatttggttctgacttagatgtttcgactcaaaaacttttaaatagagggtcaaaacttactgaacttttaaaacagaatcaatattcaccaatgacggttgccgaacaagtaatatctatattcgctggggttaatggttttttagatgatacagaattaggcaatataaaaaaatttgaaattaatttgttagatgagattaataataataattctgacattattgatgaaattaactctactggtaaattagaggaaaacacaaagaacaaattaattagcgttatagaaaagataaaaaaaggaaaaaatatttaa

SEQ ID NO: 273173 - DNA, 403 bp, Unknown
  Bacterial polypeptide expressing nucleotide sequence isolated from the Sargasso Sea
aatgccaagtttagatgatttaaaaaaaagaattaaaagtgttaagtcgacacaaaaaataacaaaagctatgaaaatggtagctgctgctaagcttaaaaaagcacaagaaagtgctgaaaatggaagaccctacagtgaaaaagtacaaaatattatcttaaatctaacaaaatcaattaatgatcctaataatgcaccaaagctactcataggtaccggtaaagacgaggttcatttatgcgttgttatgactgctgatagaggtttatgcggcggatttaatacaaatatttgcaaattagcaaaaaaacattttagaaaaattttacaagagggaaaagagttaaaaattatcacaattggaactaaaggttatgatcaaattaaaaatgaatatggc

SEQ ID NO: 273174 - DNA, 588 bp, Unknown
  Bacterial polypeptide expressing nucleotide sequence isolated from the Sargasso Sea
tttctttaggaactaaaaagatggaaaatgatcctaaaggccttcaaaacctgcttgagtttctttgggattacataagagaccttgctaggacgcaaataggtgaaaaagtttatagagattggatgccatttataggtactttatttttattcgtctttgttagtaattggggaggagccttaattccttggagattgattaagctaccaagtggagaattaggagcacctactgcagatatcaatacaactatagccttggctttattggtttcactttcttatttctatgcaggtttaagcaataagggttggagatacttcgaatactatgttcacccaactccgattatgcttcctttcaaaattctagaggactttacgaaacctttatcactttctttcaggctatttggaaatattttggctgatgaacttgttgttggtgttctagtctttttagttccgctaattctcccaatacctgttatgttcctaggattatttactagtgcaattcaggcattgattttcgcaactttagcggcctactacattggagaagctgttgaagaacatcattagc

SEQ ID NO: 273175 - DNA, 871 bp, Unknown
  Bacterial polypeptide expressing nucleotide sequence isolated from the Sargasso Sea
gattggcgcggttgtcgacgttgaatttgatggtgaactgccagcgattcaaaacgcgctggaggcaaacaacaacggccagcgattggtgctagaggttgctcagcatcttggagagtcagctgtgcgcacgattgcgatggatgcgactgaaggtttggttcgtggggccgatgctgttgatacaggcgctccgatcactgtgccggttggcccggaaactcttggccggatcatgaacgtcattggcgaacctgtcgatgaaggcaagccggttaagtcaaagaaacattaccctattcaccgcccagctccagattatgttgatcagtcaaccgaggctgaaattctagtgacaggtattaaggttgttgaccttttggccccttatgcaaaaggcggtaaaatcggtctgtttggtggtgccggtgttggcaaaactgtcttgattatggaattgatcaacaacgtggcaaaggcccatggcggctattccgtgtttgctggtgttggcgagcggacacgcgaaggtaacgatctgtatcacgaaatggtcgaatcaggtgttatcaaaacagacgggccggggtcaaaagctgcgctggtttacggtcagatgaatgagccgccaggtgcgcgcgcgcgcgtggccttgaccggtttgacgttggctgaatatttccgtgacgaagaaggccaagatgtgttgttctttgttgacaacatttttcgctttactcaggctggatctgaagtttcagctttgcttggtcgtatcccatcggcggtgggctatcagccaacattggcaactgatatgggagcgttgcaagaacgtattaccacaacaaacaaaggctcaatcacgtca

SEQ ID NO: 273176 - DNA, 949 bp, Unknown
  Bacterial polypeptide expressing nucleotide sequence isolated from the Sargasso Sea
tgtaattaaacaaattatcggagcggttatcgatgttgagtttgataaagatcagataccaaatatttacgatgccttggttgtttctgataacaacttagttatggaaacacaacaacaacttggtgatggtcttgttagaactgtggcgatgggctcgactgaaggacttaaacgaggccttgaagtaacaaatactaaagctccaattagtgtccctgtgggtgaagctacattaggaaggattatgaatgtattgggcgatccgattgacatgaagggagatgtgaaaacaaaagatagaatgcctattcacagaaaaccaccggcttatgtggaccttgcagattcaaatgaaattctagagacaggaattaaagtgatcgatttagtgtgcccatttgctaaaggtggaaaagttggtttgtttggaggagctggtgttggaaaaacagtcaacatgatggagctcataagaaatattgctattgagcattcgggctactcagtattcgctggtgttggtgagagaaccagggaaggaaatgatttttaccatgaaatgacagattcaaacgttctagacaaagtgtcactagtttatggccaaatgaatgagcctcctggcaacagattaagagtggcgctaactggtttaactatggcagaaaagtttagggatgaaggtagagacgtattgttgtttgttgataacatttatagatatacgcttgctggtgttgaagtctcagccctgctcggccgaatgccatcagcagttggttatcaaccaacacttgctgaagaaatgggtgttttgcaagaaagaattacttccacaaaaacaggctccattacgtctattcaggctgtctatgtaccagctgatgatcttaccgacccatcacccgccacaaccttcgcacacttagatgctacagttgttctt

SEQ ID NO: 273177 - DNA, 821 bp, Unknown
  Bacterial polypeptide expressing nucleotide sequence isolated from the Sargasso Sea
agatggcaaaggttcactagacaaaggaataaaaagaagcagagttgaagttaaagcgcctggtataattccaagaaaatctgtgaatgagcctatgcaatcaggacttaaatcagttgatagtttagttcctattggaagaggtcaaagagaactaatcataggtgataggcaaactggaaagactgcggtcgcaatcgacactataattaatcagaaaaaaataaatgaatctaacgatgaaaaacaaaaattatattgtatttatgtagcaattggccaaaaaagatcaactgtcagacaaatagaaaaatctttagaagaggctggggctatggaatatacaacaatagttgctgcaacagcatcagatgctgccccgcttcagtttttagctccttatactggatgtgcaatgggtgaatattttagagacaatggaatgcatgctttaattatttatgacgatttatctaagcaagctgttgcttatagacaaatgtcattattgttaagaagaccaccaggaagagaagcttatccaggagatgttttttatttacatagtagacttttagaaagagcagctaaacttagtgatgaacatggaggaggatctttaacagcactaccaattattgaaacccaaggtggtgacgtatcagcatttattccaaccaatgttatttcaattacagatggacaaatatttcttgaaacaaatctgtttaaccaaggaataagaccagcaattaacgttggtttatctgtatctagagttggatcttcggctcaaactaaagcaatgaaaaaagtttctg

SEQ ID NO: 273178 - DNA, 917 bp, Unknown
  Bacterial polypeptide expressing nucleotide sequence isolated from the Sargasso Sea
gattattaaatacggagatgattttatgcgttcaatggaagaagggggttgggatctaaagagagtggataagtcagctatgaaaaaatctaaggccacttttgtttttggtcagatgaacgaacctcctggagctcgagcaagagttgctttatctggtttaacaatagctgaatatttcagagacggtgcaggagattcacaaggtaaagatgttcttttttttgtggataatatctttcgttttactcaagctggatccgaggtttcagcgttgttaggaagaatgccctctgcggtaggctatcaaccgactctagcaacagaaatgggtgcaatgcaagaaaggattacttcaacaaataagggatcaattacatcagttcaagcagtttatgttccagctgatgatttaacagacccagctccagcaaccacttttgctcatttagatgccacgactgtgttatcaagaaagatctcagaattaggaatatatccagcagttgatccacttgattctacatctagaatacttacacccgaaattttgggtgatgaacattacaattgtgcacaaagggttaaagagttattacagaggtataaagaacttcaagatataatcgcaatattaggtatggaggagctatctgaagaagataaacttgcagttggaagagctaggaaagtccaacgttttctttctcaaccctttcacgttgctgagcaatttactggtatacctggagttctagttgacattaaagatacaattaaggggttcaatatgattatggatggcgagttagataatcttcctgaagctgcatttaatcttaaaggtacgattgaagatgctattgaagcaggagaaaaatgttatcagaatcctaatgcatttagaattatatcac

SEQ ID NO: 273179 - DNA, 821 bp, Unknown
  Bacterial polypeptide expressing nucleotide sequence isolated from the Sargasso Sea
gatggaaaaggaggacttttctgctaaaaatagaaaacgtgttgaagtaaaagctccaggcattattccaagacagtctgttagtgagcctatgcaaacagggttaaaatcaatagattctcttatacccattggaagagggcagcgtgaattaatcattggagataggcaaactggaaaaacagcagtagcaattgatgcaattataaatcaaaaaaaaataaatgaatcttcagacgaaaagaaaaaactatattgtgtgtacgtagctattggtcaaaagcgatctactgtagctcaaatcacaaaaactttagaagaagcaggagctctaaaatatacaactatagttgctgctacagcatctgactcagcaccactacaatttttagcgccttatacaggatgcacaataggagaatattttagagataatggtatgcatgctttaattgtatatgatgatttatcaaaacaagcagttgcttacagacaaatgtctttattattaagaagaccaccgggaagagaagcatatccaggcgatgtattttatttacatagtagactattagagcgtgcatcaaaactaaacgataaaagtggtggaggatcattaacagctttaccaattattgagacacaggcaggagatgtttcagcatatattcctactaacgttatttctataacagatggacaaatatttttagaaactgagttatttaaccaaggaattcgaccggctgttaacgttggcttatccgtatcgcgagtaggttctgctgctcaaactaaagcgatgaaaaaagtagctggtt

SEQ ID NO: 273180 - DNA, 329 bp, Unknown
  Bacterial polypeptide expressing nucleotide sequence isolated from the Sargasso Sea
agccagagaagtgcagagagttttacaaacatataaaagtcttcaagacattattgctattttaggaatggatgaactctcagaagaggataagctaaccgttgcgagagcaagaaaaattgaaaaatttttgagccaaccattttttgtagcagaggttttcactggttcaccaggtaagtatgttgatcttgaagatacaattaagagttttgatggattggtaaaaggagaatacgatcatatgccagaagcagcattttatatggtaggcggaatagatgaagcaattgaaaaagctaaaaaattagaagctgaagctgcataat

SEQ ID NO: 273181 - DNA, 790 bp, Unknown
  Bacterial polypeptide expressing nucleotide sequence isolated from the Sargasso Sea
ggaataaaggttattgatcttttagcaccctatgcaaaaggtggtaaaattggtttatttggtggagccggagttggtaaaactgttttaattatggaattgatcaacaacgttgcaaaagctcatggtggattttctgtttttgcaggagtaggagaaagaactagagagggaaatgatctctaccatgaaatgatagattcaggtgttattaaaactgatggggaaggttctaaagcagcattagtttatggacaaatgaatgaacctccaggagcaagagcgcgagttgctttaactggattaactgttgctgagtactttagagatcaagaaggtcaagatgtgttattcttcgttgataatatatttaggtttacacaagcaggatctgaggtctctgcattgcttggtagaataccttcagctgtaggatatcaaccaacattagcaactgatatgggtaacttacaggaaagaattacaacaacgaataaaggttcaattacatctgttcaggcaatttatgttcctgcagacgacttaactgaccctgcacctgcaacttcatttgctcacttagatgcaacaacagtactttctagacagattgctgaaattggaatttacccagcggtagatccactagactcaacgtctagaattttagatcctagaatagttggtgacgaacattatagagttgctagagaagtacaaaaagttctgcaaacttataaatctttacaagatattatcgcaattttaggtatggatgaatgtcagaaga

SEQ ID NO: 273182 - DNA, 973 bp, Unknown
  Bacterial polypeptide expressing nucleotide sequence isolated from the Sargasso Sea
cggtagtagacgtaaaatttttgatggagaactaccagaaattttaactgcactagagtgcgataacggtggaaatagattagtattagaagttgcacaacatttgggggaatcaagtgttagaacaattgcaatggatgcaacagaaggtcttaaaagaggagacgaggtaacagatacagctgctccaattaaagtcccagtaggaccagagacacttggaagaataataaatgtaataggtgagcctattgatgaacgaggagaagttaaaagctcagataactggccaattcatagagccgcacctgaatttaatgatcaatcaacagaaactgaaatacttgtaacaggaataaaagttattgatcttttagctccctacgcaaaaggtggtaaaatcggtttatttggtggagccggagttggtaaaactgttttaattatggaattgattaacaacgttgcaaaagctcatggtggattttcagtttttgcgggagtgggagaaagaactagagagggaaatgatctttaccatgaaatgatagactctggtgttattaaaactgatggtgaaggttctaaagcagcattagtttatggacaaatgaatgagcccccaggagcgagagctcgagtagccttaactggattaactgtcgctgagtattttagagatcaagaaggtcaagacgtactattctttgttgataacatatttagatttacacaagcgggatctgaggtttcagcattattaggccgaataccttcggctgtcggatatcaaccaacattagcaacagatatgggtaacctacaggaaagaattactacaacgaacaaaggttcaattacatctgttcaggcaatttatgtacctgcagacgacttgactgatcctgcacctgcaacttcatttgcacactttagatgcacaactgtactttctagacaattgctgaaatag

SEQ ID NO: 273183 - DNA, 760 bp, Unknown
  Bacterial polypeptide expressing nucleotide sequence isolated from the Sargasso Sea
gatgagaaggggccaattgagtgaaaaatcaaaaatgccaattcacagaaagcctccttcatatactgatcagtcagcatctaatgaggtccttgaaaccggcattaaagttattgatcttatgtgtccatttgctaaaggtggaaaaattggtttatttggtggagcaggtgttggtaaaacagtaaatatgatggagcttataaataatattgcgcttcaacattcaggtctttctgtttttgctggtgttggcgaaagaacgagagaaggaaatgacttttattatgaaatgcaagaatcaggagttgtaaatattgacaatctaggcgaatcaaaagttgcgatggtttacggacaaatgaatgagccaccaggaaatagattaagagttgctttaactggattaactatggctgaaagctttagagatgaaggtaaagatgttttattatttattgataatatttatcgttataccttagcaggtgttgaggtgtctgctcttttaggcagaatgccatctgctgttggataccagccaacattggctgaggaaatgggagctcttcaagaaagaattacatcaacgaagacaggatctattacttcaatacaagctgtgtatgtgccggcagatgatttgacagacccctcaccagcaacaacatttgctcacttggacgctactgttgttctttcaaggcagatttctgagttaggaatatatccagctgttgatcctcttgattcaacaagc

SEQ ID NO: 273184 - DNA, 952 bp, Unknown
  Bacterial polypeptide expressing nucleotide sequence isolated from the Sargasso Sea
ttatattggtgtttatgtagcaattggtcagaaacgttctactgtagctcaaataacaaaaactttagaagaagccggagctttaaaatatacaactatagttgcagcaacagcttcagattcagctccattacaatttttggctccttatacagggtgcacaattggagaatattttagagataacggaatgcatgccttaattgtttatgatgatttatcaaaacaagcagttgcatatagacaaatgtctttattattaagaagaccaccaggaagagaagcctatccaggagatgtattttacttacatagcagattacttgaacgtgcgtcaaaactaaatgaaaaaagtggtgggggttcgttaaccgctctgcctataattgaaacacaggcaggagatgtttctgcatatataccaacaaacgtaatttcaattactgatggacaaatatttttggaaactgagttatttaaccaaggaattaggccagcagtaaacgtagggctttctgtgtctcgagtaggttccgcagcacaaaccaaagcaatgaaaaaagtagctggttctataaaactagagcttgctcaatacagagaaatggctgctttcgctcagtttggatcagatttagatgcttcaacacaacaattattgaatcgaggtgcaaagttaacagagcttttaaaacaagatcaatattctcctatgactgtagccgaacaagtaatttcagtattcacgggagtaaaaggatatctagatgatgttgaactaaatgatattaaaaaatttgaaaaagatattattgaaatgattaaaacagaaaaaccagaaattatagaatcaatagagttaactggaaagctggaagaaatactgaaacactactttctcaaatcattaacgaatacaaaaaaggtaacaaataaatgcaagtttagatga

SEQ ID NO: 273185 - DNA, 658 bp, Unknown
  Bacterial polypeptide expressing nucleotide sequence isolated from the Sargasso Sea
atgcaaattaaaccctcagaaattacaaaacttctaaaagatcaaattaaaaattttggtgaaaaggctgagatatcagaagttggaaaagtattatccgttggtgatggtattgcaagagtttatggactcgacaatgttgaagctggagaaatggtagaatttgaagatggatcaaaagggatggcgttaaatttagaaagtgataacgtcggtgtggtaatttttggtgacgataaaaaaattaaagagggaagcactgtaaaaaggacaggttctatagttgacgcacctgttggtaaagagttactcggaagagtcgttgatggactgggaaatcctatagacggaaaaggtaatttaagcgaaaaaattaaaagacaaagagtagaattgaaagccccaggaattatcccaaggcaatcagtaaatgaacccatgcaaacaggtttaaaggctattgatactcttatcccaattggaagaggacaaagggaattaataatcggtgatagacaaacaggaaaaactgccgtcgcaattgacgctataattaatcaaaaatcaattaatgagtctaaagatgaaaagaaaaaattatactgtatttatgtagctattggacaaaaaagatcaactgttgctcaaatagtaaaaa

SEQ ID NO: 273186 - DNA, 457 bp, Unknown
  Bacterial polypeptide expressing nucleotide sequence isolated from the Sargasso Sea
aggaattagacccgcaataaacgttggtctgtcggtttcaagagtagggtcttctgctcaaactaaagcaatgaaaaaggtttctggatcaatgaaactagagctggctcaatacagggagatggcagcttttgcacagtttggttctgatttagatgccgctactcaaaaacttttgaatagaggttcaaaactaaccgaacttttaaaacagaagcagtattcacccatgacagttgctgaacaggttatatcagtattttgtggtgtaaaaggacatttagatgaaattgaacaaaaagacattgcaacatttgagactaaaattattgaaaaatgtagatctgaaaaacctgaaataattgattctattaattcatcaggaaaacttgatgaagataatgaaaaaatattaacagaattaatctcggatttaaaaaaaacttttaactcataa

SEQ ID NO: 273187 - DNA, 382 bp, Unknown
  Bacterial polypeptide expressing nucleotide sequence isolated from the Sargasso Sea
aatggcaagtttagacgatttaaaaaaaagaatatctagcgttaaatctacacaaaagataactaaggcaatgaaaatggttgctgcagctaagctgagaagagcacaagaaagtgctgaaagaggaagaccttactctgagaagatgaataatatcatattaaatctatctagtggtgtttcagacaaagaaaacgcaccaaagttattatctggcacaggtgacgataaggttcatctttgtgttgtattgacagcagatagaggtctttgtggtggttttaattcaaatattattaaaaaagcaaaatcttattttcaaaaaatttctgatactggaaaaacattaaaaattattactgtttggctcaaaaggatatga

SEQ ID NO: 273188 - DNA, 369 bp, Unknown
  Bacterial polypeptide expressing nucleotide sequence isolated from the Sargasso Sea
tcttacggatccagcgcccgcaacttctttctcacacttagatgcaactaccgtgctatctagacaaattgccgagctaggtatttatccagcagttgaccctcttgactctacttcaagaatattggatccaagggtagttggagacgaacattatagggtcgcaagagaagttcaacgaatattacaagcctataaatctcttcaagatattattgcaatattaggaatggatgaactttcaaaagaagacaaacttacagtagctagagcaagaaaaatacaaagatttttatcacaaccattttttgttgctgaagtatttactgggtcccctggaaaattggttgatctggagtccacaattaa

SEQ ID NO: 273189 - DNA, 976 bp, Unknown
  Bacterial polypeptide expressing nucleotide sequence isolated from the Sargasso Sea
agaggtcaaacagcaacagacacaggcgctcccatttctatgcctgttggaccagaaacacttgggcgtattatgaacgttgtaggagagcctgttgatgaaagaggtgaaattggtactaccaaaacttatcctattcacagacctgcccctgagtttgttgatcagtctacagaaaccgaagttcttgtaactggtatcaaagttgttgatctattagcaccttatgcccgtggtggtaaaattggactatttggtggtgctggtgttggtaaaacagttttgattatggaacttataaacaatatagctaaagcacacggtggctactcagtttttgctggagttggtgagagaacgcgtgaaggtaatgatctttatcatgaaatgatagagtctggcatcattgatcttaaaggaaaagaatcaaaagtcgcccttgtttatggacaaatgaatgagccccctggagctagagcaagagtagcactatcaggactaactcaagcagaatattttagagatgaagagggtcaagacgtgctgttctttgttgataatatctttagattcactcaagctggatcagaggtatcagctttgctaggacgtatcccatctgctgttggttatcagccaactttggcaactgacatgggtgcactacaagagaggattacaacaacaaaaaaaggatctattacatcagttcaggcaatatatgttcctgcagatgacttgactgatcctgctcccgctacatcattttctcacttagatgccacaacagttttgaatagagcaatttcagaaaaaggtatttatcctgctgtggatccacttgactcaacatctagaattctagatccacaagttgttggcaatgatcattatagagttgcaagagaagttcaaagagtaatacaaacttataaaagtttgcaagatataatcgcaatacttgtatggatgagtg

SEQ ID NO: 273190 - DNA, 823 bp, Unknown
  Bacterial polypeptide expressing nucleotide sequence isolated from the Sargasso Sea
tatgagtttagacaacgttcaagctggagaaatggtagaattttctgatggttcaaaaggaatggcactaaatttagaaagtgaaaatgtaggtgttgtaatttttggagatgataaagcaattaaagaaggtgatacagtaaaaagaacaggagcaatagtagatacgcctgtaggtaaagaattattaggtagagtcgttgacggattaggaaatccaatagatggaaaaggagcattagacaaaggtgtcaaaagaagcagagttgaagtaaaagctccaggaattattccacgtaaatcagttagtgaacctatgcaaactggtctaaaatctattgatagtttagttccaattggaagaggtcaaagagaattaatcattggtgatagacaaacaggcaaaacagctgttgcaattgatgcaattattaaccaaaaaaaaataaatgagtctaatgatgagaaacaaaagttatattgtgtttatgtggcaattgggcaaaaaagatctactgttagacaaattgaaaaaactttagaagaagctggcgcaatggagtatacaactattgttgcagcaacagcttcagatgcggctccgttgcaatttttagctccctatactggttgtaccatgggagaatattttagagacaatggaatgcatgcattaattatatatgatgatctttcaaagcaagcggttgcttatagacaaatgtctctattattaagaagacctcctggaagagaagcctatcctggcgatgtattttatttacatagcaggttacttgagagagcagctaaattaggagat

SEQ ID NO: 273191 - DNA, 667 bp, Unknown
  Bacterial polypeptide expressing nucleotide sequence isolated from the Sargasso Sea
tctttttttgttgataatatctttagatttactcaagcaggttctgaagtatcagctcttcttggtagaatgccatctgctgtaggttatcagcctactttatcaacagagatgggcgatcttcaagaaagaattacttctacaaagaaaggatctattacatcagttcaagctatttatgttccagctgatgatttgactgaccctgctcctgctacggcatttgcacacttagatgctacatcggtattagaaagaaaaattgctgagcttggtatttatccagctattgatccattgacatctacttcaagaattcttgatcctcgagttattggtgatagacattataatgttgctagatccgttcaagcgacgcttcagcaatataaagaccttcaagatattattgctattcttggtatggatgagttgtctgatgaagataaaatggtagtatcaagagctagaaaaatgcaaaaatttatgtcccaacctttttttgttgctgagcagtttacaggaattgagggaagatatgttaagcttgaagattcgattgctggttttgaagcaatcttaaacggagaagttgatgacttacctgaaaatgcattttcatatgttggttcaattgatgaagcaattgaaaaaggtaaaaagtgaa

SEQ ID NO: 273192 - DNA, 916 bp, Unknown
  Bacterial polypeptide expressing nucleotide sequence isolated from the Sargasso Sea
ccaattgacgaaaaaggtgatgtaaagtcatctgaaaaatggcctattcatagagctgcaccagaatttaatgatcagtcaactgaaacagaagttcttgtaactggaattaaagttatcgatcttttagctccttatgcgaaaggtggaaaaattggattattcggaggagctggcgtaggtaaaacagttcttattatggaattgattaataacgtagctaaagcacatggtggtttctcagtattcgccggcgtaggtgaaagaacaagagaaggtaatgacctttatcatgagatgatagaatctggagtaattaaaccaaatgaagctggatcaaaagctgcattagtttatggacagatgaatgaacctcctggagcaagagcaagagttgctttaacaggattaacagttgcagagtattttagagatcaagaaggtcaagacgtacttttctttgtggataatatttttagattcactcaagcaggctcggaagtgtcagctcttttaggtagaattccttcagctgttggttaccagcctacacttgcaaccgatatgggtaacttgcaagagagaatcacaacaacaaataaaggttcaattacttctgtgcaggccatatatgttcctgcagacgatttaacagacccagcaccagcaacttcatttgcacacttagatgcaacgactgtactatctagacaaattgctgaaattggaatttatcctgctgtagaccctttagactcaacatctagaattttagatcctagaatagttggagatgagcactatagagtagcaagagaagtacaaaaagttttacaaacctataaatcattacaggatataattgcaattttaggtatggacgaattatctgaggaagataagcttacagtgcaag

SEQ ID NO: 273193 - DNA, 518 bp, Unknown
  Bacterial polypeptide expressing nucleotide sequence isolated from the Sargasso Sea
aacaaacgtgatttcaattacagacggacaaatatacctagaaagtgatttattcaatgcgggcattagaccggcgataaatgctggtttatctgtttccagggtgggcggcgcagcgcaaacaaaaatcattaaaaaactcggcggtggtgtcagactggcattggctcaatatcgtgagcttgcagcatttgcccagttcgcatctgatcttgatgaagccacaaggaagcagttagaaagaggccagagagtaacagagctaatgaagcaaaaacaatacgctcctctgactgtagcagaaatggctgtgtccctttatgctgcgaacgagggctatcttgatgatgtcccagcagataagattgtcgatttcgagacagcactgcatgcaaactttgttgactcagcctgtgatcttgcccaaaagatcaatgacactggcgactacaacgatgaaatcgaagcggagctcaaaaagttcgttgaagattttaaagcaaccggcacctattaat

SEQ ID NO: 273194 - DNA, 885 bp, Unknown
  Bacterial polypeptide expressing nucleotide sequence isolated from the Sargasso Sea
atacaggcgcccccatttcaatgcctgtaggcccggaaactttaggtagaattatgaatgttgtaggagaaccagttgacgaaagaggcgacattggaacaagtaaatcttatcctattcatagaccagcgccagagtttgttgatcaatctacagaaaccgaagttctagtaacgggaattaaagtagttgatctactagcaccttacgcaagaggtggtaaaattggattatttggtggagcaggagttggtaagacagttttaattatggaattaattaacaacattgccaaggctcatggaggatattcggtatttgctggcgttggagaaagaacgcgtgagggaaatgacttgtaccacgaaatgattgagtcaggaattattgacttaaaagggaaagactcaaaagttgcacttgtttatggtcagatgaacgaaccaccaggagcaagagctagagtcgctctttcaggattaactcaagcagaatactttagagatgaagaaggtcaggatgtgttattctttgtagataacatatttagatttacccaggcaggctctgaagtttcagctcttctaggacgtatcccatctgcagttggatatcaaccaacacttgcaactgatatgggtgctttgcaggaacgaattacaactacaaaaaaaggatctattacatcagtacaggcaatatatgttcctgcagatgacttaacggatcctgcacctgcaacatccttttcacatttggatgcaacaacagttctaaatagagctatctctgaaaaaggaatatatccagcagttgatccattagattctacttccagaattttagatccacaagttgttggtgatgatcatacagagtgctaga

SEQ ID NO: 273195 - DNA, 837 bp, Unknown
  Bacterial polypeptide expressing nucleotide sequence isolated from the Sargasso Sea
ggtttgaaaagaggtgatgaagttatagatactggagctccaattaaagttccagtgggccctgaaactttaggaagaattataaatgttataggtgaaccaatcgatgagaaaggaaaagttgaaacgaaagagaattggccaatccatagagcagcacctgaatttaatgatcaatcaacagaaacagaaattttagttacaggtattaaagttgtagacttgctagcaccatatgctaagggtggaaaaataggtttgtttggtggcgcaggtgtgggtaagacagttctcatcatggagctaattaataacgttgcaaaagcccatggaggtttttcagtttttgcaggagtgggagaaagaactagagagggtaatgatctttatcatgaaatgatagagtcaggagtaataaaacctgaaggcacaggatcaaaagctgcgctggtttatggacaaatgaatgaaccaccaggtgcaagagcaagagttgctttatctggtttaacagttgcagaatatttcagagatcaagaaggtcaagacgtacttttcttcgttgataatattttcagatttacacaagctggatcagaagtatctgcattattagggagaataccttctgcagtgggatatcaaccaacgttagctacagatatgggaaatcttcaagaaagaattactacaacaaacaagggttcaattacttctgttcaagcaatttatgtaccagccgatgatttaactgacccagctccagcaacatctttttcacatttagatgcaacaacagtattatctagacaaattgctgagattggaatttatcca

SEQ ID NO: 273196 - DNA, 535 bp, Unknown
  Bacterial polypeptide expressing nucleotide sequence isolated from the Sargasso Sea
aatggaaattaaagctgcagaaatatcgtctgtaattaaagaccaaatagctaattttgaaactaaagcggatgttgctgaggttggaacagtattaagtgttggagatggaattgcacgtgtatatggtcttgatcaagtacaagctggagagatggtagaattcccaggcggcattaaaggtatggccctcaaccttgaaatggataacgttggtgtttcaatcttcggtgatgatactggaattaaagaaggtgacacagttaaacgtacaggagaaattgttgacgttcctgttggaaaagaattgttagggcgtgttgttgatggtttaggaaatcctattgatggtaaaggtcctattcaatcttctgaaaagagaagaattgaattaaaagccccaggtattattcctcgtcaaagtgtatctgaaccaatgcagacaggtattaaagcacttgatgctcttgttccagttggaagaggacagcgtgaattaataattggtgacagacaaacaggtaaaactgctgtt

SEQ ID NO: 273197 - DNA, 925 bp, Unknown
  Bacterial polypeptide expressing nucleotide sequence isolated from the Sargasso Sea
aatgatgagaaacaaaagttatattgtgtctatgtagctataggacaaaaaagatctaccgttagacaaattgaaaaaactttagaggaagctggggcaatggaatatacaactattgttgctgccacagcatcagatgcggccccacttcaatttttagctccttatactggctgtgcaatgggagaatattttagagataatggaatgcatgcattaattatatatgatgatctttctaaacaagcagtcgcttatagacaaatgtcattattgttaagaagaccgccaggaagagaagcgtatcctggagacgtattttatctacatagtagattacttgaaagagcagctaaattgagtgaagaacatggcggaggatctctaacagcacttccgataattgaaactcaaggaggtgatgtttcggcatttatacctacaaatgtaatttcaataacagatggtcagatttttttagaaacagaattatttaatcaaggtataagaccagcgattaatgtgggactttcagtatcaagagttggatcttctgcgcaaacaaaagcaatgaaaaaagtttctggctccatgaaactcgaacttgcgcaatacagagaaatggctgcatttgctcaatttggatcagacttggatgcctcaactcagaaacttttaaatagaggttctaagttaactgaattattgaaacaaaaacaatactcacccatgacagtagctgaacaagtaatttcagtatattgtggtgttaaaggttatttagatgatatcgaacaaaaaaatattgctaaatttgaaaataaaataattgaaaaatgtaaatctgaaaaatcagaaattctagaatcaataaaaagttcagggaaactagaggaagatatagaaaaatctttagctgaggtaa

SEQ ID NO: 273198 - DNA, 858 bp, Unknown
  Bacterial polypeptide expressing nucleotide sequence isolated from the Sargasso Sea
aaatgatgtcaggacaatagcaatggatgcaacagaggggctaaaaagaggtgatgaagttgctaacacaggttctccaataagtgttccggtagggccagaaaccttaggaagaattatcaatgtggttggtgagtccatagatgaaaaaggtgacgtaaaaacaaaagaaaaatggccaatacacagatcagcacctaaatttacagatcaagctaccgaaacagaacaattagtaactggcattaaagttattgacttactagcaccatacgcaaaaggtggaaaaattggattattcggtggggcaggagtcggaaaaacagtaacgataatggaattaattaacaatattgcaaaagctcatggaggattttcagtatttgcaggagtgggagaaaggactagggaaggaaatgatctttatcatgaaatgattgagtccggagttataaaaactgatggtaaaggctcaaaagctgctctagtttatgggcaaatgaatgaaccaccaggggctagagctcgggttgcacttactggtttgacggttgctgaatactttagagataaagagggacaagacgttcttttctttgtagacaacatatttagattcactcaagccggctctgaagtgtcagctttattaggtagaatcccctcagctgtaggataccaaccaactttagctacagatatgggaaatttacaagaaagaataacttcgactgacaaaggctctattacctctgtgcaagcaatttatgttccggcagatgatttaacagaccccgctccagctacgtcattttcgcaccttgatgcaacaacggttctatcaagacaattgcagaa

SEQ ID NO: 273199 - DNA, 367 bp, Unknown
  Bacterial polypeptide expressing nucleotide sequence isolated from the Sargasso Sea
catggtatctatacgccctgatgaaatcagttcaatcttaaaacaacaaataactgattatgaccaatctgtaagtgttagcaatgtaggaactgttctgcaaatcggtgatggcattgcaagaatatatggcttagatcaggtcatggcaggtgaactattggaatttgaggatggcaccgaaggtatagctttaaatcttgaagatgataatgttggagccgttttgatgggagaggcacttggtgtccaagaaggaagtaacgttaagtccacaggtaaaatcgcatctgttccagttggtgaagcaatgcaggggagagttgttaatcctctcggacaaccaatagatgggaaaggagaaatt

SEQ ID NO: 273200 - DNA, 889 bp, Unknown
  Bacterial polypeptide expressing nucleotide sequence isolated from the Sargasso Sea
gtttatgttgctataggtcaaaaaaggtcaacagtaagacaaattgagaaaactttagaagaagctggagcaatggaatatacaactattgttgcagccacagcatctgatgctgctcccttacaatttttagcaccatataccggatgcacaatgggagaatattttagagataacggaatgcatgcattaattatatatgatgatctttcaaaacaagctgtagcatatagacaaatgtctttgcttttaagaagaccgcctggacgtgaagcctatccaggtgatgtattttatttacatagcagacttttagaaagagccgctaaacttagtgatgagcatggaggcggatcattgacagctttaccaattattgaaactcaaggaggtgatgtatcagcatttataccaacaaatgttatttcaataaccgatggtcagatttttttagaaacagagctattcaatcaaggtataagaccagcaataaatgttggtttatctgtatctagggttggttcttcagcacaaacaaaagcaatgaaaaaagtttcagggtctatgaaacttgagcttgcacaatatagagagatggcagcattcgcacagtttggatcagatttagatgctgcaactcaaaaattgttaaataggggctcaaaattaactgaacttcttaaacaaaggcaatattcacctatgactgttgcagagcaagtaatttctgtattttgtggagtaaaaggtcatttagatgatattgagttaaaagatatctcaaattttgaggctaaaattattgagaaatgtaagtccgaaaaaccagaaattatagagtcaataatatcatcaggtaaattagaagatgagagtgaaaaaatttaac

SEQ ID NO: 273201 - DNA, 364 bp, Unknown
  Bacterial polypeptide expressing nucleotide sequence isolated from the Sargasso Sea
aatggaaatcaatccttctgaaataactaaattattaaaagaacaaataaaaaatttcggagaaaaagcagaggtttctgaagttggaaaagtacttacagttggagatggtatagctagagtatacggtctagataacgtccaagcgggagaaatggttgaatttaatgatggttcaaaaggaatggctttaaatttagaaagcgataatgttggagttgtaatttttggtgatgatagacaaattaaagagggtgatacagttaagcgtactaattcaattgtagatgtaccagttggcaaagaattgcttggcagagtagttgatggtttaggaaatccaatagatggaaaaggtaattta

SEQ ID NO: 273202 - DNA, 763 bp, Unknown
  Bacterial polypeptide expressing nucleotide sequence isolated from the Sargasso Sea
ggagatggtatcgcaagagtttatggattagataatgttcaagcaggtgagatggtagagtttgctgatggatctaaaggtatggctttaaatttagaaagtgaaaatgttggtgttgtaatattcggagatgataaggcaattaaagagggcgacacagtaaaaagaacaggagaaattgttgatactcctattgggaaagagttgcttggtagagtagtagatggtttaggaaatccaattgatggcaaaggtgctctagataaaaatgttaaaaaaagtagagttgaagtaaaagctccaggaattattccaagaaaatcagtaggtgaaccaatgcagtcaggcttaaaagccatcgatagtttagttccaattggaagagggcaaagagaattaattataggtgataggcaaactggaaaaacagcggttgcagttgatacgataataaatcaaaaaaaaataaatgaaagtggtgatgaaaaactgaaactatattgcatttatgttgcaattgggcaaaaaagatcaacggtaagacaaattcaaaaaactttagaagaagctggtgcaatggaatatacaactatagttgctgctacagcatcagacgctgcacctttgcaatttctagcaccatacacaggatgcgctatgggagagttttttagagacaatggtatgcacgctttgattatatacgatgatctttccaagcaagcagttgcatatagacagatgtcattattattaagaagac

SEQ ID NO: 273203 - DNA, 550 bp, Unknown
  Bacterial polypeptide expressing nucleotide sequence isolated from the Sargasso Sea
actacaaacaaaggttcaactcacatctgttcaagcaatttatgtccctgctgacgatttaacagacccagcgccggccacatctttttcgcacttagatgcaacaacagtattatctagacagatagcagaaattggaatttatccagctgtagatccattagattcaacttctagaattttggaccccagaattgttggtgacgaacactatagagttgctagagaagttcaaaaagtattgcaaacttataaatctttacaagatattatagcaattttaggtatggatgaattatcagaagaagataaattgactgttgctagagcgagaaaaattcaaagatttttatctcaacctttctttgttgcagaagtatttactggttcacctggtaaacttgttgatctagaatctacaattaagggttttgacgcaatatgcaaaggtgaatatgatcatttacccgaagcagctttctatatggttggtacaatagaagaagctgtagaaaaagctgaaaaaatggctaaagaagcagcagcataa

SEQ ID NO: 273204 - DNA, 628 bp, Unknown
  Bacterial polypeptide expressing nucleotide sequence isolated from the Sargasso Sea
aatggaaatccgtgccgcagagatctccgcaattttgaagaagcaaatcgccgattttggctctgaagccgaggtcgcggaagttgggcaagtgctttctgtcggtgacgggatcgcacgcatacacggtttagacaaggttcaggctggtgagatggtcgaattcccaggtggcattaaggggatggctctgaacctcgagaccgacaatgtaggtgtcgtgatttttggagacgaccgaaacatccgcgaaggcgatacggtaaagcgtacaggtgcaatcgtcgacgtgcctgtgggcaaaggactgctcggccgggtcgttgatggtctcggcaaccccatagatggcaagggcgctattgaagacgccgagcgcatgcgcgtcgaagtgaaggcaccgggcatcattccccggaaatcagtgcacgagcccgtgcagaccggcctgaaggccatcgattcgctgatccccgtcggccgcggccaacgcgaactgataatcggtgaccgccagacgggaaaaacagcggtgatcatcgacacaatcctcaaccagagagccgcaaatgaaggtgacaacgaatctgaaaagctctactgcgtatatgtggccatcggtcaaaag

SEQ ID NO: 273205 - DNA, 682 bp, Unknown
  Bacterial polypeptide expressing nucleotide sequence isolated from the Sargasso Sea
gctcccaagcttctatcaggtacaggaagtgaaaaaattcatctttgtgtagtaatgacttcggatagaggtttatgtggtggatttaatgccaatataattaaaaaagctaaaagttatttttcaaaattaaatgaagaaggcaaagaattaaaaattattactgtagggtctaaaggtaatgatcagttgaagagagtttatggaaataaaataatagaaaatatatcttttaaagaatcaaaaaatgcaagttattttgatgctgaaaaagtaggaaaaactataattgaaagatttgaaaaagaggaatttgatatctgtacgattttttataatcaatttaaaaatgtaataactcaaatacctcaagctcaacagatcattccattaaacaccgaaaataatactgagaataattcagaagaaagttatgagtttgaaccagatgaagatgaaattttgagcaatttattacctaagaatatttcaacacaaatattcaaagcaatgttagaaaattcagctagcgaacaaggagcaagaatgagtgcaatggataatgctactcgaaacgcaggtgaaatggttgacaaacttactattgagtataatagaagtcgtcaagcagcaattacaaaagaactaatagaaatcatatcaggagcagaaagtttataat

SEQ ID NO: 273206 - DNA, 501 bp, Unknown
  Bacterial polypeptide expressing nucleotide sequence isolated from the Sargasso Sea
gcaagaatttacggtctagataatgttcaagctggagaaatggttgagttttcagatggatcaaaaggtatggcactaaaccttgaaagcgaaaatgtgggtgttgtaatttttggtgatgatagagccgttaaagaaggcgatacagttaaaagaacaggagctattgttgatactccagttggaaaagaacttctaggaagagtcgttgatggtttaggaaacccgatagatggcaaaggtgctctagataaaggtattaagaaaagtagggttgaggtgaaagcgcctggaattattccaagaaaatctgttagtgaacctatgcaaacaggtttaaaatcaattgacagtttggtaccaattggaagaggtcaaagagaattaataattggggacagacaaactggaaaaaccgctgtcgcaattgatgcaatcatcaaccaaaaaaaaattaatgagtctggtgatgaaaaacaaaaactttattgtatttacgaa

SEQ ID NO: 273207 - DNA, 896 bp, Unknown
  Bacterial polypeptide expressing nucleotide sequence isolated from the Sargasso Sea
gggaccattgttggtgtgtcagacggcattatacgaatccatggcctagcagaggcgcaatatggtgaaatgatcgagttcgacggcggtcttttcgggatggctcttaacctagagcgagactccgtaggggtggtggttttaggtgactacagcggactaaaagaaggccaaaatgcgagatgtacgggtaggatcctagaggtccctgtcggaaaagaattgcttggaagagtggttgacgcgcttggaaatccgatcgacggaaaagggccgataggggctgaatctagctcgccgatcgaaaaggtggcgcctggtgtaatagcccggcagtcagttgatcaaccggttcagatcggcttcaagtgcatcgatgcgatggtgccgataggaaggggccagagagagttaataattggcgaccggcagattggtaagactgcgattgcggtcgatgcgatcatcaatcagaaaaatagcggcataaagtgcatatacgtcgccatcggacagaaaatgtcgaccatctcaaacattgtcagctctctagaggagcatggcgccatggaatacacaacggttgtcgcagctggagcgtctgaccccgcctcaatgcagttcatatcggcctattcgggttgcgcaatgggtgagtattttcgggataccggcgaggatgcgttaattatctacgatgacttaacaaaacaggcttgggcttatcgtcagatatctcttcttttgaaaagaccgcccggccgagaggcctaccccggagatgttttctaccttcactcacggcttctagagagagcggccagagtgaacgctgactatgttgaacagcaaacaaacggcgcagtgaaaagcaagactggctctctaacggcgct

SEQ ID NO: 273208 - DNA, 815 bp, Unknown
  Bacterial polypeptide expressing nucleotide sequence isolated from the Sargasso Sea
catggataatttaaacccctcagaaataagcgaaattataaagggaagaattgattccctagaaacttcaaccacagaatccaacgagggaacgatcgtatttctttcagacggcatcgcgagggtgcatggattaagcgacgcaatgtacggagagcttatagagtttgaaggcggcgtttctggaatggcgcttaatttagaaagagactctgttggtgtggtgatttttggagactacaaacaacttgccgaaggtggagtggccaagtgcacgggcaagattttagaggttcctgttggcccagagcttgtcggaagagtagtagatgctcttggaaacccaatcgatggtaaaggcccaatcaaaagtaagttaacttctccggttgaaaaagttgctcccggggtaatgacaagaaagccggttgacgagcctgtgcagataggacttaaggcggttgatagcatggtgccaatcggaagaggccaaagagagttgattattggcgaccgacaaacgggtaagacagcaattgccttagacgcaatcattaatcaaaaaggcacgggcgttacttgtgtgtacgtagccgtagggcaaaaacaatcttccattgcggcagtggtgagaaaacttgaagaatacggagctatggagcatacaattattgttgcagcggcagcagcggaccctgccccaatgcaatttcttgcgccttactcaggttgttctatgggcgaatatttcagagataaaggggaagatgctcttatcatttatgacgatctctccaaacaagctgtagcctatc

SEQ ID NO: 273209 - DNA, 819 bp, Unknown
  Bacterial polypeptide expressing nucleotide sequence isolated from the Sargasso Sea
attgtggacaacaaaaacttacccaatacatcgtccagccccagattttgtaaaccaatctacagaaactgaagttttggttacaggaattaaagtcgttgaccttttagctccttatgcaagaggcggtaaaataggtctttttggaggagcaggtgttggtaagacggtgcttattatggaattaattaataatattgctaaagctcatggtggttattctgtatttgctggtgtaggtgaaagaactagagaaggaaatgatttatatcatgaaatgattgagtctggtattattgatcttaagggtaaaaattcaaaagttgctcttgtatatggacaaatgaatgagcctccaggagcaagagctagagttgcgctttcaggattaacacaagctgaatattttagagatgaagaaggtcaagacgtattattttttgtagacaatatttttagatttactcaagcaggatctgaagtatcagcattgttaggtcgaataccatcagctgttggatatcaaccaactttagcaactgatatgggcgctcttcaagagagaataactactacaaaaaaaggatcaattacatctgtacaagcaatatatgtacctgcagatgatttaacagatccagcaccagcaacatcattctctcaccttgatgcaactactgttttaaatagagcgatttctgaaaaagggatttatcctgctgtagatccacttgactcaacttcaagaattttagaccctcaagttgtaggtgatgatcattatcgcgtagcaagagaagttcaacgtgttcttcagac

SEQ ID NO: 273210 - DNA, 921 bp, Unknown
  Bacterial polypeptide expressing nucleotide sequence isolated from the Sargasso Sea
tccgaacttgttgagctaccaaatggtgtgtttggcatggcactaaatcttgaagaagataacgtcggcattgtattatttggagaatctcgacttgtaaaagagggcgaccttgcaaaaagaacgggccgagtagttgaggtcccagtgggagatacgatgctcggcagggtagtaaatcctctcggacagccaattgatggcaaaggccccataaatacagagcactccttacctattgagagaaaggcactgggagtgatggctagatctccggttaatgaaccgcttcaaactggaatcaaagccgtagatagtatgatacccattggcagagggcaaagagaattaattataggtgaccgacaaacaggaaaaacagcggtagcaattgatgctattattaatcaaaaatacacccacaatactgacagcccggtttactgtatatatgtagcaatcgggcaaaaggcttctacggtagctgctcttgttaaagaactagaaagtaatggtgcaatggaatatactactgtagtagcagctaatgcttcagatcctgcacccatgcaatatattgccccatacgctggtgcggctatgggagagttttttagggataatggaaagcatggattaatcgtctatgatgatttgtcaaaacaggctgttgcatatcgtcaaatgtctctggttttgcgtcgtcctcctggaagagaagcatttcctggtgatgttttttacttacatagtagattgttagagcgcgcatcaaaactttctgaagaacttggtggtggttctcttactgcgctacccattattgaaacccaggaaggtgatgtttcagcctacattccaacaaatgtaatctcaattactgatgggcagatatatcttgagactaaccttttaattcag

SEQ ID NO: 273211 - DNA, 595 bp, Unknown
  Bacterial polypeptide expressing nucleotide sequence isolated from the Sargasso Sea
aatggaaataaatccttcagaagttacaaaaatattaaaagaacaaattaaaaattttggtgataaagcagaagttacagaagttggtcaagttttatcagttggagacggtattgctaggatttatggtttggataatgttcaagctggtgaaatggtagagtttgcagatggttcaaaaggtatggctctaaatttagaaagtgaaaacgttggcgtcgtaatttttggtgatgacagaaatgttaaagaaggggatgtagtaaaaagaactggtaatattgttgatactccagttggaaaagaattattaggaagagtagtggatggtttgggaaatcctatcgatggaaaaggaccattagataaaggaattaaaaaaagtagggttgaagtaaaagctcctggtattattccacgacaatcagtaagtgaaccaatgcaaactggtcttaaatcaattgatagtctagttccgattggaagagggcaaagggaattaattatcggtgatagacaaactggtaaaacagcagttgcagtagatgcaattattaatcaaaaaaaaatcaatgaatctgggatgaaaaacaaa

SEQ ID NO: 273212 - DNA, 814 bp, Unknown
  Bacterial polypeptide expressing nucleotide sequence isolated from the Sargasso Sea
gctggcgaaatggtagagtttgcagatggttcaaaaggtatggctctaaacttagaaagtgaaaacgttggtgtcgtaatttttggtgatgacagaaatgttaaagaaggggatgtagtaaaaagaacgggtaatattgttgatactccagttggaaaagagttattaggaagagtagtggatggtttaggaaatcctattgatggaaaaggaccattagataaaggaattaaaaaaagcagggttgaagtaaaagctcctggtattattccacgacaatcagtaagtgaaccaatgcaaactggtcttaaatcaattgatagtctagttccgattggaagagggcaaagggaattaattatcggtgatagacaaactggtaaaacagcagttgcagtagatgcaattattaatcaaaaaaaaatcaatgaatctggtgatgaaaaacaaaaactgtattgtatatacgttgcagttggacaaaaaagatcaacagtaagacaaattcaaaaaacattagaagaagctggagctatggagtacacaacaatcgttgctgctactgcatcggactctgctcctttacaatttttagcaccatacacaggttgtgctatgggagagtattttagagataatggaatgcatgcgttaataatttatgatgatttgtctaaacaagcagttgcttatagacaaatgtcattgctattaagaagacctccaggacgtgaggcttatcctggagatgtattttatcttcatagtagattacttgaaagagcagctaaattaagtgacgaacatggaggtg

SEQ ID NO: 273213 - DNA, 768 bp, Unknown
  Bacterial polypeptide expressing nucleotide sequence isolated from the Sargasso Sea
ggactttttggtggagcaggagtgggaaaaacagttattattatggaacttattaataacatagcaaaggcacatggtggattttcagtttttgcaggagttggagaaagaacgagagaaggaaatgatctatatcatgaaatgatagagtcaggtgtaattaaaccagaaggacctggatcaaaagctgcgttagtttatggacaaatgaatgaacctccgggagctagagctagagtcgctttaacaggattaactgttgctgaatattttagagatcaagaaggtcaagatgtgctttttttcgttgataatatttttagatttactcaagcagggtccgaagtttcagctttacttggtagaattccatctgcagttggatatcaacctactttagctactgatatgggaaatttgcaagagagaattacaacaactaacaaaggatcaattacatcagtacaagctatttatgtacccgctgacgatttaacagacccggctccagcaacatcattttctcatttggatgcaacaacagtattatcaaggcaaatagctgaacttggaatttatcctgcggttgacccgttagattcaacttctagaattctagaccctagaatagtgggcgacgaacactatagagttgccagagaagttcaaaaaattttgcaaacatataaatctttacaagatattatagcaattctaggaatggacgaactttcagaagaagataaattaacagttgctagagcaaga

SEQ ID NO: 273214 - DNA, 400 bp, Unknown
  Bacterial polypeptide expressing nucleotide sequence isolated from the Sargasso Sea
atggcagaagtaaaaccagcagaggtatcagcaattttaagagagcaattagctggcttaaaaactgaagcagagttacaagaagttggtactgttcttcaaataggagacggtatagctcgtgtttacggtttatcaaacgttcaatacggagagttagtagagtttgaaaatggattgcaatctatggcccttaacctagaagaagacaatgtgggtcttgttcttttgggaagtggtaaaggtattaaagaaggtgcgacagttaaaagaactggtaaaatcgcctctgtaaaaataggagaaggtattgttggtcgtgttgttaatacgattggtgatccaatagatggtaaaggtcctattcaaggagaactttatgatatgccaattgaaagaa

SEQ ID NO: 273215 - DNA, 880 bp, Unknown
  Bacterial polypeptide expressing nucleotide sequence isolated from the Sargasso Sea
agacagtctgtagaccagccagtacaaacaggactaaagtcaattgatgtgatgtttccgattggcagaggacaaagagagctaattattggagacagacaaacaggaaaaacagcaattgctgtagacaccattattcatcaaaaagactctgacataacatgtgtttatgtagcaataggacaaaaacagtcaacggttgcgacagttgttagacagctagaagaagctgacgccctgaaaaacacaatagtagtttcagcaacagctgctgaaagtgcatcacttcagtttcttgcaccatatgcaggatgcacaatgggcgagtattttagagacattggtgaagatgctttgattatttatgatgatttatctaaacacgcagtagcatacagacaaatttccttgctgctcaaaagacctccaggacgagaggcttttcctggcgacatcttttatttgcattcaagacttttggagagagcatccagagttaacgccgattatgtagaaagagttaccaatggcaaggttaaggggaaaacaggctcactaacagcccttccaattattgaaactcaagcaagcgatgtttcagcatttattccaacaaatgtaatttccattacagacggacagatatttttagaaacagatctatttaattctggaattagaccagcaataaatcctggtatttctgtttctagggtaggtggagcagcccaaacaaaaataattaaaaagcttggcggtggagtaaagttagctcttgcacaatttagagaactagaatcattctcacagtttgcatcagacttagatgacgcaacaagagaacagcttgaaaacggacaaagaataacagagctgtgaa

SEQ ID NO: 273216 - DNA, 863 bp, Unknown
  Bacterial polypeptide expressing nucleotide sequence isolated from the Sargasso Sea
tgatttacttgcaccttatgcaaaaggaggaaaaattggattatttggtggagctggtgttggaaaaacagttttaattatggaattaattaataacgttgctaaagcgcatggtggattttcagtttttgcaggagtaggtgagagaacaagagaaggaaatgatctttatcatgagatgatagattctggtgttattaaaacagacggagaaggatctaaagcagccttagtttatggacaaatgaatgagcctccaggagctagagctagagttgcacttacaggattaactgtagctgaatattttagagatcaagaaggtcaagatgttcttttctttgttgataatatttttagatttactcaagcaggttcagaagtttcagctcttttaggtagaattccttctgcagttggttatcagccaacattagcaactgatatgggtaatttacaagaaagaattacaaccacaaataaaggttcaattacttcagtgcaagcaatttatgttcctgcggacgacttaactgatccagcgccagcaacttcatttgctcacttggatgcaactacagttctttcaagacagattgctgaaattggtatttatccagcggttgatccacttgattctacatcaagaattttagatcctagaattgtaggtgatgaacattatagagttgccagagaagtgcaaaaagttttacaaacttataaatctcttcaagacataattgctattcttggtatggacgagctatcagaggaagataagctagttgtagcaagagctagaaaaattcaaagatttttatctcagccattttttgtagctgaagtatttactgggtcac

SEQ ID NO: 273217 - DNA, 811 bp, Unknown
  Bacterial polypeptide expressing nucleotide sequence isolated from the Sargasso Sea
aatggctaatgcaaaaggtaaaatcacccaagtgattggcgctgtggttgatgtgcaattcgaagaccatcttcccgaaattttgaatgccttgactactgataacaatggtaaaaaattagttttggaagttgctcaacacttaggcgaaaatacagttcgaacaattgcaatggacgcttctgaagggttggtaagagggcaagaagtgatagatacagcgggtccaatatctgtcccagtgggaaatgccactcttggtagaattctaaatgtcgttggtgaaccagtcgatgagcagggtcctgttaaggcgaaagagtcaagagctattcatcagccagccccagaatttaacgaacagtcaacggaatcagaagttcttgtaacgggcatcaaagttattgatcttctcgcaccgtattcaaagggtggtaaaattggcctttttggaggtgctggtgtaggtaaaacggtgttgatcatggaattgatcaacaacattgcaaaagtccactcgggcttttctgtttttgccggtgttggagagcggacacgagagggaaatgatttatatcatgagatgatcgagtctaacgttataaagccaggcaatttagaagaatcgcaggttgctctagtctacggacaaatgaatgaacctcccggagcgagagcgcgggttgctttgaccggtttaactttggctgaacagtttcgcgatcagtccggaacagacgtacttttctttgttgataatatctttcgctttactcaagcgggttctgaggtttcagcgcttcttgggcga

SEQ ID NO: 273218 - DNA, 872 bp, Unknown
  Bacterial polypeptide expressing nucleotide sequence isolated from the Sargasso Sea
tcattaaatccatcagaaatttccagcgttctaaaagaaaagattgctggccttgatctttcagcagaaagaaaaaatgaaggcatcgtagtcagcgtctcagacggtatcgtaaggatacatggcatgggagatgttatgtatggtgaggtgatagagtttgaaaacggaacaaaaggcatggctctaaatttagaacaagactctgttggcgctgttgtgcttggagattatcttgagattattgaaggccaaaaagcagtatgtactggaaaggttctagaagttcctgttggagaagggctgttgggcagagtagtaaacacactgggcattcctattgatggaaaaggagaaattaaagcagacagcagttcgccagttgaggtagttgctccaggcgttattgctcgtcaaagtgtagatcaaccagttcagattggccttaaagctgttgatgctatggttccaatcggtagagggcaaagagagcttataattggagacagacagacaggaaaaaccgccgtagctattgatgcaattattaaccaaaaaggcacaggaattaagtgcatatatgttgctattggtcaaaagcagtctactgttgcaaacgtagttagaaaactagaagaatatggcgccatggaacatacaatagttgtttcagcaacagctgcagacccagccccaatgcaatatctttcagcatattctggttgcaccatgggtgaatattttagagataaaggcgaagacgcattaattgtttatgatgacctttcaaaacaagctgttgcatatagacaagtatcacttctattaaaaagacctccaggtagagaggcctatccaggcgatgtttttta

SEQ ID NO: 273219 - DNA, 960 bp, Unknown
  Bacterial polypeptide expressing nucleotide sequence isolated from the Sargasso Sea
cagaaaactgaagatgttatctgtgtttatgttgccattggacaaaaagcatcatctgtagcggctgccgttaatattttagaagaaaaaggtgcgttaccatatacaattgttgtagctgcaaatgccgatgaaccggcaacacttcaatatattgctccatatacgggtgctgcacttgcagaatacttcatgtattcaggcaaagcaacattaatcatttatgatgatttaacgaaacaagcttcggcttatcgtcaaatgtcattacttctaagacgtccaccaggtcgtgaagcatatcctggtgatgttttctatctacactcacgtctactagaacgagcagcaaaactaagtgatgatttaggtggtggtagtatgactgccttaccaattattgaaactcaggcaggtgacgtgtcagcttatatcccaacgaatgtaatttcaattacagatggtcaaattttcctttctggagatttatttaactcgggtattcgtcctgctattaacgttggtatttcagtatcaagagttggctctgccgctcaaattaaagcaatgaaacaagtggcgggtaaactgaaacttgagcttgctcaatttgcagaattagaagctttctcacaatttgcatcggatcttgaccaagcaacacaaaatcagctagcgcaaggtgtccgtttacgtgaaatgttgaaacaagcagcaaattcaccaattccagttgaggagcaggttgcaattatctatgctggtattaacggtttcttagatgatcttgaagtatcaagtgtattaccatttatcggtaagctaagaccttatttacgtaattccatgcctcaattcatttctggtattaaagaatcaaagaaaatgagcccagaggctgaagaattattaaagaaagctatcgctgaagtgaaagccaggtatgtagttttattaaca

SEQ ID NO: 273220 - DNA, 441 bp, Unknown
  Bacterial polypeptide expressing nucleotide sequence isolated from the Sargasso Sea
aatgagtgtaaatggaaaaattatacaagtaattggagcagtagtagatgttcaatttgatggtgctttgcctgaaattttaaccgctttagaagtagataactctggaaataaattagtactagaggtggcgcagcatcttggagaaaatagtgtaagaacaattgctatggatagtacagagggtttaaaaagaggtgacaatgttcaaaatacaggcgcaccaataagtgttcctgtcggtcctgaaactttaggaagaataataaatgttataggtcaaccaattgatcaaaaaggagaagttaaaacaaaagaaaaatggccaatacacagagaggctccaaaatttacagaccagtctacggaaacagaaattttagaaaccggaataaaagttattgatcttttagcaccttactcaaagggtggaaaaattgg

SEQ ID NO: 273221 - DNA, 331 bp, Unknown
  Bacterial polypeptide expressing nucleotide sequence isolated from the Sargasso Sea
caagagcattatgatacaacacgtgctgtacaaggagtgctacagaagtataaagagctaaaagatattattgcaatattaggtatggatgaattgtctgatgaagataagttatcagtcaatagagcaaggaaaattcaacgatacttgtcacaaccattttttgtagcggagactttcacaggtacacctggcaagtatgtatccttaaaagatacaatccaaggttttcaggcaatcgtgaatggtgattatgatgatttaccagaacaagctttttatatgattggtgaaatagaagaagctaagaaaaaagcagacgagatttaat

SEQ ID NO: 273222 - DNA, 664 bp, Unknown
  Bacterial polypeptide expressing nucleotide sequence isolated from the Sargasso Sea
atggaaataaatccttcagaagttacaaaaatactaaaagaacaaattaaaaaatttggtgataaagctgaggtcactgaagtaggacaagttttgtctgtgggtgatggtatagcaagaatttatggattagataatgttcaagctggtgagatggtagagttttctgatggatcaaaaggtatggctttaaatcttgagagtgaaaatgtaggggttgttatttttggagatgacaaagctgtaaaagagggagacactgtaaagagaacaggtgcaattgtagatacaccagttggaaaagaattattaggtagagttgttgatggtttgggaaatccaattgatggaaaaggtgctttagataaaagtataaaaagaagtagggttgaggtaaaagctcctggtattattccacgtaaatctgtaagtgagccaatgcagactgggcttaaatcaattgatagtctagttccaatcgggagaggtcaaagagaactaatcattggtgatagacaaactggtaaaacagcagtagctatagatgccattataaatcagaagaaaattaatgagtctggtgatgagaagaaaaaactttattgtatttatgttgctgtaggtcaaaaacggtcaactgtcagacaaatgaaaaaactttaga

SEQ ID NO: 273223 - DNA, 760 bp, Unknown
  Bacterial polypeptide expressing nucleotide sequence isolated from the Sargasso Sea
catggtttccatccgtcccgacgagatcagcgcatttctcaaacagcagattgaggattacgacaagtccgtctcggtcagcaacgtcggcacagtgctgcaggtgggcgacggcatcgcccgtgtctacggtctgcaggaggccatggccggtgagcttctcgagttcgaggacggcaccgaagccattgccctcaatcttgaggacgacaacgtcggtgctgtgctgatgggcgaaggcctgggcattcaggagggcagcaccgtcaaggccaccggcaagatcgcctcggttcccgttggtgatgcaaccctcggccgtgtcgtgaatcctctcggtcagcccattgatggcaagggtgacatcgccacgaccgagatgcgcctgattgagtcgatggcgcccggcatcatccaacggaagtcggtgcatgaaccgatgcagaccggcatcaccgccattgacgcgatgatccccgtcggccgcggccagcgcgaactgatcatcggcgaccgtcagaccggcaagaccgccatcgcgatcgacacgatcctgaaccaggcggatcaggacatgatctgcgtttacgtggccatcggccagaaggcggcgtctgtcgccaacgtggttgaggtgctgcgtgagcgcggcgccctcgattacaccgttgtggtggctgccaacgcgtcagagccagctgcgctgcagtacctggctccctacaccggcgcctcgatcgccgagtacttcatgtacaaa

SEQ ID NO: 273224 - DNA, 826 bp, Unknown
  Bacterial polypeptide expressing nucleotide sequence isolated from the Sargasso Sea
atggtttctattcgtcccgacgagatcagttcaatccttaagcagcagattgctgattacgataaatcagtatctgtgagcaacgtaggtactgttttacaaattggtgatggtattgcaagagtttatggccttgaaaaggttatggcaggtgaattagttgagtttgaagatggaacagaaggaattgctttgaaccttgaggatgacaatgttggagttgtgttaatgggtgaagctttaggagtacaagagggaagcacagttaaagcaactggaaagattgcttcagtcccagttggtgaagcaatgcttggaagagttgtgaatcctcttggacagcaaattgacggaaaaggagagatggctacaactgactcaagattaattgagtcaatagctcctggaattattaagaggaagtcagtgcatgagccgatgcaaaccggaatcacatctattgatgcgatgattcctattggaagaggtcagagagagttgattattggagatcgtcaaaccgggaaaactgcaatagcaatcgatacaatcatcaatcaaaaaggtcaagatgttgtttgtgtttatgttgcggttggtcaaaaacaagcatcagtggcaaatgtcgttgaagttcttaaagaaaaaggagctttggattacacgattattgttaacgcaggagcatctgaagctgcagctttgcaatatttagctccttatacaggagcagcaattgctgagcactttatgtatcaaggcaaggcgacattagttatttatgatgatttaaccaagcaagctcaggcttacaggcaaatgtcat

SEQ ID NO: 273225 - DNA, 691 bp, Unknown
  Bacterial polypeptide expressing nucleotide sequence isolated from the Sargasso Sea
gcgggaagcatatccgggcgatgttttctatctccactctcgtctcctagagcgtgcgtctaagctcgcagacgaacagggtggagggtcgctcaccgcgctaccgataatcgaaacgcagggtggtgatgtttccgcgtacatcccgactaacgtgatttcgatcaccgacggtcagattttccttgagccggatctgttcaactccggtgtgcggcctgccgtcaacgtcggtatttcggtttcgcgtgttggtggctctgctcagatcaaggccatgaaaaaggttgcaggtcgtctccgtttggacctagctcaataccgtgaactagaggcttttgctcagttcggttcagatctagatgccgccacgcagcgtcaactagctcggggggcccgtacggtggaaatgctcaagcagccacagtatcagccgatgccggtcgagaatcaggtcgccgtaatttatgcggtgaccaacgggtatctggatgatgtagatgtcagcttagttcgtcagtgggaactcggcttccatcaacaaatggccgcaaagcaccaaggagtgctcgatggtattcgagatgggggccaactcactgacgagttgaatgagcagctggtgtccgcgattgagagtttcaatgagtctttcgctgccgagcaccaggccactggggcctcggcctga

SEQ ID NO: 273226 - DNA, 770 bp, Unknown
  Bacterial polypeptide expressing nucleotide sequence isolated from the Sargasso Sea
aatgacagttaatccctcagaagtaacaaaattacttaaagaccaaatcaaaaattttggaaaaaaagcagaagtctcagagattggaaaagttttatctgtcggagatggtattgctcgtgtttatggcttggataacgttcaagcaggtgagatggtagaattcgaagatggctccaaaggaatggctttaaatttggagaatgataatgttggagttgttatttttggtgacgatagaaacattaaagaaggtgatactataaaaagaactaacgcgattgtggacgttcctgttggtaaagaacttctgggaagagtagttgatggattaggaaatccaatagatggaaaaggagcactatctccaaaagaaagaaaacgtgtagaggttaaagctcctggtattatccctagacagtcagttaatgagccaatgcaaactggtttaaaatctatagactctttaataccaatcggcagaggtcagagagaattaattattggagacagacaaacgggtaagactgccgtagctatcgatgcaataataaaccaaaaaaaaataaacgagtctactgatgaaagcaaaaagttatattgtgtttatgtagcaataggtcaaaaacgatctactgtagctcaaataacaaaaactttggaggaggctggggcattaaaatatacaactattgttgctgcaacagcatcagactccgctcctttacaattcttagccccttatactggatgtacaattggagaatttt

SEQ ID NO: 273227 - DNA, 841 bp, Unknown
  Bacterial polypeptide expressing nucleotide sequence isolated from the Sargasso Sea
atggtagaatctggagttatcgttccagatggcccaggttctaaagctgcacttgtatatggccaaatgaatgagcctcctggagctagagcaagagttgctttaacaggattgacattagctgaatattttagagatcaagaaggtcaagatgttttgtttttcgttgacaatattttcagatttactcaagcgggatctgaagtttcagctttattaggaagaataccatctgctgtaggatatcaaccaacgttagctacagatatgggagcacttcaagaaagaattacgactacaacaaaaggatctattacatctgtgcaagcaatatatgttcctgcagatgacttaactgatcctgctcctgctacatcttttgctcacttagacgctactactgttttatcaagacagatagcagaaataggtatttatcctgcagttgatccattagactcaacttcaagaatgttagatcctagaattgttggtgaagagcattatgaagttgctagaaaagttcaagaagttcttcaacaatataaatcgttacaagatatcattgcgattttaggtatggatgaattatctgaagaagataaactagttgtaagtagagctagaaaaattcaaaggtttttatcccagccattccatgttgctgaagtttttacaggatcaccaggtgttttagtacctttagaagatactataaaaggatttaagggaattgcagacggtgtgtatgatgatttaccagaagctgctttttacatggtaggtactattgaagaagcaatagaaaaagcaaagaaattagcaaaagaggcagcttaat

SEQ ID NO: 273228 - DNA, 502 bp, Unknown
  Bacterial polypeptide expressing nucleotide sequence isolated from the Sargasso Sea
gttcccgccgatgacctgaccgacccggcgccggccacctcgttcgcccacctggacgccaccaccacgctgtcgcgttcgattgcggaaaagggcatctatccggccgttgacccgctcgactcgacctcgcgcatgcttgatccgatgatcgtcggcgaggagcactatcaggtggcccgtgcggttcagtcgacgctgcagcgctacaagtcgcttcaggacatcatcgccattctcggcatggacgagctttccgaagaggacaagctcacggttgcccgcgcccgcaagatcgagcgcttcctgtcgcagccgttccacgtcgccgaagtgttcaccggttcgccgggcatcctggtctcgctcgaagacacgatccgctcgttcaaggctctggtcgaaggcgaatatgaccacctcccggaagcggccttctacatggtcggcaccatcgacgatgccgtcgaaagggccaagaagctcgccgaagcggcttgat

SEQ ID NO: 273229 - DNA, 217 bp, Unknown
  Bacterial polypeptide expressing nucleotide sequence isolated from the Sargasso Sea
aaatcccagcgatttttatcacagcctttttttgtagctgaagtatttacaggatctcctggtaaattagtagatctagagtcaacgattaagggatttgatgctatctgcaaaggtgagtacgaccaccttcctgaggcagcattttatatggttggtactatcgaagaagcaatagaaaaagctgagaaaatggaaaaagaagtagctgcctaat

SEQ ID NO: 273230 - DNA, 835 bp, Unknown
  Bacterial polypeptide expressing nucleotide sequence isolated from the Sargasso Sea
atgcaaactggggcttaaatcaattgatagcttggttcctattggaagaggccagagagaactaattattggtgataggcaaacaggtaaaacagcagttgctattgatgcaattataaatcagaagaaaattaatgagtctaatgatgaaaaacaaaagttatattgtgtttacgtagcaataggacaaaaaagatcaactgttagacaaattgaaaaaactttagaagaagctggtgcaatggaatatacaactattgttgcagccactgcttcagatgcagcaccacttcaatttttagctccttatactggttgtgcaatgggagaatattttagagataatgggatgcatgcactaattatatatgatgatctttctaaacaggctgtggcctatagacaaatgtcacttttattacgaagaccaccaggaagagaagcctatcctggagacgtattttatttacatagtagattacttgaaagagctgctaaattaggtgatgagcatggcggcggatctttaactgcacttccaataattgaaacacaaggcggtgacgtttctgcgtttatacctacaaatgtaatttcaataacggatggtcaaatttttttggaaactgaattatttaatcagggtataaggcctgcaattaatgtaggattatccgtatcaagagttggatcatcagctcaaactaaggcaatgaaaaaagtttctggatctatgaaacttgaacttgcacaatatagagaaatggcggcatttgcacagtttggttctgatttggatgcttctactcaaaagcttttaaataggggttctaaa

SEQ ID NO: 273231 - DNA, 862 bp, Unknown
  Bacterial polypeptide expressing nucleotide sequence isolated from the Sargasso Sea
tatgccaaatttaaaagagataagaaatcgaatttcgtcggtaacttcaacgatgaaaattaccagtgcaatgaaaatggtctcagctgcaaaactaaaaaaagcacaggatgcagttaccgcgatgaggccttattctgaaaaattaggagaactaatgtcaagcttttatgaaataatttcaacttccagtgcatcccaattatcagagaaaagggatattaaaaatgttcttttaattccaatttgctcaaacaaagggctttgtggtgcatttaattctaatgtcatcaaaaaagccatttctttgaaaaatgatccaaatttttctaaggcgaagtttagttttattatcattggtaaaaaagccaatgatataatttctaaaactgaaaatgtaatatcaaaccacagtgatatttttgaaaacattaattatgatgacacagcatctgttgtagatagtataatagaattattttcaaatggtgaattcgatcatgtagagctcatttacaatacctttaaaaacgcagcgaatcaaaccactatcaccgagcaatttttgcccatatctaaacctgaaggcactgaggctctgtctgactatatttttgaaccctctatggagcaaattgtctcagatttggttcccaagtcgctaaaaattcaactatacaaagcaataagggactcatttgcgggggaacatggtgcaagaatgacagcaatgcataaagcgacagataacgcaagtgagttaaaaagcgagttggttttgacatataacaaggcaagacaagctgccattactaatgaaattcttgaaatcgtttctggagctgaagcgctgaacggttga

SEQ ID NO: 273232 - DNA, 836 bp, Unknown
  Bacterial polypeptide expressing nucleotide sequence isolated from the Sargasso Sea
agtagatgtaaaatttgaaggagatcttccagaaattttaacagcattagaatgcaaaaatggagataatagactagttttagaagttgctcagcatttaggagaatctacagttagaactattgctatggatgctactgaaggattaaaaagaggtgatgaagtaatgaatactaattctccgataaaagttcctgttggtcccgaaacacttggaagaattataaacgttattggagaaccaattgatgaaaaaggagaagttaagactaaggaaagttggccaattcatagacctgctccagaatttaatgaccagtcaacagaaacagaaatacttgttacaggtattaaagtaattgatttacttgctccttatgcaaagggaggaaaaatcggattatttggtggagctggtgttggaaaaacagttttaattatggaattaattaataacgttgctaaagcacatggtggattttcagtttttgcaggagtaggtgagagaacaagagaaggaaatgatctttatcatgagatgatagattctggtgttattaaaacagacggagaaggatctaaagcagccttagtctatggacaaatgaatgaacctccaggagctagggctagagttgcccttacaggattgactgtagctgaatattttagagatcaagaaggtcaagatgttcttttctttgttgataatatttttagatttactccagcgggttcagaagtttcagctcttttaggtagaattccttctgcaggtggttatcagccaacattagcaactgatatgggtaatttacaagaaagaatacaactac

SEQ ID NO: 273233 - DNA, 853 bp, Unknown
  Bacterial polypeptide expressing nucleotide sequence isolated from the Sargasso Sea
aaaaaaagaatagctagcgtaaagtctactcaaaagattactaaagctatgaaaatggttgcggcagcaaaattgagaaaagctcaagaaagtgcagagaaaggaagaccttactctgaaaaaatgaataatattattttaaatctctcaaatggaatatctgataaagaaaatacttcgaaattattgtcaggcactggcgatgataaagttcatttatgtgtggtaatgacatctgatagaggtctttgcgggggttttaattctaatataatcaaaaaagctaaaagttatttctcaaaaatttcagctgagggtaaagaatttaaaattataacagtaggatcaaaaggtaacgaccaattaaaaagggtttatggtgaaaagattatagaaaatatttcttttaaagaatctaaaaatgcaaattattttgatgctgataaagttggaaaaatgataattgaaaaatttgaagcaggtgagtttgatgtttgtacaattttttataatcagtttaaaaatgtaattacacaaattcctcaagcacagcaaatagtgcctttaaataacgaagaaaatgaaaataattcagatgaaagttatgaatttgaacctgatgaagatgaaattttaagcaatttattgccaaaaaatatttcaacacaaatatttaaagcaatgttagagaattcagctagcgaacaggggtctagaatgagtgcaatggacaatgcaacccgtaatgcaggtgaaatggttgacaaacttactattgagtataatagaagtcgtcaagcagcaattactaaagaactaatagaaatcatatcaggagcagaaagtttataat

SEQ ID NO: 273234 - DNA, 814 bp, Unknown
  Bacterial polypeptide expressing nucleotide sequence isolated from the Sargasso Sea
aatgccgagtcttgatgatttaagaaaaagaatttctagtgtaaagtccactcaaaagataaccaaagctatgaaaatggttgcggcagctaaacttcgaaaagcacaagaaatggcggaaaaaggaagaccttacagcgataagatggatataattattcaaaatttaagtatggctattaaagaccccttaaatgcacctaaacttttggtaggaactggcgaagataaaacacatttatgcgttgtgatgacagcagatagaggtctatgtggaggttttaatacaaatatagtcaagttagcaaaaaattatttcaataaaattttaaaggattcaaaaaatttaaaaattattactgtcggaacaaaaggtcttgatcaacttaaaagagattatggaaaatatataattaaaaaaattgattttaaggataaaaaaaatatatcttttaatgaagcaaaagttgttggtaaggaaattttagatttatttaaaaataaagaatttgataaatgcttgattttttttaataaatttaaaaatgttatgtcccaaatacctcaaacacaacaagtgattccagcaaagaaaagtggacaagcggaaacaaatcaggactcatcatatgaatttgaaccagaggaagatgaaattttagaagatctacttcccaaaaacatttcaacacagatatataagggttttttagaaaattctgcaagtgagcagggttcaaggatgaccgctatggataatgccacaaggaatgcaggcgatttagtagagaagctaactataaattataataga

SEQ ID NO: 273235 - DNA, 537 bp, Unknown
  Bacterial polypeptide expressing nucleotide sequence isolated from the Sargasso Sea
aatggccaacgaaaaagaaatacgaacaaaaattgggagcgttaaaaacacccaaaaaatcaccaaggccatggaaatggttgctgcgagcaaaatgcgccgaacacaggagaccatgaaaaaagcattaccctatgcagacaaaattagagcagtgatcggccatatctataaagcaaaccccgactataagcacccatttcttgaaaagagagatgtcaaaaccgcaggctatattgtggtcagctcggacagaggcctttgcggaggattaaatgtaaatatgtttaggggcctcatagcagagctcaaagataataaaaacaaccaagttgaatcaaaactttgtcttgttggcgcaaaggcggtccaattttttaggtcagtagacgttgatgttgtagcggcagcatcccatcttggcgaagaaccacaagttgaagatttggttggctcaattaaaaccatgttagatgaatacatcgatgggaagattgaccagctctttattgtgcacaatgattttgtgaacacgat

SEQ ID NO: 273236 - DNA, 972 bp, Unknown
  Bacterial polypeptide expressing nucleotide sequence isolated from the Sargasso Sea
gttgcactacctaaaatttatgatgcactagaagtttttaaagcagatggaactcgtgtagtacttgaggttcagtctcatgttggcgaaagttcagttcgtacaatagcaatggattcttctgatggattccaaagaggaatggaagtgcagtctactggaagcgcgataaaaatgccaacgggagaagaaattaaaggaaggttgtttaacgtggttggagaagcaattgatggaattcaagaaattgattctaaaaatggtttgccaattcaccgagaagcgccaaagtttgatcaactttctaccgcaacagaagtattatttaccggaataaaagtaattgaccttattgagccttatgctaagggtggaaaaattggtttatttggtggtgctggtgttggaaaaacagtacttattcaagagctaattaataacattgcaaaaggacatggtggtttatctgtttttgctggtgtaggagaaagaacaagagaggggaatgacttattaagagagatgttagagtctggaattatcaaatatggagatgatttcatgcattcgatggaagaaggcggatgggatttaacaaaggtagaccttgagcaaatgaaagaatcgaaagcaacatttgtttttggacaaatgaacgagcctcctggagcgcgtgcaagagttgcactttcaggtcttacagttgccgaatattttagagatggagaaggagatggagaaggaaaagacattttattctttgtggacaacatatttagattcacccaagcgggttctgaggtttctgccttgttaggacgtatgccatcagccgttgggtatcagccaacacttgcttctgagatgggagcgatgcaggaaagaattacctctacaaaaagtggttctattacttctgttcaggcagtttatgttcctgcagatgaccttacagaccctgctcctgcaata

SEQ ID NO: 273237 - DNA, 787 bp, Unknown
  Bacterial polypeptide expressing nucleotide sequence isolated from the Sargasso Sea
gattctgtaggagcagtagttttaggagattatttgggactaatcgaaggccagaaagctgtttgtactggaagaattttagaggttccagtgggcgaagagttactaggtagagttgtagatgcccttggcagccccattgatggtaagggagaaattaaaacagagatgactgctccagtagaagttgtagcccccggtgtgattgccaggcagtcagttgatcaaccggttcaaattggtttaaaagcagttgatgcaatggtaccaattggtcgaggtcaaagagagcttattattggcgacagacaaacaggtaagaccgctgttgcggttgatgcgatcatcaatcagaaaggaacaggtatcaaatgtatatatgttgctattggccaaaaacaatcaaccgtcgttaatgttgttaaaaagcttgaagaacatggagctctagaacatacgattattgtttcagcatcagcatctgatcctgcgcccatgcaatatctttctgcatactcaggttgttcaatgggtgaatattttagggataaaggtgaagacgctttgattgtgtatgatgacctctctaaacaagccgttgcatatagacaagtatctttacttttaaaaagaccgccaggaagagaggcctacccaggagatgttttttatcttcattcaagattgctagaaagagccgccagggtaaatgctgattatgtagaaaaagctacaaacggaaaggtgaaaggaaaaactggatctttaaccgcacttccgattatcg

SEQ ID NO: 273238 - DNA, 451 bp, Unknown
  Bacterial polypeptide expressing nucleotide sequence isolated from the Sargasso Sea
tctttctcacacctagatgcaactacggtattgtctagacaaattgcagagttaggtatttatccagcagtcgacccgttagactcaacttcaagaatactagatccgagagtcgttggagatgagcactatagagtagcaagggaagtacaaaaaatactacaaacttataaatctttacaagatattattgctatattaggaatggatgaattatctgaggaagacaaacttacagttgcaagagctagaaaaattcaaagattcttatctcaaccttttttcgttgcagaagtttttacagggtctccaggtaaacttgttgatttagaatcgacaatcaaaggttttgatgcaatttgtaaaggtgaatatgatcatttaccagaagcggctttttacatggttggtacaattgaagaagcagtagaaaaggcagaaaaaatggaaa

SEQ ID NO: 273239 - DNA, 939 bp, Unknown
  Bacterial polypeptide expressing nucleotide sequence isolated from the Sargasso Sea
tcgcagtcggccaaaggattcttctgtcgctgttgctattgatgttcttcgaaagcacggcgcaatggattacacgactgtgattgtggcaggcgcaagtacggcagcaccattacagtacatcgctccgtattcaggaactgcgatggcggagcacttcatgcatgatggtcagcatgcactcattgtctatgatgacctttcaaagcaagcaacagcctaccgtcaactttctctacttatgcgacgtcctccaggtagagaagcctatcctggtgatgtcttttatgctcatagccgactactcgaaaggtcatcaaaactctctgatgaacttggtggtggatctctcacaagtctccccattattgagactcttgaaggcgaagtgtcggcctacatccccacgaatgtcatctcgattacagacggacaaatctatcttcagcctgatttattctttgctggacagcgtcctgccatgaatgttggaatctcggtttcacgtgttggtggtgctgctcaaacaaaggccatgaagaaggtctctggtggcctccgtttggatcttgcatccttccgcgaacttgaggcgtttgcacaacttggaacagaccttgatgcagcgactcagcaacggctcgaccggggctatcgtatggttgagctactgaagcaaggccagtatgaaccgttagaaatggttgatcaggttctttcgatttacgctggaactcgtgggcaccttgatgatgtgaagcgagatgaggtcgcggcttgggaggcctcttttctcacatttgtgaaagatcaggttcctgaactgagaaatcgaatcattgaatccaatgaacttgatgatgaaagtgaacggcaactcgaggcagccatagctgaattcaaacgacagcacacatctgggactgataagcaggaacc

SEQ ID NO: 273240 - DNA, 274 bp, Unknown
  Bacterial polypeptide expressing nucleotide sequence isolated from the Sargasso Sea
aatggctaaaaataaaacaggcataataacccaagttattggagccgttgtagatgttaaatttgaagaaaacttacctcccattttaaatgctttagaagttgataatgatggtaatagacttgttttagaagttgctcagcaccttggtgaaaataccgttagatgtatagccatggattctacagaaggattagtcaggggtgcagaagttacagatagtggtaaacctattactgttcctgtaggtccagaaactttaggtagaatcatc

SEQ ID NO: 273241 - DNA, 425 bp, Unknown
  Bacterial polypeptide expressing nucleotide sequence isolated from the Sargasso Sea
aaatcaaattttaaaacttttcaaagaaaacaaagttgattgtgtagaacttatatataatagatttatatctgtaataagccaagtagtaagcaaaaaacagcttgtcccagctgaagtaacccaatctgaaaatgatgatattaaagaggatgaaaacactactatagccccttatgattatgaaccagatgaacaatctattttagatgatttactgccgcgaaatcttactactcaattatttgctgcgattctagaaagctctgcaggggaacttgctgctagaatgacggctatggataatgctactagaaatgcaggtgaaatcatagataagttaacattagaatataacagaacaagacaagcttttataactaaggaattaattgaaattatttctggggcagaagcgttataaa

SEQ ID NO: 273242 - DNA, 622 bp, Unknown
  Bacterial polypeptide expressing nucleotide sequence isolated from the Sargasso Sea
agactattagaacgagcggctaaacttaatgaaaaaagtggtggaggctctctaactgccttaccaattattgaaacgcaagcaggagacgtttctgcatatattcccaccaatgtgatttctatcaccgatggtcaaatatttttagaaaccgatttattcaatcaaggtataaggcccgctgttaatgttggtttatcagtttctagagtaggctctgctgctcaaactaaagcgatgaaaaaagttgcgggctctataaaactagaattagctcaatacagagaaatggctgcatttgcacagtttggttcagatttagatgcctcgactcaacaattgcttaatcgtggagcgaaattaactgaacttttaaaacaagatcaatattctcctttgacagttgcagagcaagtaatatcagtttttacaggagttaaaggttacttagataatattgatttaaataaaattaagaactttgaaaaaaaactaatagaaaaaatcaaaactgaaaagcctgaaattattaatacaattcaatcatctggaaaacttgatgaagatacagaaaatcttttatcccaaataattgaggaattcaaaaaaagtgagaaataat

SEQ ID NO: 273243 - DNA, 757 bp, Unknown
  Bacterial polypeptide expressing nucleotide sequence isolated from the Sargasso Sea
tgcgggcaatagattggttctagaagttgctcaacatttaggagagtcaagcgttagaactattgcaatggatgctacagaaggtttaaaaagaggtgatgaagtaactgatacaggagcgcccataaaagttccggtaggacccgaaacattaggaagaattgtaaacgtgataggagatccaattgatgaaaaaggtgaaattaaaactaaggaaaattggccaattcatagagctgcacctgaatttaatgatcagtcaacagaaacagaaattttagtaacaggaattaaagtagttgacctattagctccttatgccaaaggtggtaaaattggtttatttggtggagcaggagtaggaaaaacagttattattatggagcttataaataatattgctaaagcacatggtggattttcagtttttgctggcgtcggagaaagaacaagagaaggaaatgatctatatcatgaaatgatagagtctggtgtaattaaacctgaaggacctggatcaaaagctgcattggtttatggacaaatgaatgaacccccaggagctagagctagagtagcattatcagggttaacagttgctgaatattttagagatcaagaaggtcaagatgtacttttttttgtagataatatttttagatttactcaggcaggctcagaagtttcagctctacttggaagaataccttctgctgtaggctatcaaccaacattagctactgacatgggtaattta

SEQ ID NO: 273244 - DNA, 747 bp, Unknown
  Bacterial polypeptide expressing nucleotide sequence isolated from the Sargasso Sea
tatgagcaaagatggaaaaataactcaaattattggtgcagtagttgatgtaaattttgatgatgatttaccggaaatctatactgcgctagaggtgaaaaattttggtaacaagttagttcttgaggtagctcagcatttaggagaaaatgatgttagaactatcgcaatggactccacagaaggattaaagagaggtgatgcagttattaataccggatctccaataagtgtgccagttgggccagaaactcttggaaggattattaatgttgttggagagtctattgatgaaaaaggtgatgtcaaaacaaaagaaaaatggccaatacataggccagctcctaaattcacagatcaagcgacagaaactgagcaactagttactggaataaaagtgattgacttgctagccccatatgcaaaaggaggcaaaatcggattatttggtggagctggagttggaaaaacagttacaatcatggagttaataaataatatagcaaaagcccatggtggattttcagtgtttgcaggagtgggagagagaacaagagaaggaaacgatctttatcatgaaatgatcgagtcaggtgttatcaaaacagagggcaaaggatcaaaagcagctttagtttatggacaaatgaatgagcccccgggagctcgtgctcgtgtagctttaacaggactaacagtagctgaatattttagagacaaagaaggccaagatgtccttttttttgt

SEQ ID NO: 273245 - DNA, 920 bp, Unknown
  Bacterial polypeptide expressing nucleotide sequence isolated from the Sargasso Sea
aggagctgtcgtactaggagattatttagaacttgtagaaggtcaaaaagcaatttgtactggtaaaattcttgaagttccagttggcgaagctctccttggtagagtagtaaatacattaggacaaccaattgatggaaagggcgaaattaaggctgaaggctttgctcctgttgaggttgtagcccctggtgttattgcccgtcagtcggttgatcagccagttcaaattgggctcaaggctgttgatgcaatggttccgattggcagaggacaaagagaattaattataggcgacaggcaaactggcaaaacagctgttgcaatcgatgccattattaaccagaaagggactggagttaaatgcatatatgttgctattggacaaaagcaatctactgttgctaatgtcgttagaaaactagaagagtatggagcaatggaacacacaattgtagtttcagcaaccgcagccgatcctgctccaatgcaatatctttctgcatatgccggatgttcaatgggtgagtattttagagacaaaggagaggatgcattaatagtttatgatgacttatcaaaacaagctgttgcatacagacaagtttctctgcttctaaaaagacctccaggaagagaggcatatcctggagatgttttctatctccattctagattgcttgaaagagctgctagggttaatgcagattacgtagaacaaataacaggaggcaaagtaaaaggaaaaacaggatccttaacagcattgccaattattgaaacgctagcaggagacgtatcggcttttgttccaactaatgttatttctattacagatggtcaaatatatttagaaacagagctttttaactctggtataaggcctgccattaatccaggtttatcagtatctagagttg

SEQ ID NO: 273246 - DNA, 871 bp, Unknown
  Bacterial polypeptide expressing nucleotide sequence isolated from the Sargasso Sea
gttggaaaaacagttttaattatggaattaattaataatgttgcgaaagcacatggtggattttctgtctttgcaggtgttggagaaagaacaagagaaggaaatgatctataccatgaaatgatagattcaggagttatcaaaaaagaaggaacaggatctaaagcagccttagtttatgggcaaatgaatgagcccccaggagctagagcaagggttgcgcttacaggattaacagtagctgaatattttagagatcaagaaggacaagatgttcttttttttgtagataacatctttagattcactcaagctggttcagaagtgtctgcattattaggaagaataccctcagcagttggatatcagcctacgctcgcaactgatatgggtaaccttcaagagagaattactacaacaaataaaggttcgattacttccgtgcaagcaatttacgtgcctgccgatgacttaacagatccagctcctgcaacttcatttgctcacttagatgcaacaacagttctttcgagacaaattgccgaaataggcatttatccagcagttgatcctctagactctacatcaagaattcttgatccaagaatagtaggggatgaacattatagagttgctcgtgaagttcaaaaaattttacaaacatacaaatctttacaagatattatagcaatcttaggaatggatgaattgtcagaggaagataaattagttgttgcaagagctagaaaaatccaaagattcttgtcccaacctttttttgttgcagaagtattcactggttctccaggaaaacttgttgaattagaatcaacaattaagggatttgatgctatttgtaagggagaatatg

SEQ ID NO: 273247 - DNA, 791 bp, Unknown
  Bacterial polypeptide expressing nucleotide sequence isolated from the Sargasso Sea
agcgaaacttaaaagagctcaagaaagtgctgaaaagggaagaccatattctgaaaaaatgaataacgttatattaaatttgtctaatggcatctcagataaagaaaatgctccaagattactttcaggaactggaaaagataaagtacatctttgtgttgtgatgacatctgatagaggtttgtgtggcggatttaattcaaacataataaaaaaagcaaaaagttattttgctaaattatctgaagaaggaaaagatttaaaaatagtaacagttggatctaagggcaatgatcagttaaaaagaacttacgaagatagaattattgcaaatatttcgtttaaagagtcaaaaaatgcaaatttttttgatgctgaaaaagttggtaaaatggtaattgagaaatttgaagctgaagaatttgatgtttgtacaattttttataatcaatttaaaaatgtaattacccaaattcctcaatcacagcaaatcatccctttaaaaactgataattcagaagaaaataaatctgaagataattacgaatttgaaccagatgaagatgagattttaagtaatttattaccaaaaaatatttcaacacaaatatttaaagcgatgttagagaattcagctagtgaacagggctcaagaatgagtgcaatggataatgcaacccgaaacgcaggtgaaatggttgacaaacttactattgagtataatagaagtcgtcaagcagcaattactaaagaactaatagaaatcatatcaggagcagaaagtttataat

SEQ ID NO: 273248 - DNA, 823 bp, Unknown
  Bacterial polypeptide expressing nucleotide sequence isolated from the Sargasso Sea
acagatactggttctccaattaaagttccagtagggcccgagacattagggagaattgtaaatgttataggcgaacctattgatgaaaaaggtgaagttaaaactaaagaaagttggcctatccacagagcagcaccagagtttaatgaccaatcaactgaaactgaaattttagtaactggaattaaagtagtagacctattagcaccttatgcaaaagggggtaaaattggattgtttggtggtgcaggagttggaaaaacagtaattataatggaattaattaataatattgcaaaagcgcatggaggcttttctgtttttgctggagttggagaaagaactagagaaggaaatgatctttatcatgaaatgatagaatctggagtaattaaacctgaaggacctggatcaaaagctgcactagtttatggacaaatgaatgaacctcctggagcaagatcaagagttgctcttacaggattaacagttgcagaatattttagggaccaagaaggccaggacgtactttttttcgtagataatatttttagatttacacaagcaggctctgaagtatcagccttattaggaagaattccatcagccgttggttatcagcctactctagctactgatatgggaaatttacaagaaagaattaccacaactaataaaggatctattacatcagttcaggcaatttatgttcctgctgatgacttgactgatccagcgccagcaacatcttttgctcacttggatgcaacaactgtgttatcaagacaaattgctgaacttggaatttatccagccagttgat

SEQ ID NO: 273249 - DNA, 754 bp, Unknown
  Bacterial polypeptide expressing nucleotide sequence isolated from the Sargasso Sea
atgagcaaaggaataattacacaagttattggagcagtagtagacgtaaaatttgaaggagaactaccagaaattttaacagcgttagaatgtaaaaatggtgataacagactagttttagaggttgctcagcacttaggagaatctactgtaagaacaattgcaatggatgccactgaaggattaaaaagaggagatgaagttgtaaatacaaatgctcctatccaagttcctgttggaccggaaacattaggtaggattattaatgtaattggtgagccaattgatgaaagaggtgaggttaaaactaaagaaagttggcctattcacagagctgcacctgaatttaatgatcaatcaactgaaactgaaatattagttaccggcattaaagttatcgacttattagcaccatatgccaaaggaggaaaaattggactatttggaggtgcaggtgttggtaagacagttttaattatggaattgattaacaacgttgcaaaagctcatggtggattttcagtctttgctggtgttggggaaagaactagagaagggaatgacctttatcatgaaatgatggattcaggtgtaataaaaaaagatggccctggttctaaagctgcattagtttatggacaaatgaatgaacctccaggagcaagagcaagagttgctttaactggattaacagtagctgaatattttagagatcaagaaggacaagacgttttattctttgttgataatatct

SEQ ID NO: 273250 - DNA, 741 bp, Unknown
  Bacterial polypeptide expressing nucleotide sequence isolated from the Sargasso Sea
tgctagagcaagagtagctttaacaggattaacagttgcagagtattttagagaccaagagggccaggacgttttattttttgtggacaatatttttcgttttacacaagcgggctctgaggtttctgcgctattaggaagaataccctctgcagtaggctatcaacctactttagcaactgatatgggaaatcttcaagaaagaattacaacaacaaataagggttcaattacgtctgtacaagcaatttatgttcctgcagatgatttaacagacccggcaccagccacatctttctcacacctagatgcaactacggtattgtctagacaaattgcagagttaggtatttatccagcagtcgacccattagactctacttcaagaatactagatccgagaatcgttggagatgagcactatagagtagcaagggaagtacaaaaaatactacaaacttataaatctttacaagatattattgctatattaggaatggatgaattatctgaggaagacaaacttacagttgcaagagctagaaaaattcaaagattcttatctcaaccttttttcgttgcagaagtttttacagggtctccaggtaaacttgttgatttagaatcgacaatcaaaggttttgatgcaatttgtaaaggtgaatatgatcatttgccggaagcggctttttacatggttggtacaattgaagaagcagtagaaaaagcagaaaaaatggc

SEQ ID NO: 273251 - DNA, 583 bp, Unknown
  Bacterial polypeptide expressing nucleotide sequence isolated from the Sargasso Sea
gcgactgatatgggaaatcttcaagaaagaattactacaacaaacaaaggttcaattacgtctgtacaggcaatatatgttcctgctgacgacttaactgatcctgcaccagcaacttcattttcacatttagatgctactactgttttatctagacaaattgcagaacttggaatttatccagctgtagatccgttagactcaacttcaagaatattggatccaagaattgttggtgatgaacattatagagttgctagagaagttcaaaaaattttacaaacttataaatctctccaagatattatagcaattttaggaatggatgaattatccgaagaagataagttaactgttgcaagagcaagaaaaatccaaagatttttatcacaacccttttttgtagctgaggtttttactgggtcaccaggaaaattagttgatcttgaggccacaattaaaggttttgatgcaatatgtaaaggtgaatacgatcatttacctgaagctgcattttatatggtgggcactattgaagaggcaatagaaaaagcagaaaaaatggcgaaagacgccgcttaat

SEQ ID NO: 273252 - DNA, 373 bp, Unknown
  Bacterial polypeptide expressing nucleotide sequence isolated from the Sargasso Sea
atggctaacaatttaactggaaaaatatcgcaagttctcggagctgttgttgatgtagagttcgatggtgaacttcctgcaatcatgaacgctctagaagttgacaacaacggaacaagattaatgctagaggttgctcagcatttaggagaaaatgctgttcgtacaattgctatggacacaacagatggactagttagaggtcaaacagctactgatacaggtgcccctatttcaatgcctgtaggcccggaaactttaggtagaattatgaatgttgtaggagaaccagttgacgaaagaggtgatattggaacgagtaaatcttatcctattcatagaccagcaccagagtttgttgatcaatctacag

SEQ ID NO: 273253 - DNA, 574 bp, Unknown
  Bacterial polypeptide expressing nucleotide sequence isolated from the Sargasso Sea
ggaaatttacagggagagaattacaactacaaacaaaggctcaataacttcagttcaggcgatttacgttcctgcggatgatttaactgatcctgcgccagctacatcattttcacaccttgatgctaccacggtactttcaagacaaatagctgaattaggaatttatccagcagtcgaccctcttgattccacttcaagaattttagatccacgagtggttggagaagaacactatagagttgctagagaagttcaaagaatattacaggcgtataaatctcttcaagatattatagctatattaggaatggatgaattgtcagaagaagataaattaactgttgctagagcaagaaaaattcaaagatttttgtcacaaccattttttgttgcagaagtatttacaggatctccaggaaagcttgttgacttacaatcaaccattaaaggttttgatgcaatatgcaaaggtcaatatgatcatcttccagaagcagcattttatatggttggatcgatagaagaggcagttgaaaaggctgaaaaaatggcaaaagaagccgccaattaa

SEQ ID NO: 273254 - DNA, 874 bp, Unknown
  Bacterial polypeptide expressing nucleotide sequence isolated from the Sargasso Sea
atggcaagtttagacgacttaaaaaaaagaatagctagcgtaaagtctacgcaaaaaattactaaagctatgaaaatggttgctgcagccaagcttagaagagctcaagaaagtgctgaaaagggaaggccttattctgaaaaaatgaataatgttattttaaatttatcaaatggaatttctgataaagaaaatgcaccaaagttgttgtcgggaactggtgatgaaaaagtgcatttatgtgtagtaatgacttctgatagaggtctatgtggtggatttaattctaatattattaaaaaagctaaaagttatttttcaaaaattttagatgaaggtaaagaatttaaaattattacagtaggctctaagggaaacgaccaattaaaaagaatttacggtgacaaaatagttgaaaatatttcctttaaagagtcaaaaaatgcaaattatttcgatgctgataaagttggaaaaatggtaattgaaaaatttgaggcaggtgaatttgatgtttgtacaattttttataaccaatttaaaaatgtaattactcaaattcctcaagcacagcaaattatacccctaaataatgaagaagaagaaaatagttcagatgaaagttatgagtttgaaccagatgaagatgaaattttaagcaatttattgcctaagaatatttctacccaaatatttaaggcaatgttagagaattcagctagcgaacaagggtctagaatgagtgcaatggataatgcaacccgaaacgcaggtgaaatggttgacaaacttactattgaatataatagaagtcgtcaggcagcaattacaaaagaactaataaaaatcatatcaggagcagaaagtttataat

SEQ ID NO: 273255 - DNA, 691 bp, Unknown
  Bacterial polypeptide expressing nucleotide sequence isolated from the Sargasso Sea
ataacaaaattactcaaagagcaaataaaaaactttggcgaaaaaactgaggtctctgaagtaggtaaggtactaacagtaggagatggtatagcaagagtttatggtttggataatgtgcaagctggtgagatggtggagtttaatgatggttctaaaggaatggctcttaatttagaaagcgataatgttggtatagtaatctttggagatgatagacaaattaaagagggagatactgtcaaacgtaccaattcgatagttgatgttcctgtaggtaaagaacttcttggtagagtagtcgatggtttgggagtaccgatagatggcaagggaactttaccttctaaaataattagaaaaagagttgaagttaaagcacccggcattattccacgtcaatcggtcaatgagccaatgcaaacaggtcttaaagcaatagatagcttaataccgattggaagaggtcaaagggagttgataatcggagatagacaaactggtaaaacagcagttgcggtcgatacgattataaaccagaaagcaataaatgagtcgagtgatgaaaagaaaaaactttactgcgtgtatgttgcaataggtcaaaaaagatcaaccgtagcacaaatagtaaaaacattagaagacgctggtgcaatgaagtacacaaccagtggtatctgcaactgct

SEQ ID NO: 273256 - DNA, 583 bp, Unknown
  Bacterial polypeptide expressing nucleotide sequence isolated from the Sargasso Sea
agtaggctatcaacctactttagcaattgatatgggaaatcttcaagaaagaattacaacaacaaataagggttcaattacgtctgtacaagcaatttatgttcctgcagatgatttaacagacccggcaccagctacatctttctcacacctagatgcaactacggtattgtctagacaaattgcagagttaggtatttatccagcagtcgacccgttagactcaacttcaagaatactagatccgagagtcgttggagatgagcactatagagtagcaagggaagtacaaaaaatactacaaacttataaatctttacaagatattattgctatattaggaatggatgaattatctgaggaagacaaacttacagttgcaagagctagaaaaattcaaagattcttatctcaaccttttttcgttgcagaagtttttacagggtctccaggtaaacttgttgatttagaatcgacaatcaaaggttttgatgcaatttgtaaaggtgaatatgatcatttaccagaagcggctttttacatggatggtacaattgaagaagcagtagaaaaggcagaaaaa

SEQ ID NO: 273257 - DNA, 804 bp, Unknown
  Bacterial polypeptide expressing nucleotide sequence isolated from the Sargasso Sea
gccgtcggtcagaaacgttcgactgttgcccaggtggtcaaggccttggaggaggccggagccatggaatacacaactgtggtcgcggcgaccgcgtcggaaccggcaccgctgcagttcctggcgccgtatacgggctgcaccatgggtgaatacttccgcgataacggcatgcacgccctcatcatctatgacgatctgtccaagcaggcgactgcctatcggcagatgtctctgttgctgcgccgcccgccgggccgtgaagcctttccgggagacgtgttctatctccactctcgtctgctcgagcgcgcggccaagctcaacgacgacgaaggtgcgggatctctcaccgcgctgccggtgattgaaacccaggcgagtgatgtgtccgcctacattccgacaaatgtgatctcgattaccgacggacagatcttcctggagaccgatctgttctaccagggtatccgtccggccattaacgtcggaatcagcgtcagccgcgtcggctctgccgcacagatcaaggccatgaagcaggtcgcgggcagcatcaagctcgagctggcccagtatcgcgaaatggcggcgttcgcccagttcggatccgaccttgatgtgacgacgcagcggttgttgaaccgtggcgcccgcctgaccgaacttctcaaacaacctcagtaccagccattaccggtggaagagcaggttgtcgcgatttttgccggagtgaatggttatctggatgagcttcccttggaatccatcactgatttcgaggaaaaatttcttaacgaggtg

SEQ ID NO: 273258 - DNA, 700 bp, Unknown
  Bacterial polypeptide expressing nucleotide sequence isolated from the Sargasso Sea
tatggatattaaaacagatcaaataacaagtctgctcaaagagcagttagaaaaatataataacgacatagatgtctctgaagttggtgaaatcattgaagttggagatggtgtcgctcgcgcatcaggtcttgaaaacgtgatgagctctgaattagtagagttaccaaatgatgtttttgggatggctttaaacttagaagaagataacgttggattagttctttttggtgaaactaggaaagttaaagaaggtgatattgcaaaaagaactggaaaagttgttgaggttcctgtaggcagagaaatgcttggaagggttgtgaatccactgggacagcctttagatgggaaagggcctattaatagtagtgagtttttgcctgtagagcgtaaagctcttggcgtcatgtcgcgtagccctgttaatgagcctctgcaaacaggaattaaggccattgacagtatggtcccaattggtagaggtcaaagagaattaattattggagatagacaaactgggaaaactgcagtagcgattgatgcaattattaaccaaaaaaatactcaagatacagacgctccagttttttgtgtttacgtagcaattggacagaaagcatctacggttgctagtttagtttctgaacttgaagcgcaaggcgcgatggattatactatcgttgttgctgctaataat

SEQ ID NO: 273259 - DNA, 860 bp, Unknown
  Bacterial polypeptide expressing nucleotide sequence isolated from the Sargasso Sea
aagaactagagaaggaaatgacttctactatgaaatgcaagaatcaggggttgtcaacgttgagaagccaagcgaatctaaggttgctatggtttacggtcaaatgaatgagcctccaggaaacaggcttagggttgccctaacagggttaacgatggccgaaaaatttagagatgagggaagagacgttctattatttatcgacaacatttatcgatacacacttgctggggttgaggtttcggctcttttaggaagaatgccatcagctgttggatatcagccaacactggcagaagaaatgggcgctttgcaagaaagaatcacctcaacaaaagacggctctattacttcaattcaagccgtatatgttcctgcggatgatttaacagacccatcacctgcaacaacgtttgctcatttagatgcaacagtggttctttcaagacaaattgctgagcttggaatctacccagctgtagatccacttgactcaactagcaggcagttggatccgcttgtagttggagaggaacattacaatgtagctcaaggagttcaaggcgttcttcaaaaatataaagaacttaaagatattattgctattttgggtatggatgaattatccgaggaagataagttggctgtagcaagagccagaaaagttgaaagattcctttcccagcctttcactgtcgcagaggttttcaccggatccccgggaaaatatgtaaaactcgaagataccatcaaatcatttaaaggcattcttgctggagactatgatgacctccctgagcaagccttttatatggttggaacaatcgaagaagctgtagaaaaagcaaaaaccttataat

SEQ ID NO: 273260 - DNA, 585 bp, Unknown
  Bacterial polypeptide expressing nucleotide sequence isolated from the Sargasso Sea
agccgacgttagctgacgagatgggtgaattgcaggaaaggattactacaacacgtggtaggtctattacttctatgcaggcagtttatgtacctgctgatgattacaccgatccagctccatttacttcatttacacactttgatggcacgacagagttaagtcgagacatagcggcactaggcatctaccctgcagttgacccacttgcatctacttccacgattcttactcctgaagtagtgggacaaaagcattatgacactgctcgtagagtgcaggagatactgcagcgttataaagaactccaagacataattgcaattcttggtttagatgaactctctgaagaagacaaaattacagtttcaagagcccgtaaagttcagagattcttatcacagcccatgaatgtcgcagagatatttacaggtttgcccggtgttactgtctcagttgaagagacagttgattcttttgcagcattagtagatggcgaactcgatgaacttcctgagcaggctttcttgaatgtcggtggagctgaagatgcgcaacgtaaagcccaagaattagaagcctaag

SEQ ID NO: 273261 - DNA, 268 bp, Unknown
  Bacterial polypeptide expressing nucleotide sequence isolated from the Sargasso Sea
tatggctaacaatttaactggaaaaatatcacaagttctcggagctgttgttgatgtagagttcgatggtgaacttcctgcaatcatgaacgctctagaagttgacaacaacggaacaagattaatgctagaggttgctcagcatttaggagaaaatgctgttcgtacaattgctatggatacaacagatggactagttagaggtcaaacagctactgatacaggtgcccctatttcaatgcctgtaggcccggaaactttaggtaga

SEQ ID NO: 273262 - DNA, 919 bp, Unknown
  Bacterial polypeptide expressing nucleotide sequence isolated from the Sargasso Sea
acagggattaaatgtatatatgtggcgattggtcaaaaagcatcttcaattgcaggagtagtaagaaagcttgaagaagaaggtgccatggagcatacgatagttgtcgcagctgccgccgccgattcacctgcaatgcaatacatagcaccatactcaggcacatcaatgggcgaatactttttggataatggcgaagacgcattaataatttttgatgatttaactaagcaagcttgggcatatcgtcaggtctcactactattgagaagacccccaggaagagaagcatatccaggggatgttttttacttgcattcgcgactgcttgagagagcttcaagggtgagtcaggagcatgttgaatcaatttcggacggaaaaataaaaggtaaaactggctcattgacagcgctgccaattattgaaactcaagctggagacgtttctgcatttgtaccgacaaatgttatttcaattacagacggacaaattttcttagagactgatttatttaatgctggtatcagaccagcgataaacgcagggctatcagtatctcgtgttggtggttcagctcagacgaagataataaaaaaattaggtggcggtattcgtttggcgttagcacaataccgagagctggcagcatttgctcaatttgcatctgacttagatgaggcgacaagaaagcagcttgaaaggggtcaacgtgcaactgaactgatgaaacaaaaacaatactcaccactttcggtatcagagatggccttatcattattcgcagtcaatgagggctatcttgatgatgttgaagtagccaaaatcagtgattacgaaagcgctttgcatgattatgctagatcaaatgagggcgaattgttagaaaacattaataagactggcgactataacgatg

SEQ ID NO: 273263 - DNA, 344 bp, Unknown
  Bacterial polypeptide expressing nucleotide sequence isolated from the Sargasso Sea
atctattcttggtcaagaacactacgatacaacacgtgctgtgcaaggagttctccagaaatacaaagagttaaaagatattattgctatattgggtatggatgagttgtctgatgaagataagttatcagttaatagagcaaggaaaattcaaagatatctatctcaaccattctttgtagcagaaacctttacaggcacgcctggtaaatatgtatcccttaaagatacaattaaaggtttccaagctatagtaaatggcgactatgatgatttacctgaacaagcattctacatgattggtgaaattgaagaagctaagaaaaaagcggatgagatttaag

SEQ ID NO: 273264 - DNA, 667 bp, Unknown
  Bacterial polypeptide expressing nucleotide sequence isolated from the Sargasso Sea
tatgagtggactaaacccatctgaaatttcaagtgttctcaaggacaaaatttcagggcttgatctaaaggctgaaaccaaaaacgaaggaaccattgtcaatgtttctgatggaattatcagaatacatggaatgggcgatgttatgtatggtgagctcgtagagtttgaaaatggtgtttttggacttgcacttaacttagagcaagactctgtcggtgttgttgtccttggtgattacctcgggctaagtgaagggcaaaaagttacatgtacaggtaagatcttagaggttcctgtaggtgaggaaatgctcgggcgagttgtagacgctctaggaaatccaatcgatggaaagggggaacttaaaacaaaacaaactgcccctattgaagtagttgcgccaggggttattgccagacaatcagttgatcaaccagtgcaaattggacttaaatcaatcgatgcaatggttccaataggaagaggtcaaagagagctcattattggtgatagacaaactggaaaaacagctgtagcaattgacgcaataattaatcaaaaaggtacaggaattaaatgtatttatgtagctattggtcaaaaacaatcaacaatagctaatgtcgtagcaaaacttgaagagtatggggcaatggagcacaca

SEQ ID NO: 273265 - DNA, 658 bp, Unknown
  Bacterial polypeptide expressing nucleotide sequence isolated from the Sargasso Sea
atggccaacgaaaaagaaatacgaacaaaaattgggagcgttaaaaacacccaaaaaatcaccaaggccatggaaatggttgcggcgagcaaaatgcgccgaacacaggagaccatgaaaaaagcattgccctatgcagacaaaattagagcagtgatcggccatatctataacgcaaaccctgactataagcacccatttcttgagaagagagatgtcaaaaccgcaggctatattgtggtcagctcggacagaggcctttgcggaggattaaatgtaaatatgtttaggggcctcatagcagagctcaaagagaataaaaacaaccaagtagaatcaaaactttgtcttgtaggcgctaaggcagtccagttttttaggtctgtagacgttgatgttgtagcggcagcatcccatcttggcgaagaaccacaagttgaagatttggttggctcaattaaaactatgttagatgaatacatcgatgggaagattgaccagctctttattgtgcacaatgattttgtgaacacgatgacacaaaaaccagagattaaaacacttctcccaatagaccctgaagacagagaagagatgcaagagcactgggattatatttacgagccggactcaaaagagcttttgactatatattgat

SEQ ID NO: 273266 - DNA, 544 bp, Unknown
  Bacterial polypeptide expressing nucleotide sequence isolated from the Sargasso Sea
atgagtaacggaagtatcgtccaaattattggtgcagtaattgatgttgaattcccgcgtgattctgtccccgaggtatatgacgccttaatcgtgagtgataagggcttaacactagaggtgcaacagcagctaggtgacggggttgtcagagctattgcaatgggtgcatctgaaggagttagtcgtggattaagtgttgaaaatacaaaggctccaatttctgttcctgtcggccaagcaacccttggtagaatcatggatgttttaggaaatccaatagatgaaaaaggacctcttgcggaacatgatacttcagcaatccatcgtgacgcccctaagtatgatgagctttctgcctctgatgagctattagaaacaggaataaaagtaattgatcttgtctgcccatttgcaaaagggggtaaggtaggtttattcggtggtgcaggtgttggtaaaacagttaacatgatggagcttattaataatattgcaacagagcactccggcttatcagtatttgcaggtgtggcgaaagaac

SEQ ID NO: 273267 - DNA, 503 bp, Unknown
  Bacterial polypeptide expressing nucleotide sequence isolated from the Sargasso Sea
aatgagcacaggaaatatcgtacaagtaatcggagcggtagtggatgttgagtttccaaaagaagcaataccaagcgtatatgatgcactcacactcaaggacggagacttagtattcgaagttcaacaacaacttggtgatggcatagtcagaaccattgcaatgggagcgagtgagggtctgaaaagaggtcttgaggttgaaaatacaggcgctccaatcagtgtcccggtaggacaggaaaccctgggaagggttttggatgtccttggcaatccaatcgatgaaaaaggacctgttggcgccaaatcaaacaggccgattcacgcaaaagcaccctcatttgaggaacagtcaaccgaagcggatgtattagaaacaggaattaaagtcattgaccttctttgcccgtttgcaaaaggcggtaaggtgggcttgtttggcggtgctggtgtcggtaaaacagtcacggtcatggagctaatcagaaacatcgctgcag

SEQ ID NO: 273268 - DNA, 571 bp, Unknown
  Bacterial polypeptide expressing nucleotide sequence isolated from the Sargasso Sea
ttgacagctttacctataattgagacccaggcaggggatgtgtccgcatatatacctactaatgttatttcgattaccgacggacaaatatttttagaaactgaattatttaaccaaggaattagaccagcagttaatgttggtttatcagtttctagagtaggctcagcagcacaaacaaaggcgatgaagaaagtagctggatcgattaaattagaattagctcagtatagagagatggctgcctttgcccaattcggctcagatttagatgcttcaacccaacaacttcttaatcgcggttcaaaattaacagaacttcttaaacaagatcaatactctccaatgactgtagcggagcaagtaatttcagtatttactggagtgaaaggatatctagatgacgtggaattgcctaaaatcaaagcatttgaaaaagatattattgaaaaaataaaatctgaaaaacctgatgttttagaaactgttcaatcgtcaggaaaacttgatgaaacttcagaaacagctattaaacaagtaattgaagattacaaaaaaggtaaaaattaat

SEQ ID NO: 273269 - DNA, 712 bp, Unknown
  Bacterial polypeptide expressing nucleotide sequence isolated from the Sargasso Sea
aatgcctagtttagatgacttaaaaaaaagaattaaaagtgttaaatcaacacagaaaattactaaggctatgaaaatggtagcagcagcaaaattaagaaaagcacaagagaatgcagaaaaaagtcgtccttatagtcaaaaaatgcaaaatattattctcaatcttactaagtctataaacgatcctgaaaatgctcctaagcttctagttggtacaggaaaggataaaacatatttatgtgttttattaacagctgatagaggattatgtggaggttttaattctaatatttgtaaattagcaaaaaaaaattttaaaaaaataataagtgaagaaaaaaatttaaaaataattactgtcggctccaagggactagaccaaattaagagagaatacggaaactatgttataaaaaaattcagtttcaaagaaaataaaaacatttcttttaaagaagcagaaatagttggaaatgaaattataagtttatttaataacgatgaattcgacaaatgtatattattttacaacaattttaaaaacgtcatcactcaaatacctcaagctcagcaaattatacctgccaaaaataatgcttcaaatgtaaaagttaataaatcccaatcttatgaatttgaaccagatgaagatgaaattttggaagatttacttccaaaaaatgtttcaactcaggtcttcagggctttt

SEQ ID NO: 273270 - DNA, 463 bp, Unknown
  Bacterial polypeptide expressing nucleotide sequence isolated from the Sargasso Sea
aatggaaatcaaagctgcagagatttcttcagtaattaaagaacagatttcaaattttgaaagtaaggcagatgtagctgaggtaggaactgttttgagtattggagatggtattgcacgtgtttatggattagatcaagttcaagctggtgaaatggtagagtttcctggcggcataaaaggcatggccttaaatcttgaaatggataatgttgggattagtatttttggagatgatactggaataaaagaaggagatactgtcaaacgtacaggtgaaattgttgatgttccagttggaaaggcattattaggaagagttgttgatggtctaggaaatcctattgatggtaaaggtccaatacaatcttctgaaaagagaagaatcgaattaaaggccccaggtattatacctcgtcaaagtgtttcagaaccaatgcagactggtataaaagctcttgat

SEQ ID NO: 273271 - DNA, 780 bp, Unknown
  Bacterial polypeptide expressing nucleotide sequence isolated from the Sargasso Sea
tatgagcaaattaggaaaaataactcaattaattggagcagttgtagatgtaagttttgatgctagccttccagaaatatatactgctttagaagttaataacaaaggcaataaattaattttagaagttgctcaacatttaggagaaagtagtgttagaaccattgcaatggactccacagaaggtttaaaaagaggtgacactgttattgatactggtgcacccattagtgttcctgtcggtcccgaaactttaggaagaataattaatgtgataggtcaaccaattgatgaaaaaggtgaggtaaaaacgaaagaaaattggcctattcatagacaagcacccaagtttacagatcagtcaactgaaaccgaaatgttggttacagggattaaagtcgtagatcttttagctccatatgcaaagggtggaaaaattggtttatttggaggagcaggtgttggtaaaactgtaactattatggaactaattaataatatagcaaaagcacatggaggattttctgtttttgcaggtgttggagaaagaacaagagagggaaacgatctttatcatgaaatgatcgagtctggagttattaaaaaagaaggaaaaggatctaaagcagctttggtttatgggcagatgaacgaacctcctggcgcaagagctagagtagctttgactggattaactgtagctgaatattttagggataaagagggccaggatgtattattttttatagataacatatttaggtttactcaagcaggctc

SEQ ID NO: 273272 - DNA, 838 bp, Unknown
  Bacterial polypeptide expressing nucleotide sequence isolated from the Sargasso Sea
tatggctataaatccatctgaagtaacaaaattattaaaagatcaaataaaaaactttggtgaaaaagctgaggtgtctgaaataggaaaggtcctctcagtaggagacggtattgcacgtgtatttggattggataatgtgcaagcaggtgaaatggtagaatttgaagacggttcaaaaggaatggctttaaatttagagagtgataatgttggagttgttatatttggtgacgacagaaacataaaagagggagacactataaaaagaacaaatgcaattgtagacgttccagttggtaaagaattattgggcagagtagtcgatggactaggaaatccaattgatggtaaaggtccactatctgctaaaaatagaaaaagagttgaagtaaaagctcctggaattatcccaagacaatcagtaaatgaacctatgcaaacaggtttgaaatcaattgactcactaatacccattggtaggggtcaaagagagttaattattggggatagacagactggcaaaactgctgtagcaattgatgcgattatcaatcaaaagaaaattaatgagtcttcggatgaaaagaaaaaattatattgtgtgtatgtagcaataggtcagaaacgatctaccgtagcacaaattaccaagaccttagaggaggccggagcactagaatatactaccattatcgcagctactgcgtcagactcagcaccgttacaatttttagctccttacacaggttgtacaatcggtgagtattttagagataacggtatgcacgctttaatagtttatgatgacttatcaaaacaagcagtgcatatagac

SEQ ID NO: 273273 - DNA, 242 bp, Unknown
  Bacterial polypeptide expressing nucleotide sequence isolated from the Sargasso Sea
tggaagccgcggccagcgcgagctgatcatcggtgaccgccagaccggtaagaccgccatcgcgatcgacacgatcctgaaccagaaggatcaggacatgatctgcgtctacgtggccgtcggtcagaaggctgcttctgtggccaacgttgtggaggtgctgcgtgagcgcggtgccctcgattactccgtgatcgtggccgcaacgcttccgagccgcagctctgcagtactggctcctt

SEQ ID NO: 273274 - DNA, 788 bp, Unknown
  Bacterial polypeptide expressing nucleotide sequence isolated from the Sargasso Sea
ttagacagtttaattccaattggaagagggcaaagagaacttatatttggagacagacaaactggaaaaactgcagtggcagtagacacaataataaatcaaaagtccattaatgagacgaatgatgaaagcaaaaaattatactgtgtttatgttgcaatcggtcaaaaaagatcaactgtggctcaaattgtaaaaactttggaggatgcaggtgccatgagttatacaacagttgtgtcagcaactgcttcagactctgctccattacaatttttagcaccttatactggatgtgcaattggagaatattttagagataatggtatgcacgccctcataatttatgatgatttatccaaacaagcagtagcatatagacaaatgtctcttcttctaagaaggcctccagggagagaagcgtttcctggagatgttttttatcttcatagtcgattacttgagagagcagcaaaattgaatgatgaaaatggaggtggttcattaactgcattaccgataatagaaacacaagctggagacgtttccgcgtatattcctactaatgttatttcaataacagatggtcaaatttttctagagacagaattgtttaatcaaggtgtccggccagctgtaaatgttggcttatctgtttcaagagttggttcagctgcacagacaaaagcgatgaaaaaagtcgcaggttctattaaacttgaacttgctcaatacagggaaatggctgcatttgcacaatttggatcagatttagacgcatcaactca

SEQ ID NO: 273275 - DNA, 809 bp, Unknown
  Bacterial polypeptide expressing nucleotide sequence isolated from the Sargasso Sea
aaaatttgacggagaacttccagaaattctaacagcattggaatgtaaaaatggggataacaggttagttttagaggttgctcaacatttaggtgaaacaacagttagaacaattgcgatggatgctactgaaggactaaaaagaggtgatgaagtaataaatactaatgctcctattcaagtacctgttggacctgaaactcttggaagaattattaatgtaattggtgagcctatagatgaaagaggcgaagttaaaacaaaagaaagttggccaattcacagagcagcccctgaattcaatgatcagtcaactgaaacagaaattctagtaactggtattaaggttattgacctgttagcaccttatgcaaaaggtggaaaaattggactatttggtggagctggagtaggtaaaacagtcttaattatggaattgataaataacgttgcaaaagcacatggaggattttcagtttttgcaggagtaggtgaacgaactagagaaggaaacgacctttatcatgaaatgatggattctggagtaataaaaaaagatggtgctggatctaaagctgcactagtttatggacagatgaacgagcctccaggagcaagagcaagagttgcgcttacaggtttaacagttgctgagtatttcagagaccaagaaggtcaagatgttcttttctttgttgataacatttttaggtttactcaagctggctcagaggtttcagcactattgggaagaattccgtctgcagttggttatcaaccaacactagctacagacatgggaaatctac

SEQ ID NO: 273276 - DNA, 487 bp, Unknown
  Bacterial polypeptide expressing nucleotide sequence isolated from the Sargasso Sea
atgcctagtttaaaagatttaagaaatagaataacgagtgttaagtctacacaaaaaattactaaagcaatgaaaatggttgctgccgcaaaattgagaaaagctcaggaaaatgcagaaaagagtaggttatactctgaaaaaatgaatgaaattattacgaatttaaaaagctcaataactgataaatcatctgccccccgtttattaataggaaataacgacaataagagatttttatgtgtgattatgacagcagatagaggactgtgtggaggatttaattcaaatatttgtaaaaaatcaaaagaatatatcaataatttattaaaggagaacaaggaagtaaagattattacagttggatcaaagtcatttgatcaaatgaaaagaaactatggaaattatattattgagaaactgacgtttaaaaatcaaaaagaaattaatgttactgatgctcaaaaaatttctaacaaaattatat

SEQ ID NO: 273277 - DNA, 499 bp, Unknown
  Bacterial polypeptide expressing nucleotide sequence isolated from the Sargasso Sea
atggccaacgaaaaagaaatacgaacaaagattgggagcgttaaaaacacccaaaaaatcaccaaggccatggaaatggttgcggcgagcaaaatgcgccgaacacaggagaccatgaaaaaagcattgccctacgcagacaaaattagagcagtgatcggccatatatataaagcaaaccctgactataagcacccatttcttgaaaagagagatgtcaaaactgcgggctatattgtggtcagctcggacaggggtctttgtggaggattaaatgtaaatatgtttaggggcctcatagcagagctcaaagagaataaaaacaaccaagttgaatcaaaactttgtcttgtaggcgcaaaggcagtccaattttttaggtctgtagatgttgatgttgtagcggcagcatctcatcttggcgaagaaccacaagttgaagatttggttggctcaattaaaacgatgttagatgaatacatcgatgggaagattgacc

SEQ ID NO: 273278 - DNA, 779 bp, Unknown
  Bacterial polypeptide expressing nucleotide sequence isolated from the Sargasso Sea
ccaccgagagcctcctacatttgaggaacaggaaacggatgcagacatcctggttaccggaatcaaggttctggacctgctctgtcccttcctgaaaggagggaaaattggcctcttcggaggtgcgggggttggcaagaccgtggtgattatggaattgatccggaacattgctgcagagcacggaggattttcagtatttgccggagtcggtgaaagaacccgtgaaggaaacgatctttggaacgagatgaaggagtccggagttctggataaaaccagtttggtttatgggcaaatgaatgaacctcccggagcacgagcaagggtcgcattgaccggtttgacggttgcagaatattttcgtgatgaagagggggcggacgtcttaatgttcatcgacaacattttccgtttcacccaggctggctctgaagtttccgcgttgcttggaagaattcctgcagcagtagggtatcagccaaccctttccaccgaaatggggaacctgcaggaacgcatcacttcgacgaaaaaaggttccattacttcggtacaggccatttacgtccccgcagatgacctaacagaccctgctccggcaactactttctctcacctcgacgcaacagtggttttaaaccgttcgattgcggaacttggcatttaccctgccgtcgacccgcttgattccacttcccggattcttaccgcggacattctgggagaagagcattattctgtcgccaatgaggtgcagcaacttcttcaacgataca

SEQ ID NO: 273279 - DNA, 687 bp, Unknown
  Bacterial polypeptide expressing nucleotide sequence isolated from the Sargasso Sea
tgtttctgtaacagatggtatcaccagaatacatggattaaacgacgtccagtacggagagatgatcgagtttcctggcgatacatttggcttggcccttaacttggaacaagactcagtcggagcagtggtattaggcgactacacccacatttctgagggagcagaagtaaaaacaaccaatagaattcttgaagttccagttggcgaaggcttgcttggcagggttgtcgactccttgggaacacccctcgatggaaaaggagctgtttcctcagaccaaacagcaccaatagaaaaagttgcaccaggcgtcatctcaagacagtcagtcgaccaaccagttcaaaccgggcttaagtcgattgatgcaatggtaccaatcggaagaggccagcgagagcttatcattggtgatagacaaacaggaaaaacagcggttgctgttgacaccataatcaaccaaaaaggcacagggattaaatgtatctatgttgcggtgggccagaaaaactcttcggttgccaatgtggttaagaagttagaggaagaaggcgcattagagcacacgatcattgttaatgctgcagcatccgattcagctgccatgcagtatattgctccatattcaggctgtgccatgggcgagtacttccgagacaaaggagaagacgccctaattatttt

SEQ ID NO: 273280 - DNA, 701 bp, Unknown
  Bacterial polypeptide expressing nucleotide sequence isolated from the Sargasso Sea
gctgcctcccaacgcgaagggccggatcacgtacgtcgcccccccgggcgagtacacgctcgaggacaaggtgatcgaggtggagtttgccggggaacgcaagagctacacgatgctgcagcagtggcccgtgcgcgcgccgcgcccggtggcggagaagctccccgcaaactacccgctcttgacgggccagcgcgtgttggacgtcatgttcccgtccgtcctgggcgggacgtgtgccatcccgggtgcgttcgggtgcgggaagacggtcatctcgcaggcgctctcgaagtactccaactcggacggcatcatctacgtcgggtgcggcgagcgcgggaacgagatggcggaggtgctcgccgagttccccgagctcacgatgacgcttcccgacggctccgaggagtccatcatgaagcgcacgacgctcgtggcgaacacgagtaacatgcccgtggcggcgcgcgaggcgagcatctacaccggcatcaccctcgcggagtacttccgcgaccaggggtacaacatctcgatgatggcggactccacgagccggtgggcggaggcgctgcgagagatctccgggcggctcgcggagatgcccgcggacagcgggtacccggcgtatctgggagcgcgcctggcttcgttctacgagcgcgcgggccgcgtgcggtgcctgggcgggccgaacc

SEQ ID NO: 273281 - DNA, 712 bp, Unknown
  Bacterial polypeptide expressing nucleotide sequence isolated from the Sargasso Sea
gcacagtacggagagatgatagagtttccaggagatacttttggcttggcgcttaacctggaacaagactctgtcggggctgttgttttaggcgactacacccacatttccgaaggcgcagaagtaaaaacaacaaacagaattctagaagttccggttggggaaggtttgttgggaagggttgtagactcccttgggacaccgcttgatggaaaaggagccattgagacagagcaaacagcaccaatagaaaaagtagcaccaggcgttatctctcgacaatcggttgatcaaccagtccaaaccggactgaaatcgattgacgcaatggtaccaattggcaggggtcaacgagagttaattattggcgataggcaaacgggaaaaacagccgttgctgttgacacaataattaaccaaaaaggaacaggcatcaaatgcatctatgtggcggttgggcagaaaaactcatcggttgccaatgtggttaagaagctagaagaggaaggcgcattagagcatacaatcattgttaatgctgcagcatcagattctgctgcgatgcagtacattgcaccatattcggggtgcgcgatgggagaatattttcgagacaaaggcgaagacgcactaatcatttttgatgacttaaccaaacaagcttgggcatacaggcaggtctcgcttctactaaagagaccacccgggaaaa

SEQ ID NO: 273282 - DNA, 424 bp, Unknown
  Bacterial polypeptide expressing nucleotide sequence isolated from the Sargasso Sea
cgctgagattggaatttacccagctgtagatctattagactcaacctctagaatattggacccaagaatagttggagaagaacactatagagtcgcaagagaagtgcaaaaagttttacaaacctataaatctcttcaagatataattgcaattttaggtatggatgaactttcagaagaagataaattagttgttgctagagctagaaaaattcaaagatttctttctcagcctttctttgtagcggaggtatttactggttcaccaggaaaacttgttgacctagaatctacaatcaaaggttttgatgctatttgcaaaggggagtacgaccatttgcctgaagctgcattttatatggttggaactattgaggaagctattcaaaaagcagaggatttagctaaagaagcagctgcataa

SEQ ID NO: 273283 - DNA, 815 bp, Unknown
  Bacterial polypeptide expressing nucleotide sequence isolated from the Sargasso Sea
acatagacaagcaccttcatttaatgatcagtcgacagaaacagaaattttagtaactggtattaaggtaattgatttattagcaccatatgcaaaaggtggaaaaataggtttatttggtggagcaggagttggtaagacagttattataatggaattaataaataacattgcaaaagcgcacgggggcttttctgtgtttgcaggagttggagaaagaacaagagaaggaaatgacctttatcacgaaatgattgagtcgggagtaatcaaaccagatggtgatggttcaaaagccgcattagtatatggccaaatgaacgaaccgccaggtgctagagcaagagtagctttaacaggattaacagttgcagagtattttagagaccaagagggtcaggacgtcttattttttgtagacaatattttccgttttacacaagctggttcagaggtttcggcgctattaggaagaataccctctgcagtaggctatcaacctactttagcaactgatatgggaaatcttcaagaaagaattacaacaacaaataaggggtcaattacttctgtacaagcaatttatgttcctgcagacgatttgacagacccagcacctgctacctctttctctcacctagacgcaactacggtattgtctagacaaattgcagagttaggtatttatccagcagttgacccattagactcaacttcaagaatactagatccgagaattgttggagatgagcactatagagtagcaagggaagttcaaaaaatattacaaacttataaatctttacaagatatta

SEQ ID NO: 273284 - DNA, 450 bp, Unknown
  Bacterial polypeptide expressing nucleotide sequence isolated from the Sargasso Sea
atgcaaatactgttctcagtcgagctatttcggaattggggatataccctgctgtcgatcctcttgattcaagcagtagacttcttgatccacttgtagttggcgatgaacattaccaagttgctagagaagtgcagagcattttgcagaggtataaatctttgcaagacattatagcgatcttagggatggatgaattgtcagaagaggataaattgatagttggaagggctagaaaaatacagagatttttatctcaaccttttgatgttgctaaagtattcaccggttctgatggagttcaagtccccttagacgtaacgatagatagttttaaaagagttgcagcaggtgagtttgatcatttgccggaagcagcattttatatggttggaggaattgaagacgtaatagccaaagcagaagaattagcatcgagggcggcataac

SEQ ID NO: 273285 - DNA, 856 bp, Unknown
  Bacterial polypeptide expressing nucleotide sequence isolated from the Sargasso Sea
aggacaaagagaattaattattggtgatagacaaactggcaaaacagcagtcgctattgatgctatcattaaccaaaaaaaaattaatgagtctggggatgaaaagaaaaaattatattgtatttatgtagctgtaggccaaaagagatccactgttagacagattgaaaaaacattagaagaagctggcgctatggattatacaacaatagtagctgcaacagcatcagatgcagcgcctctgcaatttttagctccttatactggatgcactatgggtgagtattttagagataatgggatgcatgccttgattatttatgatgatttatcaaaacaagctgttgcatatagacaaatgtcacttcttttaagaagacctcctggaagagaagcgtatcctggagatgtattttatttacacagtagattactagaaagagctgcaaaactaagtgatgagcatggtgggggatcactaacagctcttccaattatagaaactcaaggaggagatgtttctgcattcataccaacaaatgttatttcaattactgatggtcaaatatttcttgaaacagaactttttaaccaaggtataagacctgccataaatgttggattatctgtgtcaagagttggatcatctgctcaaactaaagcgatgaagaaagtttcaggttccatgaaattagagcttgcacaatatcgagaaatggctgcgtttgcacaatttggctcagacctcgatgcatctactcagaaattacttaacagaggatcaaaattaactgaacttttaaagcaaaaccaatattctcctatgacagttgcagaacaagtcatttctgtattt

SEQ ID NO: 273286 - DNA, 817 bp, Unknown
  Bacterial polypeptide expressing nucleotide sequence isolated from the Sargasso Sea
atgagtaaaaatggaaaaatcgttcaagtaatcggggcagtggtcgacgttcaatttgatggtgcattacctgaaattttaacagcattagaagtagacaattctggaaacaaactggttttggaagttgcacaacatcttggagaaaatagtgtaagaacaattgcaatggatagtaccgagggtctaaaaagaggtgatgcagttcaaaatactggtgcaccaataagtgtacctgtcggacctgaaactttaggtagaattataaatgttattggtcagcctattgatcaaaaaggagaagtaaagacaaaagagaaatggccaatacatcgagaggcaccaaaatttacagaccagtccaccgaaacagaaattttagaaactggtattaaagttattgatcttctagcaccatactcaaaaggcggaaagattggattattcggaggagctggagttggcaaaaccgtaattattatggagttgataaacaacattgcaaaagctcatggaggattttctgttttcgcaggtgttggagaaagaacaagagaaggaaatgatttatatcacgaaatgattgagtcaggtgttataaaacctgagggaaagggttctaaagctgccttagtatacggtcaaatgaacgagcctcctggagcaagggcaagagtaggtttaacaggactaacagtagcagaatattttagagacaaagaagggcaagacgtactattttttgtagataatatttttagatttactcaggcaggctcagaagtttcagcactattaggaagaataccatctgcag

SEQ ID NO: 273287 - DNA, 877 bp, Unknown
  Bacterial polypeptide expressing nucleotide sequence isolated from the Sargasso Sea
gaaactcttaggtagaattatgaatgtaatcggtgaacctgttgatgaaagaggtgaaattaaaacttctaaaacctatcctattcatcgtcctgctcctgaatttgttaatcaatcaactgaaactgaagttcttgtaacaggaataaaggtagtggatttattagccccgtatgctcgtggaggtaaaattggactttttggtggagcgggggtaggaaaaactgttttgattatggagttaataaataatatagcaaaagcgcatggcggttattctgtatttgctggtgttggagaacgtactcgtgaaggtaacgatctttatcatgaaatgattgaatctggaattattgatcttaaaggtgataaatcaaaagttgctcttgtttatggtcaaatgaacgaacctccaggagcaagagctcgcgtagctctctcaggcttaactcaagcagaatatttccgtgacgaggaagggcaagatgttttattttttgtagataatatttttcgttttactcaagctggttcagaagtatcagctttattaggtcgtattccatcagcggttggttatcaaccaactcttgctactgatatgggtgctttacaagaacgtattacaactacaaaaaaaggctctattacatctgtacaagctatatatgttcctgctgatgatttaacagaccctgctcctgctacttcttttgctcatttagatgcaacaactgttttaaatagagcaatttcagaaaaaggaatttatcctgcagttgatcctttagactctacttctcgaatattagaccctcaagttgtaggtgatgatcattatcgcgttgctagagaagtacagagagttctttcaaca

SEQ ID NO: 273288 - DNA, 802 bp, Unknown
  Bacterial polypeptide expressing nucleotide sequence isolated from the Sargasso Sea
cttagcaccatacacaggttgtgctatgggtgagtattttagagataatggaatgcatgcgttaataatttatgatgatttgtctaaacaagcagttgcttatagacaaatgtcattgctattaagaagacctccaggacgtgaggcttatcctggagatgtattttatcttcatagtagattacttgaaagagcagcaaaattaagtgacgaacatggtggtggatcacttacagcattgccaattattgaaacacaaggtggagatgtatccgcgtttattcctactaacgttatttcaattacagacggacaaattttccttgaaacagaactatttaaccaaggtataagacctgcaattaacgtaggtttatcagtatctagggttggatcatctgcacaaacaaaggctatgaaaaaggtttcaggctcaatgaaacttgaacttgctcaatatagagaaatggcagcttttgctcaatttggatctgatttagatgcatctacccagcaacttttaaatagaggctctaagttaactgaacttttaaaacaaaaacaatattcacccatgactgttgcagaacaagttatttcagtattttgtggagtaaaaggttatctggatgatattgatttaaaagacgttgctgaatttgagagcaagattattgaaaaatgtaaatcagataagcctgaaattatcgagtcaattttaagttcaggaaaacttgaggaagataaagaaaaattacttgttgaggtaatcactcaattaaaaggaaattttaaatcttaa

SEQ ID NO: 273289 - DNA, 484 bp, Unknown
  Bacterial polypeptide expressing nucleotide sequence isolated from the Sargasso Sea
cttttcaattccggagttcgtccagcaattaatgttggtctgtcagtgtctcgagtaggaggagctgctcaagttaaagcagtgaagcaagttgctggaactttgcgtcttgaccttgctcaatacagagaaaaagaggcctttgcccaatttggcagtgacttagaccaagccacccaaaaacagcttcaacgtggacaacgccttgtcgaaattctaaagcaaccacagtatcagccaatgccctgggttgatcaggctatttccatctttgctgcaacaaacggattcctggacgatcaacctgtaaacatgctaggcaaatttgaatctgaattcttaacatatattcaaactaaaaaagctgatttacgtaaatcgatcgaagaaaaagaaatgattgatgaagccgcggatacggaattgaaatcagcgttgaatgaatttgcagaagctttttctgctgaaaacagctctaattgat

SEQ ID NO: 273290 - DNA, 906 bp, Unknown
  Bacterial polypeptide expressing nucleotide sequence isolated from the Sargasso Sea
aaatcagttgatgcaatgattcctataggtagaggtcaaagagagcttgtaatcggagacagacaaactggaaaaaccacggtatgtatcgatacaattttaaatcaaaaagaattttatgatgcgggggagcctgtatattgtatttatgttgccgttggccagaaagcctcaacagttgcaggtatagcaaagatattggaagataaaggcgctttggcttacactactattgttgcagcaaatgcttctgatcctgctgcaatgcaggtatatgctccatttacaggtgcatcaattggagaatattttagagacactggtagaccagcattaattatatatgatgatctttcaaaacaagctgtagcttatcgtgaaatatcactactgttaagacgtccaccaggtagagaagcctaccctggagatgttttttacttacattcgaggttattagaaagagcagcaaaagttatcaatgatgatgctatcgctaaagaaatgaatgatttaccagaatcgttaaaagcaattgtaaaagggggaggttctctaactgcacttccaataattgaaactcaagcaggtgatgtttcagcatatatacctacaaatgtaatttcgattacagatggtcaaattttcttagaatcagatttgtttaactctggtgttagaccggcaattaatgttggaatttctgtttccagagtaggtggttcggctcaaatcaaatcaatgaaaaaagtatcaggaacgttgaagttagatcaagctcaatttagagaattagaggcttttgctaagtttggttctgatctagatgccgcaacattaaatgtaatcgaaaaaggaaaaagaaacgttgagatattaaaacaagcacaaaatgatccttttaag

SEQ ID NO: 273291 - DNA, 867 bp, Unknown
  Bacterial polypeptide expressing nucleotide sequence isolated from the Sargasso Sea
ctgtatttgctggagttggagaaagactagagaaggaaatgatctttatcatgaaatgatagagtcgggagtaattaaacctgaaggaccaggatcaaaggctgctttagtttatggtcaaatgaacgagcctcctggagcaagatcaagagttgcacttacaggattaacagttgcagagtatttcagagatcaagaaggtcaggatgtactttttttcgtagataatatttttagatttacacaagcaggttctgaagtatcagccttattaggaagaattccctcagcagttggttatcaaccaactttagcaactgatatgggaaatttacaagaaagaattacgacaactaacaaaggatctattacatcggtacaggcgatatatgttcctgctgacgacttgactgatccagcgcccgcaacatcatttgctcacttagatgcaacaactgtattatcaagacaaattgcagaacttggaatatacccagctgttgatcctttagactcaacttctagaattttagatccaagaattgtaggtgatgaacattatagagttgcaagagaagttcaaaaaattcttcaaacatacaaatctttacaagatataattgcaattttgggtatggatgaattatctgaagaagataaactaattgttgctagagcaagaaaaattcaaagattcttgtcccaaccattttttgtagcagaagtttttacgggctcttctggaaaattagttgatctagaatctacaattaaaggatttgatgcaatttgtaagggtgagtacgatcacttaccagaagcagctttctatatggttggtacaatcgaagaagccgttgaaaaagc

SEQ ID NO: 273292 - DNA, 727 bp, Unknown
  Bacterial polypeptide expressing nucleotide sequence isolated from the Sargasso Sea
catggctttgctgccctttccactcccgtttgctgaactggaagtgggccaccacctgtactggcagatcggcgatctgtacctgcatggccaggtgttcctgagctcctggatcctgatcggcatcctgctggttcttgttctggctggcacccgcaacatgcagcgcgaccccctgggtctgcagaacctgctggagttcctctggaacttcattcgcgacatcgcccgcgacaacatcggcgagaagtactaccgcgactggctgccgttcatcggcaccctgttcctgttcattttcgtcagcaactggggtggcgcgctgatcccctggaagatcatcgaacttcccgagggtgagctgggcgctcccaccgcagacatcaacaccacggtggccatggccctgctggtgtccctggcgtatttctatgccggtctgagccgcaagggtctgcgcttcttcgagctgtacgtggagccgactccgatcatgctcccgttcaagatcatcgaggaattcaccaagcctctgtcgctttccttccgtctgttcggaaacatccttgccgacgaactggctgtgggtgttctggtgtatctcgtccccctgctggtgcccctgccggtgatgttgctgggcctgttcaccagtgccattcaggccttgatcttcgcgaccctcaccgccttttacatcggtgaaggtctgcacgaggcccactaa

SEQ ID NO: 273293 - DNA, 764 bp, Unknown
  Bacterial polypeptide expressing nucleotide sequence isolated from the Sargasso Sea
tatgacaattaatccaacagaaataagcgacataatcaaagcaaagattaaagagtacgatattaaatccacagcacacaacgagggaacagttgtctctgtttctgatggtattgctataatttatggtatcactgaagcacttcaaggtgagatgttagaatttccaaataaaacatttggcatggccttgaacttggagcgtgattctgtaggtgctgtgatactaggtgattataaacatatatctgagggagatactgttaaatgtactggtagaattctagaagttcctgttggtaatgaattattaggaagagttgttaactcattaggcgagccaattgataacaatggaacgatagactctaaaagtacgtcgccgattgaaaaaattgcaccaggtgttattgagcgtaaatctgtagatcagcctgtccaaacagggttaaagtctgtagatgcaatggtaccaataggccgtggtcagcgtgagttaatcattggtgataggcaaacaggtaaaactgcagtagctattgatgcgataatcaatcagaaagatactggtgttaaatgtatatatgtggcaatcggacagaaagcatcttctgtcgctcaggtggttagaaagcttgaagaacatgatgcgcttaaacacacaattatagttgcagcaactgcatctgattccgcagctatgcagtatatcgccccttatgctggatgtgcaatgggagaatattttagagatattggcgaag

SEQ ID NO: 273294 - DNA, 811 bp, Unknown
  Bacterial polypeptide expressing nucleotide sequence isolated from the Sargasso Sea
aatgccaagtttagatgatttaagaaaaagaattaccagcgttaaatctacccaaaaaataacaaaggcaatgaaaatggtggcggcagcaaaacttcgtaaagcgcaagaaatggctgaaaaaggtagaccttatagtgataaaatggatgtaataattcagaatttaagcaaagcaataagtgatccatctaatgcaccaaaacttttagttggaacaggggaggataaaacacatctatgtgttgtcatgaccgccgataggggtctttgtggcgggtttaatacgaatatatgtaaattagctaaaaaacattttgacgaagcacttaaatcctcaaaaaatttaaaaataatcacagttggcaccaaaggtcttgatcaaataaaaagagattatggaaaatatattataaaaaaaataaacttgaaggataaaaaaaaattaacatttcaagatgcagaaaatattggaaaacaaattgttgaattatttaaaaataaagaatttgataaatgttttattttttataataaatttaaaaacgttatctcacaaattccacaacaacaacaagtgattccagctaaagtagatgacaaaagtaaaaaagaagaagagatatcagcatatgaatttgaacctgaagaggatgaaattttagatgatttattaccaaaaaatatatctacacaaatatttaaggcttttttggaaaattcagctagtgagcaaggttcaagaatgacagcaatggataatgcgacaagaaatgctggagatttagtagataagttaacaattaactat

SEQ ID NO: 273295 - DNA, 907 bp, Unknown
  Bacterial polypeptide expressing nucleotide sequence isolated from the Sargasso Sea
aagttcagataactggccaatccatagagctgcaccagaatttaatgatcaatccacagaaactgaaatacttgtaacaggaataaaagttattgatcttttagccccctacgcaaaaggtggaaaaattggtttatttggtggagctggagttggtaaaactgttttaattatggaattgatcaacaacgtagcaaaagctcacggtggattttcagtttttgcaggagtaggagaaagaactagagagggaaatgatctttatcatgaaatgatagactcaggtgttattaaaactgatggtgagggttctaaagcagcattagtttatggacaaatgaacgagcccccaggagcgagagctcgagtagccttaactggattaactgttgctgagtattttagagatcaagaaggtcaagacgtactattctttgttgataatatatttagatttacacaagcaggatctgaggtatcagctttacttggaagaataccttcggctgtagggtatcaaccaacattagcgacagatatgggtaacttacaggaaagaattactacaactaacaagggatcaattacgtcagttcaagcgatatatgttccagctgatgatttaactgatcctgcccccgctacttcgtttgctcacttagatgcaacaactgttctttctagacaaattgctgaaataggaatttatccagccgttgaccctttggactcaacgtctagaattttggatcctagaatagttggagatgaacattatagagtagccagagaagtacaaaaagttcttcaaacatacaaatctttacaagatataattgcaattttgggaatggatgagttatctgaagaagataagttagttgttgctagagctagaaaaatacaa

SEQ ID NO: 273296 - DNA, 586 bp, Unknown
  Bacterial polypeptide expressing nucleotide sequence isolated from the Sargasso Sea
tactctgggaactgatgttggtgaattgcaagaaagaattacatccacattagaagggtcaattacatctattcaggctgtttacgtacctgctgatgacctaacagacccagctcctgctacaacctttgcccatttagatgctactaccgtgcttgccagggctcttgcagctaagggaatttatccagcagttgatccattagactcaacgagcacaatgttacaaccatcagttgttggcgatgagcattacaaaacagctagagctgtccaatcaactttacaaagatacaaagagcttcaagatattatcgcaattcttggtttagatgagctttctgaagaagatagattaacagtcgacagagccagaaaaattgaaaaattcctctcacaacctttctttgtagcagaaatatttacaggaatgtctggtaaatatgtaaaattagaagataccattgctggtttcaacatgattttatcaggtgaattggatgatttaccagagcaagcattttacttagttggcaatattgatgaggttaaagcaaaggctgaaaaaataaaatcagaaaaataa

SEQ ID NO: 273297 - DNA, 285 bp, Unknown
  Bacterial polypeptide expressing nucleotide sequence isolated from the Sargasso Sea
aatggcaatttctctaaaagttttagctcctaataaaaatgtttatcaaggcgaagctgaagaagtaattcttcctagtactactggtcagcttggtatactgccaggacacatctctttagttactgcaatagatattggcgttttaaggctaagaatgaattcccagtggaaatcaatagctcttatgggaggcttcgctgaaattgaatcagatgaagttatagttttggtaaataatgctgaaattggttctgaaattaatgttcaaaacgctgaacaaga

SEQ ID NO: 273298 - DNA, 653 bp, Unknown
  Bacterial polypeptide expressing nucleotide sequence isolated from the Sargasso Sea
gctggagcgcgcttcccgcgtttccgaagagtacgtcgagaagttcaccaatggcgccgtgaagggcaagaccggttccctgaccgctctgccgatcatcgaaacccaggccggtgacgtttccgcgttcgttccgaccaacgtgatctcgatcaccgacggtcagatcttcctggaatcggccatgttcaactcgggtatccgtccggccgtcaacgccggtatctcggtatcccgcgtgggtggtgctgcacagaccaagatcatcaagaagctttccggtggtatccgtaccgctctggctcagtaccgtgaactggcagcattcgcccagttcgcttctgacctggacgaagccacccgcaagcagctcgagcatggtcagcgcgtaaccgagctgatgaagcagaagcagtatgcgccgatgtccattgccgaaatgtcggtgtccctgtacgcagccgagcgtggcttcctgcaggacgtcgaagtcgccaagatcatcagcttcgagcaggccctgatcgccttcttcaagcgtgatcacgccgacctgatggcgaagatcaacgagaagggtgacttcaacgacgaaatcgacgctggcctgaaagccggtatcgagaagttcaaggccacccaaacctggtaac

SEQ ID NO: 273299 - DNA, 965 bp, Unknown
  Bacterial polypeptide expressing nucleotide sequence isolated from the Sargasso Sea
catggctgaggcctctatcggtagagtgacgcagattatcggcgccgtcgttgacgtcgctttcgacggcgacctgccccccatcatgaacgcgcttgaaaccgacaaccacggcaatcggctggttcttgaggtcgcgcagcacctcggtcagaacgaagtgcgcacgatcgccatggacgcgaccgaaggtctggttcgcggccaggaagtcaagaacacgggttcgcccatcgaagtgccggtcggcgtcgagacgcttggccgtatcatgaacgtcatcggcgagccggttgacgaagtgggtccgatcaagaccaagtccaagcgcgcgatccaccaggaagcgcctccctatgtcgaccagtcgaccgaagcggaaatcctggttacgggcatcaaggtcgtggacctgttggcgccttacgccaagggcggcaagatcggcctgttcggcggcgccggcgttggcaagaccgttcttatccaggaactgatcaacaacatcgcgaaggcgcacggcggttactccgtgtttgcaggcgttggcgagcggacccgcgaaggcaacgacctttaccacgaaatgatcgaatccaacgtgaacgtcgacccggccgaaaacaacggttcggccgaaggttcgaagtgcgcgctggtctacggccagatgaacgagcctccgggcgcccgcgcccgcgttgcgctttcgggtctgacgatcgctgaaaacttccgcgatgaaggccaggacgttctgttcttcgtggacaacatcttccgcttcacgcaggccggttcggaaatctcggctctgctcggccgtattccctcggccgtgggctatcagccgacgctgtcgaccgacatgggcgcgctgcaggagcgcatcaccaccacgaccaagggctcgatcacctcggttcaggcgatttacgttcccgccgatgacctgaccgacccgg

SEQ ID NO: 273300 - DNA, 484 bp, Unknown
  Bacterial polypeptide expressing nucleotide sequence isolated from the Sargasso Sea
caactaccagaaattttaacagcattagaatgtgataattctggtaataggctagtacttgaagtggcccagcatttaggggaaacttctgttcgaactattgcgatggatagtacggaaggtttaaaaagaggagataaagtcactgatactggttcgcccattaaagtacctgtaggaccagaaactttaggtcgaataataaatgttattggagaaccaatcgatcaaaagggcaaggtgtcaacaaaagaaagttggccaatacacagaccagcaccaaaatttacagaacaatgtacggaaacagagatactagttacaggaattaaagttgttgacctgcttgctccatattcaaaaggaggaaaaataggattgtttggaggagcaggagttggaaaaacggtaattataatggaattaattaataatattgcaaaggcaccatggaggcttttctgtttttgctggagttggtgaa

SEQ ID NO: 273301 - DNA, 355 bp, Unknown
  Bacterial polypeptide expressing nucleotide sequence isolated from the Sargasso Sea
atgagaaaaggaaaaattacacagattattggagcggtagtagatgttaaattcgaaggagaactaccagaaatattaaccgcattagagtgtgataatggtggtattagactagttttagaagttgcacaacacctaggagagtcaagtgtaagaacaattgctatggatgctacagaagggctaaaaagaggagacgaagtaacagatactggggccccaattaaagttcccgttggtcctgaaactttaggtagaattataaatgtaattggtgaacccattgatgaaaagggagaagttaaaactaaagaacattggcctattcatagatcagcaccagaatttactgacc

SEQ ID NO: 273302 - DNA, 790 bp, Unknown
  Bacterial polypeptide expressing nucleotide sequence isolated from the Sargasso Sea
ggtaatgatttatatcacgaaatgattgaatcaggcattattgatcttaaaggaaaagattctaaagttgccctagtatatggtcaaatgaatgaacctcctggagcaagagcaagagttgcactatcaggtttaacacaggcagaatattttagagatgaggaaggacaagatgttttattcttcgttgataatatttttagatttacacaagctggatctgaggtttcagcccttcttggacgtattccatctgccgttggttatcagccaacacttgcaactgatatgggtgcattacaagagcgtatcacgactactaaaaagggatctatcacatcagttcaggctatttatgttcctgcagatgacttaaccgatcctgctcctgcaacatctttctctcacttagatgcaacaacagttttgaatagagcaatttctgagaaaggtatttatcctgcagttgatcctcttgactcaacatcaagaattctagacccacaggttgtgggtgatgatcactatagagttgcaagagaagtgcaaagagttcttcaaacatataaaagtctgcaagatattattgcaattctaggtatggatgaattatcagaagaagataaactgactgtagcaagagcaagaaaaattgagaaatttttaagtcaacctttctttgttgcagaggtatttacaggttccccaggaaaatatgtagaccttgaagacacaataaaaagctttgatggtatagtaaaaggtgagtatgatcacatgccagaagcag

SEQ ID NO: 273303 - DNA, 751 bp, Unknown
  Bacterial polypeptide expressing nucleotide sequence isolated from the Sargasso Sea
tacgacccttgaagttcagcagcaattaggtgacggtgtagttagaactattgctatgggagccacagaaggtctaaaaagaggactaaccgcttcaagaactaatgctccaatttcagttccagtaggaccggaaacattgggtagaattgtagatgttttaggtaatcctatcgatgagaaaggaccaattggtgaaaaatcaaaaatgccaattcacagaaaacctccttcatatacagatcagtcagcatctaacgaggtccttgaaaccggcattaaagttattgatcttatgtgtccatttgctaaaggtggaaaaattggtttatttggtggagcaggtgttggtaaaacagtaaatatgatggagctcataaataatattgcgcttcaacattcaggtctttctgtttttgctggtgttggcgaaagaacaagagaaggaaatgatttttattatgaaatgcaagaatcaggagttgtaaatattgataatttaggtgaatcaaaagttgcgatggtttacggacaaatgaatgagccaccaggaaataggctgagagttgctttaactggattaactatggctgaaagctttagagatgagggtaaagatgttttattatttattgataatatttatcgttataccttagcaggtgttgaggtgtctgctcttttaggcagaatgccatctgctgttggatatcagccaacattggctgaggaaatgggagctctttcaaga

SEQ ID NO: 273304 - DNA, 903 bp, Unknown
  Bacterial polypeptide expressing nucleotide sequence isolated from the Sargasso Sea
tatggacattaacccttcagagataacaaaaattttaaaagaacaaattaaaaaccttggagaaaaagcagaagtttctgaaatagggaaggttttatctgttggtgatggtatagcaagggtttacggtttggacaatgtccaagctggtgaaatggttgagtttaaagatgggctgaaaggaatggcgctaaatttagaaagcgacaatgttggtgttgtgatttttggagacgacagatctataaaggaaggcgatacagtaaaaaggactggagctattgtagatgttccagttggcaaagaattacttggcagagtagtggatgcattgggaaatcctatcgatggtaaagaaagtttaaaaaaaaatataaaaagacagagagtagaagttaaggctccaggaataatccctagaaaatcagttagtgaaccaatgcaaactggattaaaagccattgatagtttgataccagtaggaagaggacagcgtgaattaataataggcgatagacagacgggtaaaactgccgttgctattgatacaattattaaccaaaaaaaaattaatgagtcagatgatgaaaaaaagaaactatattgcatttatgtagcgatagggcagaaaagatcgacagtagcccaaattgttaaaactctacaagatgcaggtgcgatggattatacaattatagtttcagctaccgcttccgatcccgcacctcttcaatttctagcaccttataccggatgtacttttggtgagtttttcagagacaacggtatgcatgccttaattatttatgatgatttatcaaaacaagctgttgcttatagacagatgtcgctttttataagaagactccaggaagagaacatatccgggagatgtattctatt

SEQ ID NO: 273305 - DNA, 731 bp, Unknown
  Bacterial polypeptide expressing nucleotide sequence isolated from the Sargasso Sea
tatggcaaatgaagatatagcttcaataataaaacaacaaattaagcaatttggtgatgatttaaaagtcgaacaaacaggaactgtaactgaggccggcgacggtgtagctagagtgcaaggattgtcaaatgttaaagctaatgaaattgttcaatttgaaaacgatgtttttggattagctttgaacttggaagaagatactgtaggtgttgtaatccttggtgattatcttggaatcaaagaaggtgacgaggtaaaaagtacaggaagaatagtagaagttcctgttgctcctgatatgattggaagagttttgaatccattaggacaaccagttgatggtaaagggaatataaattcttctgaaactatagaggttgaaaaaatagcacctggtgttgttgaacgtgaatcagttaatcagcctgttcaatttggagtgaaagttgtagatggtcttgtcccaattggaagagggcaaagagaactagttattggtgatagaggtacagggaaaacagctgtttgtattgatgcaataattaaccaaaaaggtggagatctcatatgtatttatgtttcgattggtcaaaaagcatctaaagttgcaaacatagtaaatcaattagaagttaatggtgctatggatcacactattgtagtaacagctaatgcttctgaatctgctgctcttcagtatttagctccttactcaggttgtgctatgg

SEQ ID NO: 273306 - DNA, 910 bp, Unknown
  Bacterial polypeptide expressing nucleotide sequence isolated from the Sargasso Sea
tatgtagcaatagttcaaaagcaatcttcaatggcccaggtggttagaactcttgagcagtatggcgcaatggaaaacacaattgtagtagtggctgcggcggctgatccggcaccaatgcaatatattgccccttttgccgcttgttccatgggcgagtatttcagagataggggagaggatgctctaattatttacgatgacctttctaaacaagccgttgcatatcgacagatgtctctattgctaagaaggccgcccggaagggaagcttaccctggtgacgttttctaccttcactcaagattgttagaaagagctgcaagggtgaatgaggaatatgttgaaaactacacaaatggtgaggtgaagggaaaaacaggttcgttaactgctctgccaataatcgaaactcaggctggagacgtttcagcatttgttcctacgaacgtaatttctataacagatggacaaattttccttgagtcctcattatttagttctggattaaaaccagccatggatcctggaatttcagtttcaagagtaggtggtgctgctcaggttcctataattaaaaagcttggtggcggaattaaaacagcacttgctcaatatagagagttagaggcttttgcccaatttgcttcagatcttgatgaggcatccaaagagcaattagagcatggtgtgagggttacagagctgacgaaacaagatcagttttcaccaatgtctgtagctgaaatgggtctaatgctttacacggccaatgaagggtatctaaggcaggttgaggtcgaaaaaatcaaagactttgaaaagagcttaatagcctatatgagttccgagcataaagatcttatggataaggtatcagaaaccggagaatacggagacgatattcaaa

SEQ ID NO: 273307 - DNA, 491 bp, Unknown
  Bacterial polypeptide expressing nucleotide sequence isolated from the Sargasso Sea
gattattggcgatcgtcattataatgttgcgcgtgatgttcaaggggttcttcaaaagtataaagatcttcaagacattattgcaatcctcggcatggatgagctttctgatgaggataagcttactgtttcccgtgctagaaagatccaaaaattcttttcacaaccatttttcgtggctgaacagttcaccggtactccagggcgctatgttgaattagaagatactgtttctggttttgaggcaattctaaatggtgaagctgacgaaactcctgaaaactcatttgcttatgttggttctattgatgaggctattgataaaggtaaagaagagtcttcttcaaaggataaaaattctaaaaaagaaaaatctaaagaagaaaaagaatcaccagtagaagaagcgcctgcagaggaatcacctgtagaggaagtaccagcagaagaagcatcagcagaggaatcttctgaagaagaatcctcttaat

SEQ ID NO: 273308 - DNA, 606 bp, Unknown
  Bacterial polypeptide expressing nucleotide sequence isolated from the Sargasso Sea
gacgtatgccttctgctgttggttatcagccgactctagctacagaaatgggtgctcttcaggagagaatcacaactaccaaagatggatcaataacttctgttcaggctatttatgtgcctgcagacgattacacagatcctggtgttgttactgcgtttgcacatttggatggacgaattgtgctagagcggtcgttagctgatcaaggcctttacccagctgtagatcctctggcttcctcgtcgcgtatattggatccgcgggtagttggtgaggatcattaccttgttacacagcgtgttcaggaggtacttcaaagatatcgtgatttgcgtgagattattgctatcttgggtatagatgaattgtctgatgaagataaattggttgttgccagggccagaaaaatccagtttttcttaacacaacctttccatgttgctgaggtttttacgggtacgcccggtgcttatgttaaggtagaagatacggttcgcggttttaaaggtctagttgatggtgattatgacgatgtgccagagcaggctttttacatggtagggacgatagaagaggcattggaaaaagccaagggaatgtaat

SEQ ID NO: 273309 - DNA, 736 bp, Unknown
  Bacterial polypeptide expressing nucleotide sequence isolated from the Sargasso Sea
ctggttttaacggttgctgagtattttagagacaaagaaggccaagacgtactattttttgtcgacaatatttttaggtttacccaagctggatcggaagtatctgctttgctagggaggataccttcagcggttggatatcaacctactctagcaactgatatgggtaatcttcaagaaagaattacctcaacagacaaaggatcaatcacttcggtacaggctatttatgttccagcagatgatttaacagatccagcacctgctacatcattttcacatttagatgctacaacagtattatcaagacaaattgcagagatagggatttatcctgctgtagatccactagactcaacctcaagaattttagatcctagagtagttggtgatgaacactatagagttgctagagatgttcaaagaatacttcaagcatacaaatctttgcaagatatcatagctattcttggaatggatgaactgtccgaagatgacaaattaactgttgctagagctagaaaaatacaaagatttttatcacaaccgttttttgttgctgaagtatttacaggctctccaggaaaacttgtggatctcgactcgacaataaaaggctttgacgcaatttgtaaaggagagtacgaccatttgcctgaggcagctttttatatggttggtggaattgaagaggttgttgaaaaagcagaaaagttaactaaagaaagcaagtaat

SEQ ID NO: 273310 - DNA, 358 bp, Unknown
  Bacterial polypeptide expressing nucleotide sequence isolated from the Sargasso Sea
tatgaaaattcgagcagaagaaatcagtaacatcatccagcagcaaatcgaaaatttcgagaagcagaccaccaaaaccgaagtaggaaccgtcttggaagtcggtgatggaatcgcacgagtctatggacttgacaatattgttgccggcgaacttgtggaattccccaataaccttcaaggcatggccctcaatctggaagaggataatgtcggtgttgtactttttggtgatgaccgaaacatcaaggaaggagacgaagctcgacgaactgagcggatcgcagaagttcctgtcggtgatgccatgctcggtcgggttgtggaccctcttggacaaccgattgatggcaaagga

SEQ ID NO: 273311 - DNA, 952 bp, Unknown
  Bacterial polypeptide expressing nucleotide sequence isolated from the Sargasso Sea
tttggaggagctggagttggaaaaactgttttaatcatggagttgatcaacaatgttgcgaaagctcacggaggtttttcagtttttgcaggcgttggtgaaagaactagagaaggaaatgatctttatcatgagatgatagaatctggagtaatcaaaaaagatggggacggatcaaaagctgctttagtatatgggcagatgaatgaacctcctggagcaagagctagagttgcacttacaggactaactgtagcagaatattttagagatcaggaaggacaagacgttctttttttcgtggataatatttttagatttactcaagctggttcagaagtatcagctcttttaggaagaattccttctgccgtgggatatcagccaactttggctaccgacatgggtaatcttcaagagagaattacaactactaacaaaggatcaattacttcagtacaggcaatttatgttccagctgatgacctaactgatcctgctcctgcaacttcatttgctcacttggatgcaacgactgtactttctagacaaattgcagaaattggtatttacccagcagttgatccattagattctacttcaagaattttagatccaagaatcgttggagatgaacattatagagtagctagagatgtgcaaaaaatattacaatcttataaatcgctgcaagatattattgctattcttggtatggatgagttatctgaggaagataaattagttgtcgcaagagcaagaaaaatacaaagattcttatctcaaccattttttgttgctgaagtttttacaggatcacctggaaaattagttgacctggaatcaacaatcaaaggtttcgatgctatttgtaaaggtgaatatgaccatttacctgaagccgctttttatatggttggtacaattgaagaggctatagaaaaaggagaaa

SEQ ID NO: 273312 - DNA, 694 bp, Unknown
  Bacterial polypeptide expressing nucleotide sequence isolated from the Sargasso Sea
gatggaaattaatccttcagaagttacaaaaatattaaaagaacagataaaaaaatatggagataaagcagaagtaaccgaagttggccaggttttatctgttggagatggtatcgctagaatttatggtctcgataatgttcaagcgggtgaaatggtagaattttctgatggatctaaaggtatggcattaaatttagaaagcgaaaatgttggtgttgtaatttttggagatgataaagcaattaaagaaggagacactgttaaaagaacaggtgcaattgtagacactcctgttggaaaagaattacttggaagagtagttgatggactaggaaatccaattgatggaaaaggagtattaaacaaagaagttaaaagaagcagagttgaagtaaaagcaccaggaattattccacgtaaatcagttagcgaaccaatgcaaacaggacttaaatctattgatagtttggttccgattggaagaggacaaagagaactaattattggcgacagacaaacaggtaaaacagcagttgctattgatgcaattataaaccaaaagaaaataaatgagtccaatgatgagaaacaaaagttatactgtgtttatgtagctataggtcaaaaaagatctacagttagacaaattgaaaaaacattagaagaagcaggagcaatggagtatactact

SEQ ID NO: 273313 - DNA, 888 bp, Unknown
  Bacterial polypeptide expressing nucleotide sequence isolated from the Sargasso Sea
agacaaactggaaaatctgcgattgctattgacacaataatcaaccaaaaaggtcaagacgtagtctgtgtttacgtagctattggtcagaagtcagcatcagtagcaaacatcgtagaggttttaagagagagaggagccctagactatacagtcgtagtaagtgcaggagcctcagaaccagctgctttacagtacttagcaccttataccggtgcagcaattgctgaacattttatgtatcagggtaaagcaacacttgttatttatgatgatctaacgaaacaagctcaggcttatagacaaatgtctcttcttttaaaaagaccaccaggaagagaggcttatccaggagatgttttctacctacacagtagattgttagaaagagcagcaaaactttctgatgctatgggagggggatctatgacagctcttccaattattgaaactcaggcaggggacgtttctgcttacatcccaactaatgttatttcaattacagatggacaaatattcttgagtgcagatttatttaactcaggattaagaccagctattaatgttggtatttctgttagccgagttggaggagccgctcagacaaaagcaattaaaaaaattgcaggaactttaaaattagaactcgcacagtttgatgaactagctgctttttctcaatttgcatctgatcttgatgaagcaacacagcaacaacttgaacgaggcaaaagactaagagagttattaaagcaacctcaattctctccactgaatcttgcagaacaagttgcagttgtttatgcaggagttaaaggtcttatagatgaagttcctgttgaagacgttactaaatttgcaactgaacttagggaatacctaaagtaa

SEQ ID NO: 273314 - DNA, 256 bp, Unknown
  Bacterial polypeptide expressing nucleotide sequence isolated from the Sargasso Sea
tatgttcacccaactccgattatggcttcctttcaaaattctagaggattttacgaaacctttatcactctcattcaggctatttggaaatattttggctgatgaacttgttgttggtgttctagtctttttggttccgctcattctcccaatacctgttatgtttctaggattgtttactagtgcaattcaggcattgattttcgcaactttggcggcctattacattggagaagctgttgaagaacatcattag

SEQ ID NO: 273315 - DNA, 979 bp, Unknown
  Bacterial polypeptide expressing nucleotide sequence isolated from the Sargasso Sea
ggtacgtggtatggacgttgttcaacaagtgctccaattacagttcctgttggaccagaaacattaggtagaattcttaatgttattggtgatccagtagatgatggtaagccggttaagtccaaaataacattacctattcatagagatgctcctgaatatgttgatcaatccacttctgctgacattttagtaacaggaataaaagtggttgaccttttagcaccttatgcaaaaggaggtaaaatcggactttttggtggtgctggtgttggtaaaacagttttaattatggagcttataaataacgtagctaaagcacacggtggatattctgtgtttgcaggtgttggagaaagaactagagaaggaaatgatcttttccatgaaatggtagaatctggagttattgttccagatggtccaggttcaaaagcagcacttgtatatggacaaatgaatgaacctcctggagcaagagcaagagtagctttaacaggattaacgttagctgaatattttagggatcaagaaggtcaagatgttcttttttttgttgataatatttttagatttactcaagctggatctgaagtttcagctttattaggaagaataccatctgctgtaggatatcaaccaacgttggctacagacatgggagcacttcaagaaagaattacaactacgacaaaaggatctattacttctgtgcaggcaatatatgttcctgcagatgatttaactgatccagctcctgctacatcatttgctcacttagacgctacaactgttttatcgaggcagatagcagagataggaatttatcctgctgttgatccattagactcaacttcaagaatgctagatcctagaattgttggtgaagagcattatgaaagtgcaagaaaagttcaagaagttctttcaacatataaatcatttacagatattattgcaattttaggggatggatgaa

SEQ ID NO: 273316 - DNA, 205 bp, Unknown
  Bacterial polypeptide expressing nucleotide sequence isolated from the Sargasso Sea
caacctggcagcgtgaccgtactggctgataccgcgattcgcgggcaggatctcgatgaagcgagagccctggaagcgaaacgtaaggctgaagagcatattaagagctctcatggtgacgtggattacgctcaggcatctgcggaactggccaaagcgatcgcgaaactgcgcgttatcgagttgaccaaaaaagcgatgtaac

SEQ ID NO: 273317 - DNA, 422 bp, Unknown
  Bacterial polypeptide expressing nucleotide sequence isolated from the Sargasso Sea
ttcagaattagggatctatccggcggttgatccgtgggactcatcgtcgcgtcttatggaccctgcggtgtttggagaggaacattatcaggtcgctagggacgtccagggtattcttcaacgctacaagtctttgcaggacattatcgcaatcctaggaatggatgaattaagtgaagaagataaattgactgtggcgcgagcacgaaaaatacagcgatttctttcccaaccatttgatgttgcaaaagtattcacgggctctgatggcgtgcaagtgccgcttgaagatactatttcgtcatttaaagcggttgttgctggtgaatatgatcaccttccagaaggagcgttttacatggttggtggcattgatgaagttattgctaaagctgaaaagatggcggccgaagcggcctgag

SEQ ID NO: 273318 - DNA, 307 bp, Unknown
  Bacterial polypeptide expressing nucleotide sequence isolated from the Sargasso Sea
aatgagcaaaagtggaaaaattattcaagtaattggagctgtagtagatgtgcagtttgaaggggatctacctgaaatattaacagctcttgaagtggataatagtggaaacaaactaatattggaagttgcgcaacatctaggagaaaatagtgttagaacaatagcaatggatagtacagaaggtttaaagagaggagatccagttcaaaacacaggtgctccaataagcgttcctgttggaccagaaacattagggagaataataaatgttataggtcagccaattgatcaaaaaggcgaggtt

SEQ ID NO: 273319 - DNA, 761 bp, Unknown
  Bacterial polypeptide expressing nucleotide sequence isolated from the Sargasso Sea
aatgagcgatagtttaggcagagttgtaaaaattgcaggtccagtcgttgacgttgcatttgcacaagattctttgccagaaattacaaatgcacttgaagtagatgttgaaattgatggttctaaaagcacaatcgttttagaggttgcacagcaccttggagaaggaagagttcgtgcaatttctatgcaaggtacagatggtttacgtagaggtgcagaagtctctgatacaggagctcctatatcagtccctgttggacaagaaactttaggtcatatattcaatgtttggggtgaaacattagatgtggagacaagctcaattggtgtaaaacaaaaatggccaattcatagacaaccacctccatatgaagaagtaactgctcaaaatgaaatgttcgagacaggaattaaagttattgatcttttaatgccatatgttcaaggcggaaagattggtctattcggtggtgctggtgttggtaagacagttcttattcaagaaatgatcaacagagtagcaacacaacacggtggtgtatcagttttcgctggtgttggagaaagaacacgtgaaggtaatgacttgtttagagaaatgcaagaatctggagttattgataaaactgcacttgtatttggtcaaatggacgaaccacctggagttagattaagagttgcattgtcagcacttactatggctgaatatttcagagatgaagaaaagcaagacgttctattgtttattgataacattt

SEQ ID NO: 273320 - DNA, 365 bp, Unknown
  Bacterial polypeptide expressing nucleotide sequence isolated from the Sargasso Sea
cccaagagttgtgggagacgaacactacaaggtagcaagagatgtccaaaaaatattacaatcttataagtctcttcaagatattattgcaattcttggtatggatgaattatctgaagaggataaattagtagttgctagagccagaaaaatccaaagatttttatctcaaccgttttttgtagctgaagtttttactggttcacctggaaaattagttgatttagaatcaaccatcaaaggtttcgatgctatttgtaaaggtgaatatgatcatttaccggaagcagcattttatatggttggtactattgaggaagcaattgaaaaagctaagaaaatggaaaaagaagcggctgcttaat

SEQ ID NO: 273321 - DNA, 924 bp, Unknown
  Bacterial polypeptide expressing nucleotide sequence isolated from the Sargasso Sea
tgaagtttctgaagttggtcaagtactttcagttggagatggtatagcaagaatctacggattagataatgtacaagctggtgaaatggtagaattttctgacgggtcaaagggaatggcattgaatcttgagaatgataatgtaggagtagtaatatttggtgacgataaggcagttaaagagggcgatacagttaaacgaacgggggcaattgttgacaccccagttggtaaggagttattgggtagggtagtagacggattaggaaatcccatagatgggaaaggagcattagacaaaggtattaaaagaagtagagtagaagtaaaagcgcccggaataatacctagaaaatcagttagtgaaccaatgcaaacaggtttaaaatctattgatagtttagttcccattggtagaggtcaaagagaacttataatcggagacagacagacaggaaaaacagcagttgcaatcgatgctattataaatcaaaaaaaaataaacgagtctgatgatgaaaaacaaaagctttattgtgtatatgttgcaattggacaaaaaaggtcgactgtaagacaaatagagaaaaccttagaagaggctggagcgatggattacacaaccattgtagcagcgacagcatctgatgctgctccacttcagtttttagctccttatacaggttgtgcgatgggtgaatattttagagataatggtatgcatgctctcattatttacgatgacttatcaaaacaagctgttgcttatagacaaatgtcacttttattaagaaggccaccaggtagagaagcatatcctggtgatgtattttatttacatagtagattattagagagagcagctaagttaagtgatgaacatggaggaggttctttaactgcattacctattattgaaacaca

SEQ ID NO: 273322 - DNA, 628 bp, Unknown
  Bacterial polypeptide expressing nucleotide sequence isolated from the Sargasso Sea
atgcaaataaacccatcagaagttacaaaattattaaaagaacaaatcaaaaattttggtgaaaaggcagagatttctgaaattggaaaagttttatctgttggggacggtatagcgagagtttacgggctagacaatgttcaagcaggcgaaatggttgaatttgacgatggttctaaaggcatggcattaaaccttgagaatgataacgttggagtagttatatttggtgacgacagacaaattaaagagggagataccgtaaaaagaaccaactcaatcgttgatgttcctatagggaaagaattattaggacgagtcgtagatggattgggaaatcccattgatggcaaaggaaatctttctacaaaagttcagagaaaaagagtagaagttaaagctccgggtattataccgagacagtcagttaatgaaccaatgcaaactgggttaaaagcgatagacagtttgatacctattggaagaggccaaagggaattaattattggagacagacaaactggaaaaactgcagtagctatagatacaattataaatcaaaagggaatcaatgattctgatgatgaaaagaaaaaattatattgtgtttatgtagctatggacaaaa

SEQ ID NO: 273323 - DNA, 523 bp, Unknown
  Bacterial polypeptide expressing nucleotide sequence isolated from the Sargasso Sea
atcacatctatacaggctgtttatgttccagccgatgacttaacagacccttctccagcaacaacttttgctcacttagatgcaacagttgtgttatcaagaagaattgccgagttaggaatatatcctgctgttgatcctttagattcaacctctagacagcttgatccaatggttgttggccaagaacattatgaagttgcgcagagagttcagggtgttctacaaagatataaagagcttaaagatattattgcaattttgggcatggatgaattatctgatgaggataaaaatacagtttcaagggcaagaaaagttgaaaagtttttgtctcaacctttctttgtagcagaagttttcacaggttcaccaggcaaatatgtatcagttaaagacaccattcaaggctttaaagaaatattagatggcgttcatgacgatgttcctgaacaagcattttatatggttggctccatagatgaagttttagaaaaagctaaaactgtaaaaaatgattgat

SEQ ID NO: 273324 - DNA, 880 bp, Unknown
  Bacterial polypeptide expressing nucleotide sequence isolated from the Sargasso Sea
gttggaacagtattaagtgttggagatggtattgcacgtgtgtatggtcttgatcaagtacaagctggtgagatggtggaattcccaggtggcattaaaggtatggcccttaaccttgaaatggataatgttggtgtttcaatcttcggtgatgatactggaataaaagaaggtgatactgtcaaacgtacaggagaaattgttgatgttcctgtgggaaaagaattgttaggtagagtcgttgatggtttaggaaatcctattgatggtaaaggccctattcaatcctctgaaaaaagaagaattgaattaaaggcaccaggtattattccacgtcaaagcgtatcagagcctatgcaaacaggtatcaaagcacttgatgcccttgttcctgttggaagaggacagcgtgaattaattatcggtgatagacaaacaggaaaaacagctgttgctatagatacgatattaaaccaaaaatctgttaatcaatcagacaatgaaaaagataaattatattgtatttatgtcgcgattggtcaaaaaagatcaacggtagcacaaattgttaaaacactagaagataatggtgctatggaatacacaattgttgtatctgcaactgcatcagaacctgctccacttcagtttttatcagcctatactggttgtacaatgggtgagtactttagagataacggtatgcatgcattaattgtttatgatgatttatccaagcaggctgttgcttacagacaaatgtctttattactaagaagacccccagggcgtgaagcatatcctggagatgttttttatattcacagccgtcttttagagagagctgcaaaaatgagtgatgagcacggaggggaagtta

SEQ ID NO: 273325 - DNA, 685 bp, Unknown
  Bacterial polypeptide expressing nucleotide sequence isolated from the Sargasso Sea
atggatattaaagctgcagaaatatcttctatactaaaggatcaaatagataattttggtgttgaggctgaagtaactgaaataggcaaagtattatcagtaggagatggaattgctagagtttatggactagacgaaatcaaagctggtgaaatggtagagtttgatggtggtattgcaggaatggcattaaacttagaaaaagataacgtaggtgttgtaatatttggtagtgataaagatatcaaagagggagatactgtaaaaagaactggtgcaattgtagatgttcctactggaaaaggattattaggaagagtggttgatgctttaggtaaccctattgatggcaaaggtccacttaaaaatgttactaaaacaagagttgaaactaaagcacctggaattatgccaagacaatcagtaaatgaaccaatgcaaactggactaaaagctatagactctcttatcccgataggtagggggcaaagagaattaattattggtgacagacaaactggtaaaaccgctattgcaatagatactttcttgaatcaaaaagcggttaacgatgcggctggcaaagaagatagtaagaaacttttttgtatatatgttgctgttggtcagaaaagatccactgttgcgcaaattgtaaaaacttggaggaaaatggtgctctaga

SEQ ID NO: 273326 - DNA, 476 bp, Unknown
  Bacterial polypeptide expressing nucleotide sequence isolated from the Sargasso Sea
tgctccagctacaacttttgcccatttagatgcaactaccgtgcttgctagagctcttgcagctaagggaatttatccagcagttgatccattagactcaacgagcactatgctacaaccatcagttgttggcgatgagcattacaaaacagccagagctgttcaatcaactttacaaagatacaaagaacttcaagatattattgcaattcttggtttagatgagctttctgaagaagatagattaacagttgacagggccagaaaaattgaaaaatttctctcacaacctttcttcgtagcagaaatatttacaggaatgtctggtaaatatgtaaaattagaagataccattgctggtttcaatatgattttgtcaggtgaattggatgatttaccagagcaggctttttacttagttggtaatattgatgaagttaaagcaaaggctgaaaaaataaaatcagaaaaataaa

SEQ ID NO: 273327 - DNA, 514 bp, Unknown
  Bacterial polypeptide expressing nucleotide sequence isolated from the Sargasso Sea
attcctacaaatgtaatttctattactgatggacaaatatttttagaaactgaattatttaaccaaggaataagacctgctgttaacgttggtctatcagtatcgcgagtaggatctgcagcacaaactaaagcgatgaaaaaagtagctggctcaattaaattagaacttgctcaatatagggaaatggcagcatttgctcaatttggctcagatttagatgcttcaactcaacaattacttaaccgaggagcaaaattaacagagttattgaaacaagatcaatactccccaatgacagttgcagaacaagtaatttcagtttttgctggagtaaaaggatatttggacgatgttgatttaggtaaaataaaaggatttgagaaagatataatcgaaaaaatcagaaatgataaaccagaaattattgaagctattcaatcatcaggaaaactagatgaagacacagaaaatcaattaaaacaagttatagagaaatataagaaaaaataat

SEQ ID NO: 273328 - DNA, 322 bp, Unknown
  Bacterial polypeptide expressing nucleotide sequence isolated from the Sargasso Sea
atgcctagtttagatgatctaaaaaaaagaattaaaagtgtaaaatctacccaaaaaattactaaagcaatgaagatggttgctgcagcaaaacttaggaaagctcaagaaagcgcagagaaaggcagaccttatagtcaaaaaatgcaaaacataatattgaatttgactaaatccattaacgatcctcaaaatgcaccgaaactgctagtaggaacaggagaagataaaaagtatttgtgtgtagttttaaccgctgacagaggcctttgtggaggatttaattcaaatatttgtaaattagctaaaactaatttaaaaa

SEQ ID NO: 273329 - DNA, 686 bp, Unknown
  Bacterial polypeptide expressing nucleotide sequence isolated from the Sargasso Sea
tatgagaaaaggaaaaataactcaaatcattggagcagttgtcgatgtaagttttgaaggagaattacccgaaattttaactgcactcgaatgtaaaaatgctgggaacaggttagttttagaagtagcccaacatttgggagagtctagtgtgagaaccattgctatggactctacagagggtcttaaaaggggagatgaagtaacagatacaggcgcaccaattaaagtaccagttggaccagaaactttaggaagaattataaatgtcattggtgaacctattgatgaaaaaggtgatgttaagagtaaagaaaattggccaatacatagagcggccccagaatttaatgatcaatctacagagactgaaatattagttacaggtattaaagtaattgatcttttagcgccatatgcaaaaggtggaaaaattggattatttggtggtgcaggtgttggaaagactgttttgattatggaattgataaataacgttgctaaagcacatggtggcttttcggtttttgcaggtgtaggagaaagaactagagaaggaaatgacctttaccatgagatgattgactcaggagtaattaagccagagggcaaaggttcaaaagctgcattagtctatggtcaaatgaacgagcccccaggagcaagagcaagggtcgcgttaactg

SEQ ID NO: 273330 - DNA, 630 bp, Unknown
  Bacterial polypeptide expressing nucleotide sequence isolated from the Sargasso Sea
atctttagaagatgcaggagctatggaatatacaactattgtttcggcaacagcttcagatcctgctccacttcaatttttagcaccatacactggatgcacaatgggagaatattttagagataatggcatgcatgcattaataatttatgatgatttatcaaaacaggcagttgcttacaggcaaatgtcacttcttttaagaagacctcctggaagagaagcctacccaggagatgtattttatttacacagcagattgcttgaaagagcagctaaacttaacgatgataatggaggaggttctttgacggccttaccaataattgaaactcaagcaggtgatgtttccgcgtatattcctacaaatgtaatttcaattacagatggacaaatttttttagaaacagaattatttaaccaaggtataagacctgcagtaaatgttggattatcagtttctagagtaggttcagctgcgcaaacaaaagctatgaaaaaagtggcaggttctataaagttagaacttgcacaatatagagaaatggccgcgtttgctcaatttggttctgatttagatgctgccacccagaaattactaaacagaggatcaaagttaactgaactttt

SEQ ID NO: 273331 - DNA, 399 bp, Unknown
  Bacterial polypeptide expressing nucleotide sequence isolated from the Sargasso Sea
aagtaaaagcaatgaaacaagtagcaggtaaacttaagcttgaacttgcacaatttgctgaacttgaagcattctctcaattcgcatcagatttagataaggcaacacaaaaccaacttgctcgtggtcaacgtttacgtgagctattaaagcaaccacaaaactcgccactttcagtagcagagcaagttgctattgtatacgcaggtctaaacggttacatcgatgagattcctgtaggaagtgttaaaacatttagtgcaaacctaatttcatacttaaagacatctaagcctgaatatggtaacgcaattgcttcttctgcaaaactagaagaatcaactgaaaatatcttaaaatcagctatcgaaactgttcgagaaggtgtattagcataga

SEQ ID NO: 273332 - DNA, 691 bp, Unknown
  Bacterial polypeptide expressing nucleotide sequence isolated from the Sargasso Sea
gtacttttcttcgtagataatatttttagatttactcaggcaggatcagaggtttcagctttgttaggaagaattccatctgctgttggatatcaaccgacactagctactgatatgggtaacctacaagaaagaattacaactacaaacaaaggatcaattacatctgtacaagcaatttatgtacctgctgatgatttaacagatcctgctccagcgacatcgtttgctcacttagatgcaacgactgtactttcaagacaaatcgcggaaattggtatttatcccgcagtagatccacttgattctacatcaagaattttagatccgagaattgttggagatgagcattatagagtagcaagagatgttcaaagaatactgcaatcatataaatcactacaagatattatagctattcttggtatggatgaattatctgaagaagataaactcgttgtagcaagagctagaaaaatccaaagatttttatctcaaccatttttcgttgcagaagtatttactggttcaccaggaaaacttgttgatcttgactcaactatcaaaggttttgatgcaatctgtaaaggtgagtatgatcacttacccgaagctgctttttatatggttggtacaatggaagaagctatagaaaaagctaagaaaatggaaaaagaagctgctgcttaat

SEQ ID NO: 273333 - DNA, 679 bp, Unknown
  Bacterial polypeptide expressing nucleotide sequence isolated from the Sargasso Sea
actaaaatattaaaagaacagattaaaaaatttggagataaggcagaagtgactgaagttggacaggttttgtccgttggcgatggtattgctagaatttatggtttggataatgttcaagcgggagagatggttgaattttctgatggttcaaaaggtatggctttaaatctagaaagcgataatgttggtgtggtaatttttggtgatgatagagctgtaaaagaaggtgatatagtaaaaagaacaggagcaattgtagatactcctgtaggaaaagaattattgggaagagtagtagatggattaggaaatccaatagatggtaaaggggcattggataaaggcataaaaagaagtagagttgaagttaaagcaccaggcataattcccagaaaatctgtaagtgaaccaatgcaatcaggacttaaatctgttgatagtttagttcctattggaagaggtcaaagagaattgattattggcgatagacaaacaggaaaaactgcagttgcaattgacactataattaatcaaaaaaaaataaatgaatcaaatgatgaaaaacaaaaactatattgtatttatgtagcaattggtcaaaaaagatcaactgtaagacaaatagagaaatctttagaagaagctggagctatggaatatacaacaatagttgcag

SEQ ID NO: 273334 - DNA, 714 bp, Unknown
  Bacterial polypeptide expressing nucleotide sequence isolated from the Sargasso Sea
tatgagtaagggaataataacacaagttattggtgcagtagtggatgtgaaatttgatggtgaattaccagaaatcttaacagctttagagtgtaaaaatagtggtaatagacttgtattagaggttgctcaacatttaggtgagtcgactgctagaacaatagcaatggatgcaacagaaggattaaaaaggggggacgaggtaataaataccaacgctccaataaaggtacctgttgggccagaaacgttaggaagaataataaatgtagtaggtgaaccaatagatgaaagaggagaagttaaaactaaggaaaactggccgattcatagaccagcgcccgaatttaatgaccaatcaactgaaactgaaatactcgtaactggtataaaagtaattgatttattagcaccttacgccaaaggtggaaaaattggattatttggaggagcaggagttggtaaaacagttttgattatggaacttattaataacgttgctaaagcacacggtggattttctgtttttgccggtgtaggagaaagaacaagagaaggaaacgacttatatcatgagatgatggaatctggtgtaattaaacctcaaggtcctggttctaaagcagctttagtatacggtcaaatgaacgaacctcctggagcaagggcaagggtagcattaacgggattaactgtcgctgaatatttcagaga

SEQ ID NO: 273335 - DNA, 926 bp, Unknown
  Bacterial polypeptide expressing nucleotide sequence isolated from the Sargasso Sea
tttggaagttcctgttggtgaagagctcttaggaagagttgttaatactcttggaactcctatagatggaaagggcgagataaaagctgaaaaatcattgcctgttgaggttgttgctccaggtgttattgcaagacaatcggttgatcaaccagttcaaatcggtttaaaagcggttgatgcaatggttccaattggaaggggccaaagagaattgataattggtgacagacaaaccggaaaaacagctgtagctgttgacgcgataatcaaccaaaaaggaactggaataaaatgtatctatgttgctattggtcaaaaacagtccacggttgcaaacgttgttagaaaacttgaagaatatggcgcaatggaacacaccattgttgtctcagcaacagctgctgatcctgctcctatgcaatacttatcagcctatgctggttgcacaatgggtgaatattttagagataagggtgaagacgccctaattgtatacgatgatctttctaaacaagcggttgcatacagacaagtgtctttattgctgaagaggcctcctggtagggaagcttatcctggcgatgttttttaccttcactcaaggttgttagaaagagctgcaagagttaacgctgaatatgttgaacaggttaccggcggtaaagtaaaaggtaaaaccggttccttaacagcattaccaattattgagactttggctggtgatgtttctgcattcgttccaacaaacgttatatctattactgatggacaaatatatttagaaacagaactatttaattctggtgtcagaccagccattaatccaggcctttcagtttcaagggttggaggctcagcacaaacaaagattatgaagaaattagcaggtggagtaagaacagctttagccccagtatcgtgaa

SEQ ID NO: 273336 - DNA, 310 bp, Unknown
  Bacterial polypeptide expressing nucleotide sequence isolated from the Sargasso Sea
aatggtagcaactccatcaacttcttcacaaactaaaggcatagtgcgtcaggtaattgggccagttctagatgtagaattcccagccgggaaattgccaaaaatattaaacgctttacgaatcgaagctaaaaatccagctggacaagaaattgcgctcacagcagaggttcagcagctccttggtgaccatagggttagagcagtagcaatgagtggcacagacggtcttgtaagaggcatggaggcaatcgacacaggtgcgccaatatctgtacctgtaggagaagctactttaggaagaatattt

SEQ ID NO: 273337 - DNA, 484 bp, Unknown
  Bacterial polypeptide expressing nucleotide sequence isolated from the Sargasso Sea
ttccttgaaacagaactatttaaccaaggtataagacctgcaattaacgtaggtttgtcagtatctagggttggttcatcagctcaaacaaaagcgatgaaaaaagtttctggttcaatgaaattagagctagcacaatacagagaaatggcagcttttgctcaatttggatctgatttagatgcgtctacccagcaacttttgaatagaggctctaagttaactgaacttttaaaacaaaaacaatattcacccatgactgttgcagaacaagttatttcagtattttgtggagtaaaaggttatctggatgatattgatttaaaaaacgttgctgaatttgagagcaagattattgaaaaatgtaaatcagataaacctgaaattatcgagtcaattttaaattcaggaaaacttgaagaagataaagaaaaattacttgttgaggtaattactcaacttaaaggaaattttaaatcttaat

SEQ ID NO: 273338 - DNA, 850 bp, Unknown
  Bacterial polypeptide expressing nucleotide sequence isolated from the Sargasso Sea
gttgttagtgcaggagcttcagaaccagctgctttacagtacttagcaccttataccggtgcagcaattgctgaacattttatgtatcagggtaaagcaacacttgttatttatgatgatctaacaaaacaagctcaggcttatagacaaatgtctcttcttttaaaaaggccaccaggaagagaggcttatccaggagatgttttctacttacacagtagattattagaaagagcagcaaaactttctgatgctatgggagggggttcaatgacagctcttccaattattgaaactcaggctggggacgtttctgcttacatcccaactaatgtcatttcaattacagatggacaaatattcttgagtgcagatttatttaactcaggattaagaccagctattaatgttggtatttctgttagtcgtgttggaggtgccgctcagacaaaagcaattaaaaaaattgcaggaactttaaaattagaacttgcacagtttgacgaattagctgctttttctcaatttgcatctgatcttgatgaagcaactcagcaacaactagaaagaggcaaaagactaagagagttattaaaacaacctcaattctctccgctaaatcttgcagaacaagttgcagttgtttatgcaggagttaagggtcttattgatgaggttcctgttgaagatgttactaaatttgccactgaactaagggaatacctaaagttaaataaatcagaatttatagaagaaattcttaaagaaaagaaattaaatgatggattagaagcaactctaaaagaggtgataaatgaagttaaatcatcaatgcttgccacagtttaaa

SEQ ID NO: 273339 - DNA, 883 bp, Unknown
  Bacterial polypeptide expressing nucleotide sequence isolated from the Sargasso Sea
ggtttagacaatgtgcaagcaggggaaatggttgagtttgaagatggatctaaaggaatggctctaaatttagaaagtgataatgtcggcgtagttatctttggagacgatagaaaaattaaagaaggcgatacaattaaaagaacgaacgcaattgtagatgttccagtaggcaaagaacttttaggaagagtagtagatggactgggaaatcctatagatggtaaaggtcctctttctgctaaaaatagaaaacgtgttgaagtaaaagcgcctggtattattcccagacaatctgttagtgagcctatgcaaacaggtttaaaatctatagactctcttatacccatcggaagaggacaacgtgaattaatcattggtgacagacaaactgggaaaacagcagtagcaattgatgcaattattaatcaaaaaaaaataaatgagtcttcagatgaaaagaaaaaattgtattgcgtatatgttgcgattggtcaaaaacgttctacggtagctcaaataacaaaaactttagaagaagcaggcgctcttaaatatacaactatagttgcggctacagcttctgactctgcgccattacaattcttagcgccttatacaggatgcactataggtgagtattttagagataatagtatgcatgctttaattgtttatgatgatttgtcaaaacaagcagttgcttacagacaaatgtcattattattaagaagacccccgggaagagaagcgtatcctggggatgtattttatttacacagtagattgttagaacgtgcatcaaaattaaatgataaaagtggcggaggttcattaacagctttacctatcattgagacgcaggcgggagatgtttcagcgt

SEQ ID NO: 273340 - DNA, 580 bp, Unknown
  Bacterial polypeptide expressing nucleotide sequence isolated from the Sargasso Sea
tatgacagctctcccaattattgaaactcaggcaggggacgtttcggcttacattccaactaatgttatttctattacagatggacaaatattcttgagtgcagatttatttaactcaggattaagaccagctattaatgtaggtatttctgttagccgtgttggaggagccgcgcagacaaaagcaattaaaaaaattgcaggaactttaaaattagaacttgctcagtttgatgaactagctgctttttctcaatttgcatctgatcttgatgaagcaactcagcaacaacttgaaagaggcaaaagattaagagagttgttaaaacaacctcaattctctccgctaaaccttgcagaacaagttgcggttgtctatgcaggagttaaaggtcttattgatgaggttcctgttgaggatgttactaaatttgcaactgaacttagggaatacctaaagttaaataaagcagaatttatagaagagattcttaaagaaaagaaattaaatgatgaattagaagcgacattaaaagaggtgataaatgaagttaaatcatcaatgcttgccacagtttaa

SEQ ID NO: 273341 - DNA, 581 bp, Unknown
  Bacterial polypeptide expressing nucleotide sequence isolated from the Sargasso Sea
catgccggcgggtcacactggcggcgtcttctccgtctccggccccgtcgtcatcgccgagaatatgctcggcgccgcgatgtacgagctggtccgcgtcggccacaacagcctcgtgggcgagatcatccgcctcgaggagcaccgcgcgacgatccaggtgtacgaggagacctccggcctccaggtcggcgacccggtcctctgtaccggccagccgctctcgctccagctcggccccggcatcatgggccgcatctatgacggtatccagcgcccgctcgagaagattgcggaggtgtgcgcgtcgatctacatcccccgcggcatctcggtcgccgcgctcgacaacgacatcggctggtcgttcacgccgacggccctcaaggtcggctcgcccgtctccggcggcgacatcatcggcatcgtgcccgagaattcgatgattacgcacaaggtcatgctcaagccgggtacgatgggcaccctaaccttcctcgcgtccaagggctcgtacacgattgacgacaccgtcgcgaagaccaagtttgagggcgtcgagaccgagcacaagatgcagc

SEQ ID NO: 273342 - DNA, 815 bp, Unknown
  Bacterial polypeptide expressing nucleotide sequence isolated from the Sargasso Sea
tctgggtgttataaaaaaagacggtaaaggatctaaagcagctttagtttatggtcaaatgaatgaaccacctggagcaaggtctagggttgctttgacgggtttaacagttgccgaatattttagagataaagaaggtcaagacgttttattttttgttgacaatattttcagatttacacaagctggttcagaggtatctgctctactaggaaggattccttctgctgttggttatcaaccaacattagctactgatatgggaaatcttcaagagagaattacaacaactagcaagggttcgataacatctgttcaagctatatatgttcctgcagatgacttaacagatcctgccccagctacttctttctctcaccttgatgcaacaacagttttatcaagacaaattgctgagctaggcatttatcctgcagtagaccctttagactctacatcaagaattcttgacccaagaattgttggagaagaacattatagagtagctcgagaagtacagagaatattacaagcatataaatctttacaagatataattgcaattcttgggatggatgagctttcagaagaggataaacttacagttgctcgagcaagaaaaattcaaagatttttatctcaaccattttttgttgccgaggtctttactggatctcctggtaaattagttgacctcgactcaaccattaaaggttttgatgccatctgcaaaggtgagcatgacaatttaccagaagctgcgttttatatggttggaactattgaggaagctatagaaaaagctgaaaaaatgg

SEQ ID NO: 273343 - DNA, 202 bp, Unknown
  Bacterial polypeptide expressing nucleotide sequence isolated from the Sargasso Sea
tttttatcacaacctttttttgttgctgaagtatttacaggatccccaggtaaattagttgacctagagtcaacaataaaagggtttgatgcaatttgtaaaggtgattatgatcatttacctgaggcagcattttatatggttggtggaatagacgaagttgtagataaagcagagaaactatctaaagacaataaataat

SEQ ID NO: 273344 - DNA, 635 bp, Unknown
  Bacterial polypeptide expressing nucleotide sequence isolated from the Sargasso Sea
aatggaaataaatccttcagaagtaacaaaaatattaaaagaacaaattaaaaaatttggagataaagcagaagttacagaagttggtcaggttttatctgtcggtgatggaatcgctagaatatatggtttagataatgttcaagcaggagagatggtagaattttctgatggttcaaaaggtatggctctaaacttagaaagtgacaatgttggtgttgtaatttttggtgatgatagagctgtcaaagaaggtgatacagtaaaaagaacaggagcaattgtagatacccctgtaggaaaagaattattaggaagagtagttgatggtttaggaaatccaatagatggcaaaggtgcactagacaaaggtgtaaagagaagcagagttgaagttaaagccccaggtataattccaagaaaatctgtaagtgaaccaatgcaatcaggacttaaatcagttgatagtttagttccaattggaagaggtcaaagagaattaattataggtgatagacaaacaggaaaaactgcagttgcaattgatactataattaatcagaaaaaaataaatgaatcgaatgatgaaaaacaaaagttatattgtatttatgtagcaattggtcaaaaaagat

SEQ ID NO: 273345 - DNA, 748 bp, Unknown
  Bacterial polypeptide expressing nucleotide sequence isolated from the Sargasso Sea
tgctcttattgtttatgatgatttatctaagcaagcagttgcatacagacaaatgtcattactactaagaagacctccagggcgtgaagcatacccgggagatgttttttatattcacagtcgtcttcttgaaagagctgctaaaatgagtgatgaacatggtggaggaagtttaactgcattacccattattgaaacccaagctggtgacttatcagcatatattcccacaaatgttatttccataacagatggtcagattttcttggaaacaaacttattcttcgcaggtattcgtccagctattaatgttggtttatcagttagtcgtgttggttctgctgctcaaaccaaggctatgaaaaaaattgccggtccagttaagttggagttagctcaataccgtgaaatggcagcattcgcacagtttgcatccgatctcgatgcatcaacaaaacaattactagatcgtggtgcaagattagttgaaattttaaaacaaggtcaatattcaccactaacagtgtcagagcaagttgtatctatttacgctggtgttcgtggttatcttgataaggtggctgttaatgatgttgttagttttgaaacggaagttttaaatgaaataagatctaatcatgctgatttattagatgctattgcaaatgaaaaagaattatccaaagataatgatgataaattaaaatccatcttagatagccttgttggaaaatttacaagcaattaa

SEQ ID NO: 273346 - DNA, 865 bp, Unknown
  Bacterial polypeptide expressing nucleotide sequence isolated from the Sargasso Sea
tgaaggcaacgacctttaccacgaaatggttgaatccggtgttattaagacagatgggcctgggtctaaagctgcgttggtttacggtcagatgaatgagccgccaggtgcacgtgcaagagtggccttaactggcttgacattggctgaatatttccgcgacgaggaaggccaagatgtgttgttctttgttgataacattttccgatttacgcaggccggttctgaagtatcagcccttcttggacgtatcccatcagcagtggggtatcagccaacattggcaactgatatgggtgctttacaagaacgtatcactacaacaaataaaggctccatcacttcagtgcaggccatttatgtgccagctgatgacttgactgacccggcacccgccacttcatttgcgcaccttgatgcgacaactgttttatcacgtcaaattgctgaacttggcatctatccagcggtggacccgctcgactcgtcatcacgtatgttggatccacgtattgttggcgaacaccattataatgtggcacgtcaggttcaggaagttttgcagcaatacaagtcactgcaagacataattgctatccttggcatggatgaattgtcggaagaagataagctcgttgttgctcgtgcacgcaaaatccagcgtttcttgtcacagccattccacgtagccgaagttttcactggctcacctggcaagctggttggcctagaggatacaatcgctggctttgagggtatcttgaaaggtgattatgaccatctaccagaagcggctttctaccttgttgggaccatcgaagaagctgttgacaaagggaagaaactggccaaagacgctgcttaa

SEQ ID NO: 273347 - DNA, 668 bp, Unknown
  Bacterial polypeptide expressing nucleotide sequence isolated from the Sargasso Sea
tatggcaagtttagacgacctaaaaaaaagaatagctagtgtaaagtctacacagaaaattactaaagctatgaaaatggttgcagcagctaaactaagaagagctcaagaaagtgctgagaagggaaggccatattctgaaaaaatgaataatgttattttgaatttatcaaacggtatatctgataaagaaaatgcaccaaagttattgtcaggtactggtcaggaaaaaactcatctttgtgtagtgatgacttctgatagaggtttatgtggtggatttaattctaatattattaaaaaagccaagagttatttttcaaaaattttagatgaaggtaaagaactaaaaattattacagtaggctcaaaaggaaatgatcaattaaaaagagtttatggtgacaaaataattgaaaatatttctttcaaagagtctaaaaatgcaaattattttgatgctgacaaagttgggaaaatggtaattgaaaaattcgaggcaggtgaatttgatgtttgtacaattttttacaatcaatttaaaaatgtaattactcaaattcctcaagcacagcaaataatccctttaaataatgagggagaagaaaatagttcagaagaaagttacgaatttgaaccagatgaagatgaaatttttagcaatttat

SEQ ID NO: 273348 - DNA, 703 bp, Unknown
  Bacterial polypeptide expressing nucleotide sequence isolated from the Sargasso Sea
tatcgtcagatttcattacttctaagacgacctcctggaagagaggcatatcctggtgacgttttctatcttcactcaaggttattggaacgttgtgcaaaagtaagtgaagagcttggcggagggtcattaactggtctcccaattattgagacaaaagctggtgacgtttcagcatttattccaactaacgtgatttccattacagatggccaaatttatttggaatcagaactcttttattctggtgtaagacctgctgtaaaccctggtacatccgtatcaagagtaggtggtgcagctcagactaaggctatgaaaaaagtttctggtcctttaagaattaacctagctcagtttagagagttagaggcatttgcagagttcggatctgacctagatgcggcatctcaagcacagcttgatagaggtagaagagttgttgagttgttaaaacaaccacagtatcaaccagtacctatggaagagcaagtggtttcactttatgcagtaacagagggatttcttgatgtagtggatccagctgatattccacaagcagagcaagacttgattgaatttgtaaaaacaaggcactctgatgttattaattcaattaaaacaactggcgaactgcctgaagaggaattaaaagctgctgttgaggcttttgtaagtacattggagaaaaaagaagagtaaa

SEQ ID NO: 273349 - DNA, 570 bp, Unknown
  Bacterial polypeptide expressing nucleotide sequence isolated from the Sargasso Sea
ggtacttacaagagagaattacaacaacaaacaaaggatcaattacttctgtacaagctatttatgttccagcagatgatttaactgatcctgcacctgcaacttcatttgctcacttagatgcaactacagtactttctagacagattgcagaaattggtatttatcctgctgtggatccattagactctacttcaagaattcttgatcctagaatagttggtgatgaacattatagagttgcaagagaggttcaaaaagttcttcaaacatataaatctttacaagatattattgcaatcttgggtatggacgaattgtcagaagaagacaaattaactgttgcaagagctagaaaaatccaaagatttttatctcaacccttctttgttgctgaggtatttactggatcaccaggtaagcttgtagatctggaatcaacaataaaaggctttgatgctatttgcaaaggtgagtatgatcatcttcctgaagctgcattttatatggtaggtactattgaggaagctattgaaaaagctgaaaaaatgaaaaaagatgctgcctagt

SEQ ID NO: 273350 - DNA, 658 bp, Unknown
  Bacterial polypeptide expressing nucleotide sequence isolated from the Sargasso Sea
atgttctttaattccttgctaacaaattttgcagcattagaagttggtcaacatctttattggcaaattggaaatatcagacttcatgggcaggtatttttgacatcttggattttattaggagcgttattattttttatttctttaggaactaaaaaaatggaaaatgatccaaaaggccttcaaaacttgctcgagtttctctgggattacataagagatctagctaggactcaaataggggaaaaagtttatagagattggatgccatttataggcaccttatttttattcgtctttgtaagtaattggggaggagctttaattccttggagattgattaagttaccaagtggcgagttaggagcacctactgctgatataaatacaacaattgccttggctttattggtttcactttcttatttctatgctggtttaagcaataagggctggagatacttcgaatattatgttcacccaacccctattatgcttcctttcaaaattttagaggactttacgaaacctttatcactctctttcaggctatttggaaatattttggctgatgaacttgttgttggtgttctagtatttttagttccgctaattctcccaatacctgttatgttcctaggattatttactagtgcaa

SEQ ID NO: 273351 - DNA, 637 bp, Unknown
  Bacterial polypeptide expressing nucleotide sequence isolated from the Sargasso Sea
tttttcttacacagcaggttattggaaagagcagcaaaattaaatgaaaaaagtggtggaggatctctaacagctttaccaataatagaaacacaggctggagacgtttcagcttatattccaactaatgttatatctataacggacggtcaaatttttttagaaactgagctatttaaccaaggaattagaccggcagtcaatgttggtttatctgtatctagagttggttctgcagcacaaactaaagcaatgaaaaaagttgctggttcaataaaattagaattagctcagtacagagaaatggctgcttttgctcagtttggttcagatctggatgcttcaactcaacaactgcttaatcggggcgcaaaattaactgaacttttaaaacaagatcagtattctccaatgacagtagcagagcaagtcatatctgttttcaccggcgttagaggatatttagatgatttagatttaaataaaattaaaacgtttgaaaagaatattattgaaaaaataaaatcagaaaaacctgaaattattgagtcaatcgaacaatctgggaaaattgaagagaacacggaaaaaactcttaatcaaattattgaagcatataaaaaaggtaataaataat

SEQ ID NO: 273352 - DNA, 479 bp, Unknown
  Bacterial polypeptide expressing nucleotide sequence isolated from the Sargasso Sea
tatggcaagtttagacgatttaaaaaaaagaatatcaagtgttaaatctactcaaaagattacaaaagcaatgaaaatggttgcagcatctaaattaagaagagcgcaagaaagcgcagaaaaaggaagaccattctccgataaaatgaataatattattcttaatctttcaaacagcataacagataaagaaaattctcctaaactacttgtaggctctggagatggtaaagttcatttatgtgttgttatgactgctgatagaggattatgtggaggatttaatacaaatataattaaaaaagcaaaattatattttcaaaaaattatagatgagggaaaaactttaaaaattattaccgtaggatcaaaaggctatgatcaattaaaaagaacatataaagataatattattgaaaaaatttcttttaaagaatctaaaaatgcaaattattttgatgctgataaagtagggaaaa

SEQ ID NO: 273353 - DNA, 847 bp, Unknown
  Bacterial polypeptide expressing nucleotide sequence isolated from the Sargasso Sea
gtcgatttgttagctccttatgctaggggtggaaaaataggattatttggtggtgctggagtaggtaaaacagttttaattatggaacttattaataatattgcaaaagcgcacggaggatattctgtttttgctggtgtaggtgaaagaacacgagaaggaaatgatctttatcatgaaatgattgaatcgggcattattgatctaaaaggagataaatcaaaagtagcacttgtttatggacaaatgaatgagcctccaggagcacgtgctagggttgctttatcaggtttaactcaagctgaatattttcgtgatgaggagggtcaagacgttcttttctttgtcgataatattttcagattcactcaagctggttcagaagtttctgccttacttggtcgtataccttctgctgttggatatcaaccaactttagcaacagatatgggggcattgcaagagcgtattaccacaacaaataaaggatctattacatcagtccaggcaatttatgttcctgcagatgatttaactgatccagctcctgcaacatctttttctcatttagatgctacaacagttttaaatagagcaatttctgaaaaaggaatttatcctgcagtagatccattagattctaattcacgaattttagatccccaggttgtaggcgatgatcattacagagtagctagagaagtacaaagagttcttcagacttataaaagtttacaagatatcattgccattttaggaatggatgagctttcagaagaagataaacttactgttgctagagcaagaaaaattgaaaagtttttatctcaacctttcttgtcgcaga

SEQ ID NO: 273354 - DNA, 639 bp, Unknown
  Bacterial polypeptide expressing nucleotide sequence isolated from the Sargasso Sea
tgttggacaaaaaagatcaactgtaagacaaattcaaaaaactttagaagaggctggagcaatggaatatacaacaatcgttgctgcaacagcatcagactccgctcctcttcaatttctcgcaccttacacaggatgtgcaatgggtgaatattttagagataatggaatgcatgcgttaataatttacgatgatttatcgaaacaggcagtggcatataggcaaatgtcacttatattaaggagacctcctggaagagaagcatatccaggcgatgtcttttatcttcatagcagattacttgaaagagctgcaaaactgagtgatgaacatggaggcggttcattgaccgcattaccaataattgaaactcaaggcggagatgtttcagcttatattcctacaaatgtgatctcaattactgatggacaaatatttcttgaaacagaattatttaatcaaggaataagacctgcaatcaatgttgggttatcagtatcgcgagtaggctctgcagctcaaactaaagcaatgaaaaaggtatcaggatcaatgaaacttgaattagcacaatacagggagatggcagcttttgctcaatttggttctgaccttgatgcctctacacaacaactttt

SEQ ID NO: 273355 - DNA, 802 bp, Unknown
  Bacterial polypeptide expressing nucleotide sequence isolated from the Sargasso Sea
tctggtgttataaatccagaaaagcttgaggaatctaaggtggcactagtttatgggcagatgaacgaacctccaggagctagagcacgggttggactgactggtcttacactagccgagcaattcagggatcaatcaggaaccgacgtcttgtttttcgtggataacatcttccgttttactcaagcgggttcagaggtctccgctcttttaggcagaataccctcagctgtgggctatcagcctacattagcaactgatatgggagcacttcaagaaagaataacttcgactaaatcagggtccataacttcagttcaggctatttatgttccagctgacgatctaacagacccggccccagcgacatccttttctcatttagatgcgacaacagttttgagcagagcaatttctgaaattggaatttatccagctgtagacccgcttgattcaacaagtagaatattagacccccaaatagtaggtgaagatcattataatgttgctagagacgtacagggtattcttcaaaggtacaaatcgttacaagatattatagcaatattgggtatggatgaattatctgaagatgataagttaactgttgctagagcacgaaaaatacaaagatttctgtctcagccatttgatgttgcaaaggtatttaccggctctgatggtaaacaagttccactcgatgttactattgacagctttaaaagagttgttgcaggagaatttgatcacctaccagaatctgcattttacatggttggtggtatagatgaagtgatagaga

SEQ ID NO: 273356 - DNA, 925 bp, Unknown
  Bacterial polypeptide expressing nucleotide sequence isolated from the Sargasso Sea
tttgatgtgctgggtaataccattgaccaaaagggtgattgtgaaactgaaaaacgaaaccccattcatcgtcctgcgccaaaacatgaagatctagctacttcaactgaagttcttgttacaggaattaaagtagttgatttaatggagccatataccagaggtgggaaaaccgggctttttggaggcgctggtgtagggaaaacagtcttgatccaagagttgatccgcaatattgctacagaacatggtggttattcggtattcgcaggtgttggtgaaaggacacgtgaggggaatgacctatataatgaaatgacagagtcaggagtgattgataaaacaacgatggtttttggtcaaatgaatgaaccgccaggagctcgcttgcgtgtagcacttagcggtttagcgatggctgaatttttccgtgatgatgaaggtagggatgttcttttattcattgataatatatttcgtttcacacaagcaggttctgaggtttctgcgctattaggtcgtatgccttcagcagtaggttatcagccaacgttatcaactgagatgggggatcttcaagagcgtataacatctacaaaaaaaggctctattacatcagttcaagcagtttatgttccagcagatgaccttactgatcctgcacctgcaactgcatttgctcatttggatgcaacaagtgttcttgaacgtaaaattgcagagctcggtatctaccctgctgtggacccattagcatctacctccaggatcttagacccaagggttattggtgaccatcattataatgttgctagaaatgtacagtctgtattgcaacaatataaagatctgcaagacattatcgctattcttggtatggatgaattatcggacgatgataaactaacagtatcaagagcaagga

SEQ ID NO: 273357 - DNA, 718 bp, Unknown
  Bacterial polypeptide expressing nucleotide sequence isolated from the Sargasso Sea
atgtcattaaaaggtaaaatatcgcaagtaatgggtgcagttgttgatgttgtttttgaagaaggtaacttgccagagatatataatgcattatctgtagaccgaggtgatgaaggtaaattagttcttgaagttgctcaacatttaggtgattcttcagtaagaactgttgcaatggattctaccgatggtctcgtaagaggaacagaggtaatagatagtggttcaccaatttcagttcctgtcgggcctgatacattgggtaggctttttgatgttttgggaaatactattgataataaaaaggaagtaaaaactaaaaaagttaatccaattcatcgctcagcgccaaaacatgaagaattagcgacctcgacagagatgcttgtcacaggtattaaagttgttgacctcatggaaccatatacaaaaggcggaaagacagggttgtttggcggcgctggagtaggtaaaacagttttgattcaggaattaattagaaatattgctgcagagcatggaggatactctgtatttgcaggtgttggggaaagaaccagagaaggtaacgacctttataatgaaatgacagagtcgggagtcattgataaaactacaatggtttttggtcagatgaatgaacctccaggggccagattaagagttgcactgagcggtcttgcaatggctgaatactttagggatgacgagggcagag

SEQ ID NO: 273358 - DNA, 954 bp, Unknown
  Bacterial polypeptide expressing nucleotide sequence isolated from the Sargasso Sea
agagacagaaattttagtaacaggtataaaagtagtagacttattagcgccatatgcaaaaggtgggaaaattggtttatttggtggtgcaggagttggaaaaacagttttaattatggaattgattaacaatgttgctaaagcacatggggggttttcagtttttgcaggtgttggtgagagaactagagaaggaaatgatctttatcatgaaatgatagagtcaggagtgataaaacctgatggcgaaggatcaaaggctgccttagtttatggccaaatgaatgagcctccgggagcgagagctagggttgcgttgtcgggtttgacagttgcggaatactttagagatcaagagggtcaggatgtgctctttttcgtggataatatttttagatttactcaggctggttcagaagtttcagcattattaggaagaattccatcagctgtaggatatcagccaacacttgctactgatatgggaaatcttcaagagagaattacaacaaccaataaaggttctataacctcagtacaagccatatatgttcctgctgatgatttaactgacccagctccagcaacatcattttcacatttggatgcaactaccgtcttgtcaagacagatagcagaaataggaatttatccagctgtagacccattggactcaacatcaagaattttggatccaaggatagttggagatgaacactatagagttgctagagaggttcaaaaaattttacaaacatacaaatctttacaggatattattgcgattttaggtatggatgaattatcagaagaagacaaattaacagtagcgcgagctagaaagatccaaagatttttatcgcaacctttctttgttgctgaggtttttactggctctcccgggaaacttgtagatttagagtctacaattaaaggttttgatgcaatatgcaa

SEQ ID NO: 273359 - DNA, 789 bp, Unknown
  Bacterial polypeptide expressing nucleotide sequence isolated from the Sargasso Sea
catggtatctatacgccctgatgaaatcagttcaatcttaaaacagcaaataactgattatgaccaatctgtaagtgttagcaatgtaggaactgttctgcaaatcggtgatggcattgcaagaatatatggcttagatcaggtcatggcaggtgagctattggaatttgaagatggtaccgaaggtatagctttaaatcttgaagatgataacgttggggccgttttaatgggagaggcacttggtgtccaagaaggaagtaaagttaagtccacgggtaaaattgcatctgttcctgttggtgaagcaatgcaggggagagttgttaaccctctcggacaaccaatagatgggaagggggaaattccaacaagtgatactagattgattgaagaaatggctcctggaataatcaagagaagatcagtgcatgaaccaatgcaaacaggcatcacatctattgatgcaatgattcctgttggaagaggtcaaagggaattaattattggtgatagacaaactggaaaatctgcaattgctatcgacacgataattaaccaaaaaggtcaagacgtagtttgtgtttacgtagctattggtcagaagtcagcatcagtagcaaacatcgtagaggtattaagagagagaggagccctagattatacagtcgtagttagtgcaggagcttcagaaccagctgctttacagtacttagcaccttataccggtgcagcaattgctgaacattttatgtatcagggtaaagcaacactcgttatttatgatga

SEQ ID NO: 273360 - DNA, 553 bp, Unknown
  Bacterial polypeptide expressing nucleotide sequence isolated from the Sargasso Sea
tgagacaaaagctggtgacgtttcagcattcattccaactaacgtaatttccattacagatggccagatttatttggaatcagaactcttttattctggtgtaagacctgcagtaaaccctggtacatcagtatcaagagttggtggtgcagcacaaactaaggctatgaaaaaagtctccggtcctttaagaattaaccttgcacagttcagggagttagaggcatttgctgagttcggatctgacttagatgcagcatctcaagcacagcttgatagaggtagaagagttgttgagttgctaaaacaaccacagtatcaaccagtacctatggaagagcaagtggtatcactatacgcagtgacagagggattccttgatgtagtggatccatctgatatcccacaagctgaacaagatttgattgattttgtgaaaacaagacactctgatgttattaattcaataaaaacaactggtgaattgcctgaagaagaattaaaagctgctgttgaggcttttgtaagtacattggagaaaaaagaagagtaa

SEQ ID NO: 273361 - DNA, 942 bp, Unknown
  Bacterial polypeptide expressing nucleotide sequence isolated from the Sargasso Sea
cggcctgtttggtggtgctggtgtaggtaagacggttaccctcatggagctaatcaataacattgcaaaagagcatggtggctattctgtgtttgcaggtgttggcgagcgtacccgtgagggaaatgatttttatcatgagatgaaagactctaaggttctcgataaggtttccttggtttatgggcagatgaatgagccccctggaaaccgtctccgggtagcgcttactggtctgacgattgctgaaggattcagggacgaaggacgagatgtccttatgtttattgacaacatttaccgttatacgcttgctggaacagaagtctcagctttgttaggtcgtatgccttcagctgtgggttatcagcccacgttggctgaagagatgggcgttttacaggagcgcattacttctactagcacaggctctattacttcctttcaggctgtttatgttccggcagatgatcttactgacccatctccggctaccacttttgctcatttagatgcgacgctagttttgtctaggcaaattgcggagttaggcatctacccagcggtagatccgctagattcgacgagccggctacttgaccctaatgttgttggtgaagagcactatcaaactgctcgatcagtgcaggcagtcttacaacgttataaggagctacaagatattatcgccattttgggcatggatgagttgtcagaaaacgacaagctagtggtccaacgggccagaaaaatacaacgtttcttatcgcagccattcgctgttgccgaaacctttactggtacaccagggaagtacgttccgcttaaggaaactattagtagttttaaggctattgttgctggagattacgatcatcttccagaacaggcgttctatatggttggctccattgaagaggccgaagagcagggcagggcttt

SEQ ID NO: 273362 - DNA, 604 bp, Unknown
  Bacterial polypeptide expressing nucleotide sequence isolated from the Sargasso Sea
atggaagaattaaacccatcagaaattagtcaggtcatcaagcagaaaattgatgctctcgataccgtatccacacctagcaatgaaggcacaatcgttttccttgcagacggtattgcaagaatatacggtcttggtgaagtcatgaatggtgagcttatagagtttgagcatggcgtcatgggaatggcgcttaatttagaggttgactctgttggggctgttatcttgggagattataagttactggcagaaggcggctctgctaagtgtactggaagaattttagaggtccccgttggagatgctcttatgggaagggttgtggacgcactaggtaatccaattgatggtaaaggcgaagtgcagacaaatcaaactgccccagtagagaaagtcgctcctggagttatttcaagaaagtctgtagatcaaccggtgcaactgggtataaaggccgttgatagcatggttccaattggaagaggtcagcgtgaattgatcattggagacagacagaccggcaaaaccgctatcgccattgatgcaataatcaatcaaaaagacactggcgttaagtgcatatacgtagcaataggtcaaa

SEQ ID NO: 273363 - DNA, 664 bp, Unknown
  Bacterial polypeptide expressing nucleotide sequence isolated from the Sargasso Sea
aaagataaagtcaatttatgcgtggtattaacggcagacagagggttgtgcggcggttttaactctaacatttgtaaacttgcaaagacaaagtttgaaaagattttaagtgaaggaaaagaactaaaaataattacagtaggaactaaaggtttggatcaaattaaaagagaatatggaaaatatgtaattaaaaaatttagttttaaaaacaagaaacaaattacatttagcgaagctgaaacaataggaaatgaaattataaatttatttaaacaaaatcaatttgataaatgtattttattttataataattttaaaaatgtaattacacagattccgcaagctcagcaaattattccagcagaaaataacccatcaaaagataaagaaaaagaagaaagtctgacttcttatgagtttgaacctgaggaagatgaaattttagaagatttattacctaaaaatatttcaactcaagtttttaaagcttttttagaaaatgctgctagtgaacaaggatctagaatgactgcaatggacaatgccacgagaaatgctggagaattagttgataaacttacaattaactataatagaagcagacaagcttcaattacaaaagagttaatagaaattatatctggagccgaaagcttatagc

SEQ ID NO: 273364 - DNA, 951 bp, Unknown
  Bacterial polypeptide expressing nucleotide sequence isolated from the Sargasso Sea
ggtaggacaagtattatcagtaggagatggtattgctaggatctatggactagataatgttcaagctggggagatggtagaatttgccgatggttctaaaggtatggcattaaatttagaaagtgaaaatgttggtgttgtaatatttggagatgatagagcagtaaaagaaggtgatacggtaaaaagaacaggagctattgtagatacaccagtaggaaaagagttacttggaagagtagttgatggattgggaaatccgattgatggaaaaggtgaattaaataaagaagttaaaagatcaagagtagaagtaaaggctccaggaataatcccaagaaaatctgttagtgaacctatgcagacaggtcttaaatctgttgatagtttggtaccaattggtcgaggacaaagagaattaattattggtgatagacaaacaggaaaaacagcagttgcaatagatacaataataaatcaaaaaaaaattaatgagtctaatgatgaaaagcttaaattatactgtgtctatgtagctattggacaaaaaagatctacagttagacaaattgaaaaaactttagaggaagctggtgcgatggaatataccacaatagttgctgctacagcctcagatgcagctccacttcaatttttagcaccttatacaggttgtacaatgggtgaatattttagagacaatggtatgcatgcattaattatttacgatgatctttcaaaacaagctgtagcttatagacaaatgtctttattattgagaagaccgcctggaagagaagcttatccaggagatgtattttatttacacagcagattacttgagagagctgctaaacttagcgatgaacacggtggaggatcttttacagcacttccaattattgaaaaccagggaggagatgtttctgctttcataccactaatgttatt

SEQ ID NO: 273365 - DNA, 702 bp, Unknown
  Bacterial polypeptide expressing nucleotide sequence isolated from the Sargasso Sea
ttcggcggcgccggcgtcggcaagacggttctcatccaggaactcatcaacaacatcgcgaagggccacggcggcgtgtccgtcttcgccggtgtgggtgaacgtacccgcgaaggcaacgatctctaccacgaattcctcgacgctggcgttatcgccaagaacgacgatggcgaagccatcagcgaaggttcgaaggttgcgctcgtgttcggccagatgaacgagcctccgggcgcgcgtgcccgcgttgctctctcgggtctgaccatggcggaatatttccgcgacgtcgaaggccaggacgtgctgttcttcgtcgacaacatcttccgcttcacccaggcgggttcggaagtgtcggcattgctcggccgtattccttcggccgtgggctatcagccgacgctcgccaccgacatgggtaacctgcaggaacgcatcacctcgaccaccaagggttcgatcacctcggtccaggccatctacgttcccgccgacgaccttaccgacccggcaccggcaacctcgttcgcccacttggacgcaacgaccacgctgaaccgcgcgatttcggagctgggcatctacccggcggtcgacccgctcgactccaccagccgcgtgctcgaaccgcgcgtggtgggtgacgagcactatcagaccgctcgccgcgtccaggaaacgctgcagaagtacaag

SEQ ID NO: 273366 - DNA, 475 bp, Unknown
  Bacterial polypeptide expressing nucleotide sequence isolated from the Sargasso Sea
atgagaaaaggacaaataacacagattattggggcggtagttgatgtaaaatttgatggagaactacctgagattttaacagcattagagtgtgataacggtggtaacagattagttttagaagttgcgcaacacctaggagaatcaagtgtaagaacaatcgcaatggatgcaacagaaggtcttaaaagaggtgatgaggtaacagatacagcagctccgattaaagttcctgttggacctgaaacacttggaagaattataaatgtaataggcgaaccaattgatgaaaaaggtgatgtaaaaagttcagacaattggccaatccatagagcagctcctgaatttaatgatcagtcaacagaaactgaaatacttgtaacaggtattaaagttattgatcttttagctccctatgcaaaaggaggaaagattggtttatttggtggtgctggtgtggaaaaacagttttgat

SEQ ID NO: 273367 - DNA, 661 bp, Unknown
  Bacterial polypeptide expressing nucleotide sequence isolated from the Sargasso Sea
tatggcaagtctagatgatctcaaaaaaaggatagctagtgtaaagtctacacaaaaaatcacgaaagctatgaaaatggttgcagcagcaaaattaagaagagctcaagaaagcgctgaaagaggaagaccctattcagaaaaaatgaacaatattattttaaatttatctaatggcatatctgataaggaaaatgccccaaaattattatctgggacaggcgaaaataaagttcacttatgtgtagtaatgacatcagacagaggcctttgtggtggttttaattctaacatcattaaaaaagctaaaagttatttttcaaaaattttaaacgagggtaaacaattaaagattattactgtaggatcaaagggaaacgaccaactaaaaagagtttatggagataaaattattgaaaatatatcttttaaagaatctaaaaatgcaaattattttgatgctgataaagttggaaggatcataattgaaaaatttgaggctggtgagtttgatatatgtacaattttttataatcaatttaaaaatgtaattactcaattacctcaagctcaacagattatacccttaaacaatgaagaggatcataataattcagacgaaagttatgaatttgagccagatgaagatgaaattttaagt

SEQ ID NO: 273368 - DNA, 897 bp, Unknown
  Bacterial polypeptide expressing nucleotide sequence isolated from the Sargasso Sea
ttagtcaggtcatcaaacaaaagatagatgcgcttgatactgcctccactcctagcaatgagggcacaatcgttttccttgcagatggtatcgcgagaatacacggactcggcgaagtcatgaatggtgagcttattgagtttgaacatggtgtaatgggaatggcgctaaatttagaagttgactcggtaggggctgtaatcttgggagactacaagcttcttgcagagggtggctccgctaagtgtaccggaagaattttagaggttcccgttggagatgctcttatgggaagagttgtggacgcactaggaagcccaattgatggtaaaggcgaggtgccgactaatcaaaccgctccagtagagaaggttgctcccggagtcatttccagaaagtctgtagatcaacccgtacaactgggtataaaggctgttgatagcatggttcctattggaagaggtcagcgcgagttgattattggagatagacagaccggtaaaaccgctatcgctatcgatgcaataatcaatcagaaggatacaggcgtgaagtgcatatatgtagctataggacaaaagcaatcttcaattgcacaggtagttagaacccttgaacaatatggggcgatggataatacaattgttgtagtagctgctgctgcagatccggcacctatgcaatatatagcaccttttgcggcctgttccatgggtgagtatttcagagatagaggagaggatgctctaattatttacgatgatctttcaaaacaagctgttgcgtatagacagatgtctctcttactaagaagaccgcccggaagagaggcttatcctggtgatgttttctaccttcactcaagattactagaaagagcggcacgggtgaaatgaa

SEQ ID NO: 273369 - DNA, 680 bp, Unknown
  Bacterial polypeptide expressing nucleotide sequence isolated from the Sargasso Sea
aaaagatgaaaatattttaatagtacctgttagtgccgatagaggattatgtggtggatttaatagcagcataaatagagaaacctttaaacttgttaaaaaatttgagtctgaaaataaaaaagttcaattgttgccaattggtaaaaaaagtagggattttttcaacagattaatgaaagacaaaattcttgaaagttttgtagatacgaatgtatcatcttctggctatgatgcagctttaaatatttcaaataaacttcaagaactattttttgatggtaaatttgataaatgcatacttgttttcaataaatttaaatctgcaattacccaggaagtaactcaacaacaacttattccattagatgtatcaagttcatctgaagaaaaagataaagtagcagaaaatacagaaacaaatgcaatctatatatatgaacctgatgaagaaacaattcttcaagatttgctcccaaaaaatatatctattcaaatttttaaagttttattagaaagcgatgctggtgagcaaggagcacgtatggcagcaatggataatgcaacacgaaatgctggtgaaatgattgatagtttaacattaaaatataatagaacacgacaagcatttataacaaaagaattaattgaaattatttctggagctgaatcagtttaaa

SEQ ID NO: 273370 - DNA, 546 bp, Unknown
  Bacterial polypeptide expressing nucleotide sequence isolated from the Sargasso Sea
tatgactggaaaaatttctcaaataatgggtgcagtggtagatgttgcatttgaagatggtcatttacctaatataatgaattcgcttagcgtcgataggggcgatgaaggtacattagttcttgaggtagctcagcaccttggagataatatggtccgaactgttgctatggattctaccgatggtttaaccagaggcatagatgttgttgatagcggatccccgatttctgtgccagttggccaagaaacgcttggacgcctctttgacgttttagggaatgttattgatggaaaaggagatttaaaaactgagaaaaagaaccctatccacaggccagcaccaaaacatgaagaattagccacttcaacagaaattcttgtaactgggataaaggttgtagatttaatggaaccttatacaaagggtggaaagaccggtctttttggaggagcgggtgtgggtaaaaccgttttaattcaagagttgattcgcaacattgcaacggagcatggagggtactcagtttttgctggagttggtga

SEQ ID NO: 273371 - DNA, 373 bp, Unknown
  Bacterial polypeptide expressing nucleotide sequence isolated from the Sargasso Sea
attcaacagtagacagcttgagccggcgattgtaggtcaagagcactatgacgtggctaacgctgttaaacaacaacttaaccgctataaagaactgaaagacataatagccattttaggaatggatgaactttctgaggaagataagttggttgtagctagggcaagaaaaattgaaagatttctctcgcagccattctttgtagcggaggtattcacgaacgctcctggaaagtatgttccattaagcgagaccataagaggtttcaaaggaatagtgaatggtgaatacgatgatattccagagcaggcattttacatgacagggaatattgacgaagtgattgaaaaggccaaaacggaagccgcctga

SEQ ID NO: 273372 - DNA, 526 bp, Unknown
  Bacterial polypeptide expressing nucleotide sequence isolated from the Sargasso Sea
atggatattaatccttcagaaataacaaaaattttaaaagaacaaattaaaaatttaggagaaaaaaccgaagtatctgaaattggaaaagttctttcagtaggtgacggtattgcaagagtatatggactagataatgttcaagccggtgagatggttgaatttaaagatgggtccaaaggaatggcattaaatttagaaagtgacaatgttggtattgtaatttttggtgatgacaaaactattaaagagggagatactgttaaaagaacaggagcaatagttgatgttcctgttggtaaggagttactgggcagagtcgttgatgcattaggcaatccgattgatggtaaagaaagtttaaaaaaaggtattcaaagaaaaagagtagaggttaaagccccaggaattattccaagaaaatctgttagtgaacctatgcaaacaggtcttaaggctattgatagcttaattccaatcggaagaggtcaacgagaattaattatggagatagacaaacaggaaa

SEQ ID NO: 273373 - DNA, 307 bp, Unknown
  Bacterial polypeptide expressing nucleotide sequence isolated from the Sargasso Sea
aagcaacagctgaatagatataaagaattaaaagacatcattgccatcctgggaatggacgagttatctgaagatgacaagttagtcgttgccagagccaggaaaatagagagattcctgtcccaacctttctttgtggcagaagtattcaccaacgccccaggaaaatatgtaccgcttagtgaaacgattcgaggttttaaaggaattgttaatggagactatgacgatatacctgagcaagccttctatatgactggaaatattgatgaggttgttgaaaaggccaaaactgaggctgcttaaa

SEQ ID NO: 273374 - DNA, 686 bp, Unknown
  Bacterial polypeptide expressing nucleotide sequence isolated from the Sargasso Sea
attttttgttgataacatatttagatttacccaagctggatctgaagtttcagctctattaggaagaataccatcagctgtaggctatcaaccaactttagcaacagacatgggaaatttacaagaaaggataacaacaacaaacaaaggttctattacttcagttcaagccatttatgttcctgctgatgacttaacagatcctgcgccagctacttcgtttgcccacttagatgcaactacagttctttcaagacagattgcagaattaggaatatatcccgctgttgatccattagattcaacatctagaattttagatcctagaattgtaggagaggaacattatagagttgcgagagaagtacaaaggattttacaaagctataaatctttacaagatataattgcaattctaggaatggatgaactttctgaagaggataagttgaccgtagcgagagcaagaaaaattcaaaaatttttatcacaaccattttttgtcgctgaagtttttactggctttccaggaaaacttgtagatttagaggctaccatcaaaggattcgacgctatatgtaaaggagaatatgatcatctacctgaaaatgcgttttatatggttggtacaattgaagaagcagttgaaaaagcagaaaaaatggcaaaggatgcggccgcttaat

SEQ ID NO: 273375 - DNA, 526 bp, Unknown
  Bacterial polypeptide expressing nucleotide sequence isolated from the Sargasso Sea
atgcagcaactcaatccatctgaaataagcgatatcatcaagtcccgaatccagggtttggatgtaagtgctgaggcccaaaatgaggggactattgttggtgtatcagacggcattatacgaatccacggcctagcagaggcgcaatatggtgaaatgatcgagttcgatggcggtcttttcgggatggccctcaacctagagcgagactctgtaggggtcgtggttttaggagactatagtggactaaaagagggtcaaaacgcgagatgtacgggcaggatcctagaggtccccgtcggcaaggagctgctcggaagagtggttgatgcgcttggaaatccgatcgacggaaaagggcctataggtgcgaagtctagctcgccaattgaaaaggtggctcctggcgtaatagccaggcagtcggtcgatcaaccggtccagatcggcttcaagtgcatcgatgcgatggtgccgataggaaggggacagagagagctgataattggcgaccggcagattggta

SEQ ID NO: 273376 - DNA, 520 bp, Unknown
  Bacterial polypeptide expressing nucleotide sequence isolated from the Sargasso Sea
ctgcttatatcccaactaatgttattatcaattactgacggacaaatatttttagaaactgaactttttaatcaaggaattcgaccagcagtaaatgttggtctatcggtgtcacgtgtaggatctgcagctcaaactaaggctatgaaaaaagtagcaggttccataaaattagaacttgcacagtacagggaaatggctgcatttgcacaatttggatcagatttagacgcctctacacagcaattgctaaatcgaggcgctaaattaactgaacttctaaaacaggatcaatattccccaatgacggtggcagagcaagtcatatcagtctttactggggtaaaaggtttcttagatgatgtggatttagataaaattaaaaaatttgagaaagatataattgaaaaaattaaatctgaaaaaccagagataattgactctattcaaaattcaggaaaaattgatgaagatactgaaaaattattaacacaagttattgaggagcataaaaaataga

SEQ ID NO: 273377 - DNA, 803 bp, Unknown
  Bacterial polypeptide expressing nucleotide sequence isolated from the Sargasso Sea
gccaagtttagatgacttaaaaaaaagaattaaaagtgttaaatctacccaaaaaattactaaagctatgaagatggtagctgcagcaaaattgaaaaaagcacaagataatgctgaaaaaggtcgtccttatagtgaaaaaattcaaaatattattttaaatttaactcaatcaatttcagatccttcaaatgccccaaagcttttaattggaaatggaaatagcaaagtacatttatgccttgtattgactgccgacagaggattgtgtggtggttttaatacaaatatttgtaagctagcaaaacaacatattagaaaaatgttaagtgaaaaaaaacagattaaaattattacagtaggatcaaaaggacatgatcaaattaaaaatgagtttggagattatataattgaaaatttaagttttaaagataaaaaacaaatcacatttaaagaagctgatgaaataggtaagaaagttattgatttatacgagaaggatcaatttgataagtgttatttattttataacaactttaaaaatgttattacccaaattccctgttcagagcaaataatacctgcttcagtaaaagaaaaagaaatcatcaaagaagaaaagccggggtatgaatttgaaccagatgaagatgaaatacttgaggatcttcttccaaaaaatatatccacacaaatctacaaagcttttctagaaaatgcagcaagtgaacaagggtctagaatgactgcgatggataatgcgacaagaaacgcaagagatttagtagataaactcacgataa

SEQ ID NO: 273378 - DNA, 716 bp, Unknown
  Bacterial polypeptide expressing nucleotide sequence isolated from the Sargasso Sea
gagagagacaagagaaggaaatgatttatatcatgaaatgattgagtcaggcgtaattaaacctgatggtaaaggatcaaaagcagcattagtatatggacaaatgaacgagccaccaggcgcaagagctagagtaggattaacaggtttaactgttgctgagtactttagagataaagaaggtcaagatgttttattttttgttgataatatatttagatttacccaagcaggttcagaagtatctgctttattaggaagaattccatcagccgtaggttaccaacctactttagctactgacatgggaaatttacaggaaagaataactacaactaacaaaggttctattacttcggttcaggctatatatgttccggctgacgatttaacagatcctgctccagcaacctcatttgcccatttagatgccactacagtattatccagacaaattgcagaattaggaatatatcctgccgtagatcctttagattctacttctagaattttagatcctagaatagtgggagaagaacattaccgcgttgcaagagaagttcaaaaaatacttcaaacatataaatctttgcaggatataatagcaattctaggtatggatgagctttctgaagaagacaagcttacagtagctagagcaagaaaaattcaaagatttttatctcaaccatttttcgtagcagaagttttcacag

SEQ ID NO: 273379 - DNA, 478 bp, Unknown
  Bacterial polypeptide expressing nucleotide sequence isolated from the Sargasso Sea
atgaagggaaaaatctctcaagttataggtccggtaattgacgttagctttgaaaatgcaagtgttttaccaaacttaatggatgctatcgaaattactaaagaagatggcgcaaaagttattcttgaatgtcaaaagcacattggtgaagatagtgttagaactgttgcaatggactcaacagatggtcttagaagaggaatggatgcaattgctttaggaaagccaattagtatgccaactggtgacgctgtaaagggaaggttgtttaatgttattggagatgctattgatggtatcggtgagtgtgaaactgaaacaaaattgccaattcatagagaagcgccaaagtttgaagacttatctacttcaactgaagttttatttacaggtatcaaagtaattgaccttgttgagccttatgcaaaaggtggtaaaattggtttatttggtggtgctggtgttggtaaaaccagta

SEQ ID NO: 273380 - DNA, 403 bp, Unknown
  Bacterial polypeptide expressing nucleotide sequence isolated from the Sargasso Sea
agagcttggtatttatccagcggttgacccgcttgactcaaacagtcgtcaattggaccctggcattgtcggccaagagcactatgacactgcaaggtcagttcagcaggttctacaacgctacaaagagttgcaagacatcatagcgatccttggtatggacgaactttctgaagaggacaagctcaccgtacagagagcaagaaagattcaaagattcttgtcacaaccattctttgttgcggaggtctttacaggatcacctggccaatatgtttctcttagagattcgattaaggcattccaaggaattgttgccggtgagtatgatgatctcccagagcaagcattctacatggttggcaccattgaagaagcggtcgaaaaagcaaaaagtatgtaa

SEQ ID NO: 273381 - DNA, 816 bp, Unknown
  Bacterial polypeptide expressing nucleotide sequence isolated from the Sargasso Sea
tagaagttggtaccgtacttcaattggtgatggtattgctcgtgtttattgtttaaccggagttcaatatggagaactaatcgaatttgatggtggaattcaaggaattgcactgaacctagaagaagataatgttggtgctgtaatccttggtaaaagttctgaggtaaaagaaggtgacaatgttaaaagacttggaagaatcgcatcgattaaagttggagaggaaatggttggtcgtgttgttgatacacttggtcttccaattgatggaaaaggacctgttacaggtgagctttttgaaatgccaattgaaagaaaagcaccaggtgtaattttcagacaacctgttagtgagccacttcaaacaggaattaaagctattgactctatgattcctattggaagggggcaaagagaattaattattggtgatagacaaacgggtaaaacaaccgttgctattgacaccattattaatcaaaaagaattttatgatcgcggtgagcctgttttttgtatttatgttgctattggtcaaaaaggatctaccgttgctgggattgttaaaaaacttgaagatgctggcgcgatgaaatatactgttgttgttgctgccaatgcctctgatcctgcgccaatgcaattctatgcgcctatgactggtgctgcaattggtgagtatttcagagatactggacgtcctgctttaatcatctatgatgatttatccaaacaagctgcggcatatcgtgaagtttctttattacttagaagacctccaggtcgtgaagcatacccaggtgatgttttcta

SEQ ID NO: 273382 - DNA, 216 bp, Unknown
  Bacterial polypeptide expressing nucleotide sequence isolated from the Sargasso Sea
gcaaagttcagcgcttcctgtctcaacctttccatgtcgctgaagtttttaccggaagtccaggcaagtatgttgatttaaaagacacaatctctggtttcaagggtttgatcaatggaaattatgatgacctcccagagatggctttctacatggtcggtgacatgaacgaggctgttaccaaagctgacgaacttgccaaacaagttgcctaag

SEQ ID NO: 273383 - DNA, 875 bp, Unknown
  Bacterial polypeptide expressing nucleotide sequence isolated from the Sargasso Sea
attattaggtagagtagttgatggtttaggaaatcctattgatggcaagggggctttagataagggaataaaaaaaagtagagttgaagtaaaagctccaggtatcattcctcgtaaatcagtaagcgaacccatgcaaactggtcttaaatctattgatagtttagttccaattggaagaggtcaaagagaattaattattggagatagacaaacaggcaaaacagcagttgctattgatgcaattataaatcaaaagaaaataaacgagtccaatgatgaaaaacaaaagttatattgtgtttacgtagctataggtcaaaaaagatctacagttagacaaattgaaaaaactttggaagaagctggcgcaatggaatatacaacaattgttgcagctactgcttcagatgcggctcctctacaatttttagctccttacacaggatgtgcaatgggagaatattttagagataatggaatgcacgcattaatcatatatgatgatctttcaaaacaagcagttgcttatagacaaatgtcgcttttattgagaagacctccgggtagagaagcttatccgggagatgtattttatttgcatagcagattacttgagagagcagctaaattaagtgatgaacatggtgggggatctttgacagctcttccaataattgaaacacaaggtggggatgtttctgcgtttatacctacaaatgtaatttcaattactgatggtcaaatctttttggaaacagaattgtttaatcaaggtataagaccagcaattaacgtaggattgtcggtttcaagagttggatcttctgctcaaacgaaagcaatgaaaaaggtttctggatctatgaaacttg

SEQ ID NO: 273384 - DNA, 835 bp, Unknown
  Bacterial polypeptide expressing nucleotide sequence isolated from the Sargasso Sea
gagcaagactctgttggagttgttgtgttgggtgattaccttgggctaagtgaaggacaaaaagttacatgcacaggaaagatcttagaggttcccgtcggcgaggaaatgcttggtcgagttgttgatgctttaggaagcccaatcgatggaaagggcgaacttaaaacaaaacaaactgctcctattgaagtagttgcgccaggagttattgccaggcaatcagttgatcaaccagtgcaaattgggcttaaatcaatcgatgcaatggttccaataggaagaggccaaagagagctcattattggtgacagacaaactggaaaaacagctgtagcaattgacgcaataattaatcaaaaaggtacaggaattaaatgtatttatgtagctattggtcaaaaacaatcaacaatagctaatgtcgtagcaaaacttgaagagtatggagcaatggagcacacaattgttgtttcagcggcagctgctgatccagctgcgatgcaatacctctcagcatattcaggttgtgcaatgggagaatattttagagatacagggcaggatgcattaattgtttacgatgatttgtcaaagcaagcagtcgcttacagagagatatcactattacttagaaggcctccaggaagagaagctttccctggagatgttttttatcttcactcaagacttttagagagagcagctagagtaaatgcggaatatgtagaaaaaattacagaaggaaaggtaaaaggtaaaacaggatctttaacagccttgccaatcatgaaacacaagccggagatgtatctgcttttgttccaacaaatgt

SEQ ID NO: 273385 - DNA, 871 bp, Unknown
  Bacterial polypeptide expressing nucleotide sequence isolated from the Sargasso Sea
aattggattatttggtggtgctggtgtgggtaaaacagttttgattatggaattaattaataacgttgcaaaagcccatggtggtttttcagtttttgcaggtgttggagagagaactagagagggaaacgatctttatcatgagatgatggagtcaggggttattaaacaagatggccctggatctaaagcagcattagtttatggtcaaatgaatgagcctccaggagcaagagctagagttgcacttacaggattgactgtagctgaatactttagagatcaagaaggacaagacgtacttttctttgttgataatatttttagatttactcaagcgggttcagaggtttctgctcttttaggaagaattccatcagcagttggttatcaaccaacgctggcaactgatatgggtaatcttcaagaaagaattacaacaactaacaaaggatcgattacttcagttcaagcgatttatgtgccagctgatgatttaactgatccagctccagccacgtcatttgcacacttggatgcaacaacagtactttcaagacaaatagctgagattggaatttatccggctgttgatccactagactcaacttcaagaattttggaccctagaattgttggagacgaacattataaagtggctagagatgtacaaaaaatattacagtcttataaatcattacaagatatcatagctattttaggtatggatgaattgtctgaagaggacaaattagttgtcgcaagagcaagaaaaatccaaagatttttatctcaaccttttttcgtagcagaagtattcactggatcaccaggtaaattagttgatttagagtcaactattaaagggttt

SEQ ID NO: 273386 - DNA, 466 bp, Unknown
  Bacterial polypeptide expressing nucleotide sequence isolated from the Sargasso Sea
actttttaatcaaggaattcgtcccgcagtaaatgttggactttcagtttcaagagttggttctgcggcacaaatcaaagcaatgaaaaaagttgcaggttcaataaaattagaattagctcaatatcgtgagatggcagcttttgcacaatttggttcagatcttgacgcatccacacaacaattgcttaacagaggatcaaaattaacagaacttttaaaacaagatcaatattctccactaacagttgctgaacaggttgtttcagtttttactggagttagaggttatttagatgatgttgatttaaacaaaataaagtcctttgaaaaagatataattgagaaaatcaaaagtgaaaaatctgagattttagaaaatatacagtcttcaggtaaattagaggaaggagatgaaaaatctctaattcaaattatagaagaatataaaaaaagtgaaaaataa

SEQ ID NO: 273387 - DNA, 384 bp, Unknown
  Bacterial polypeptide expressing nucleotide sequence isolated from the Sargasso Sea
aatgccaagtttagatgatttaaaaaaaagaattaaaagcgttaaatcaacgcaaaaaataacaaaagctatgaagatggtagcagcagctaaattaaaaaaagctcaggaaagtgcagaaaaaggaagaccttacagcgagaaaatgcaaaatataattttgaatttaactagatcagccagcgattccgagaatgccccaaagttgttaattggcacaggaaaaaatcaaatacacttgtgtgtagttatgactgcagacagaggtttgtgcggaggttttaattcaaatatttgcaaactagctaagaattattttaaaaatatcataagtcaaggaaaagaacttaagattattacggttggttctaagggtttagatca

SEQ ID NO: 273388 - DNA, 823 bp, Unknown
  Bacterial polypeptide expressing nucleotide sequence isolated from the Sargasso Sea
gcaggctgcacaatgggagagtattttagagataagggcgaagatgcattgatcgtttatgatgatctttctaagcaagcagtcgcttatagacaagtatcacttttattaaaaagacctccaggaagagaggcataccctggtgatgttttttatttgcattccaggttgttagaaagggccgcaagagtaaatgcagactacgttgaacaagttaccggaggaaaagttaagggtaaaactggctctttaacagcactgccaattattgaaactcttgctggagatgtttcagcttttgttccaacaaatgtgatttcaattactgacggacaaatatatttagaaacagagctatttaattcaggtattaggcctgctattaatccaggactttctgtttcaagggttggtggatcagcacaaacaaagattatgaaaaagttagctggtggagttaggactgcattagctcaatatcgtgagctggccgctttctctcagtttgcatcagacttagatgatgcaactaagcagcaacttgccaatggtagagcatttacagagctgcttaaacaaaagcaatacgcaccaatgagtgttgctcagcaagcactaagcctatttgcagcagacaggggctacatggcagatatagaagttgagaaaatcttagactttgaagcagcccttcatggttatctaacagctgaaaagggagagttagagcaacaaataaattcaacaggtgactggaatgatgatatagaaaatcaatttaaagaactcgttgaggatttcaaaaaaacacaaactttttaat

SEQ ID NO: 273389 - DNA, 694 bp, Unknown
  Bacterial polypeptide expressing nucleotide sequence isolated from the Sargasso Sea
atggaaataaatccttcagaagttacaaagatattaaaagaacaaatcaaaaattttggagataaagctgaggttactgaagttggtcaagttttatcagttggtgatggtatcgctagaatttatggtcttgataatgttgaagctggagagatggttgaattttctgatggttctaaaggtatggccttaaacttagagagcgaaaatgttggtgttgttatttttggtgatgatagaaatattaaagagggtgatgttgtaaaaagaactggaaatattgttgatacaccagtaggaaaagaacttcttggtagagtagttgatggtttgggaaatccaattgatggtaaaggtgcattagataaaagtgtacaaaagagcagagtagaggttaaggctcctggaattatccctcgacagtcagttaatgaaccaatgcaaacaggattaaaatcaattgacagtttggttccaattggaagaggacaaagggaattaatcattggtgatagacagacaggaaaaactgctgttgctgttgacgcaattataaaccaaaaaaagatcaatgaatcaggtgacgaaaaacaaaaattatattgtatttatgttgcagtaggtcagaagagatcaactgttagacaaattcaaaaaactttagaagaagctggtgcaaaatggaatatacaac

SEQ ID NO: 273390 - DNA, 377 bp, Unknown
  Bacterial polypeptide expressing nucleotide sequence isolated from the Sargasso Sea
catggtttccatccgtcccgacgagatcagcgccatcctcaaacaacagattgaggactacgacaagtcggtttccgtcagcaacgtcggcaccgtcctgacggtgggcgacggcatcgcccgcgtctacggcctgcagcaggctatggccggtgagctcctcgagttcgaggacggcaccgaaggcatcgccctgaacctcgaagacgacaacgtcggcgcggtgctgatgggtgagggttacggcattcaggaaggcagcacggtgaaggccaccggcaagatcgcctccgtgccggtgggcgaggccatgcttggtcgcgtcgtgaactccctgggccgcgccatcgacggcaagggtgaaatcgccacaagcg

SEQ ID NO: 273391 - DNA, 663 bp, Unknown
  Bacterial polypeptide expressing nucleotide sequence isolated from the Sargasso Sea
tatgaacattcaagcatctgagatatcgaagatattaaaagaacagataaaaaattttggtgacgatacagaggttgctgaggttggaaaagttttatctgttggggatggaatagcacgtatatatggtctagacaaagttcaagctggtgagatggttgagttccctggcggtacaatgggaatggcgctaaatttagagatagataatgttggcgtcgttatattcggctccgatagagatataaaagaaggagatcttgttaagagaaccagttcgattgtggacgtcccagtagggatggaactgctaggcagagttgttgacggcttaggcaatccacttgacgggaaaggccctattaaatcaaaaaaaagatcggtggccgacgttaaggctccgggaattattccccgaaaatctgtacatgaaccgatggcaacggggctaaaatctgttgattctctaatccccataggtagggggcaaagagagctaataataggagacaggcagactggtaaaaccgccgttgcagtagataccatattgaaccaaaaaagctataatgatgcagcaggaacagatgagagtaaaaaactctactgcgtttatgtagctataggacaaaagagatcgacagtcgcacaactagtaaaaaa

SEQ ID NO: 273392 - DNA, 819 bp, Unknown
  Bacterial polypeptide expressing nucleotide sequence isolated from the Sargasso Sea
tatggctagtttagatgatttaaaaaaaagaattttaagtgttaaatcaacacaaaaaataacaaaagcaatgaaaatggtggcggcggcaaaacttaaaagagctcaagaaaatgcagaaaaaggtcggccttattcagaaaaaatgaataatattatcttaaatttatctaacggaatatcagataaagaaaatgcaccaaagcttttagccggaaatggaaatgataaagttcatttatgtgtagttttaacttctgacagaggtctttgtggaggatttaactcaaacataattaaaaaagcgaaagcctattttaacaaaattgcaagtgagggaaaaaacttaaaaataattacggttggatctaagggtcatgaccaacttaaaagacaatataacgataaaatcgttaataaaatatcttttaaagaatcaaaaaatattaatttttttgatgctgagaaagtttcaaaaataatcattgaaagcttccaaaaaaatgaatttgatgtatgtactattttttataataaatttaaaaatgtaattactcaaataccacaagcacagcaaattattcctttaaaatcttctgaaactagtaaagataatgaaaaagataattatgaatttgaaccagaggaagatgaaatattagggaatttattgccaaaaaatatttctacgcaaattttcaaagctatgctagaaaattctgctagcgaacaaggatctagaatgagcgctatggataatgcgacaaggaatgcaggagaaatggttgataaacttactattcaatataatagaagcag

SEQ ID NO: 273393 - DNA, 748 bp, Unknown
  Bacterial polypeptide expressing nucleotide sequence isolated from the Sargasso Sea
tgcatgctttataatttatgatgatttatctaagcaggcagttgcttacagacaaatgtcccttcttttaagaagacctccaggacgtgaggcttatcctggtgatgtattttatctgcatagccgactactggaaagagcggctaaattaagtgatgagcacggcggaggttctttaactgcacttccgattattgaaacacaaggtggagatgtatctgcatttattccaactaacgtaatctcaattactgatggtcaaattttcttagaaacagaacttttcaatcaaggtattagacctgcaattaacgttggattatctgtatcaagggtaggatcttcagcacaaactaaagcaatgaaaaaagtatcaggatctatgaagttagagctagctcaatatagagaaatggcagcatttgctcaattcggttctgatttagatgcatcaactcaacaactattaaatagaggctctaaattaacagagcttcttaaacaaaaacaatactctccaatgacagtagctgaacaagttatttcagttttttgtggagtaaaaggttacttagacgatattgaacttaaagacattgctgagtttgaaaataaaataattgagaaatgtaagtctgataaacctgaaattatagattctattttagcttcaggaaaacttgaggacgatatggaaaaattacttgtagaagtaattactcaattaaaggaaaattttaaatcttaa

SEQ ID NO: 273394 - DNA, 793 bp, Unknown
  Bacterial polypeptide expressing nucleotide sequence isolated from the Sargasso Sea
aatgccaagtcttgatgatttaaggaaaagaattgctagcgtaaaatctacacaaaagattacaaaggctatgaaaatggtggccgcagcaaaacttcgtaaagcacaagaaatggctgaaaaaggaagaccttacagcgataaaatggatgtgattatacaaaatttaagcaaagcaattaatgacccctcaaatgccccaaagcttttagtaggaaccggagaagacaaaagtcatttgtgtgttgtaatgacagcagacaggggtctttgtggaggatttaacacaaatattgttaagttagcgaagaattattttaacaaaattttaaaagattctaagagtttaaaaataataacagttggctctaaaggtctcgatcaactcaagagagattatggaaaatatattattaaaaaaataaactttaaagataagaaaaaactatcttttgaagacgcagaagctattggaaatgaaatagtaaaattatttaaaaatagagaatttgataaatgtgtaattttttttaataagtttaaaaatgttatgactcaaataccgcaatctcagcaagtgattcctgcaaaaagtgaagaaaaattaaaagaagaacaggatttatcttatgaatttgagccagaagaagacgagattttggaagaccttcttcctaaaaatatttccacccaaatatacaaaggtttcttggaaaattctgcaagtgaacaaggttcaagaatgaccgcaatggataacgcgacaagaaacgcaggagacctggtagagaag

SEQ ID NO: 273395 - DNA, 546 bp, Unknown
  Bacterial polypeptide expressing nucleotide sequence isolated from the Sargasso Sea
aatggaaataaatccctctgaaattacaaaattacttaaggaacaaataaaaaactttggagaaaaagcggaagtttccgaagtaggtaaagttttgacggttggagacggtatagcaagagtttacggtctcgataacgttcaagctggagaaatggtagaatttaacgatggatcaaaaggtatggctttaaatttagaaagcgataatgtaggtgtagttatattcggtgatgatagacaaattaaagagggcgatacagtaaaacgtacaaattcaattgttgatgtaccagtaggtaaagagttactaggcagagttgttgatgggttaggtgtgccgatagatggaaagggaaacttgtcacctaaagttttaagaaaaagagttgaagttaaagctccaggtattatcccccgtcaatcagtaaacgaacctatgcaaacaggccttaaggcaatagatagcttaattccgattggaagaggtcaaagagaattaattattggtgatagacaaacaggaaaaacagcagtagctattga

SEQ ID NO: 273396 - DNA, 769 bp, Unknown
  Bacterial polypeptide expressing nucleotide sequence isolated from the Sargasso Sea
taaagcacagcaggctattttagacgctcgaccatatgccataaaaatgatggatgttattaatcatttggcggcacgttgtaatagtgatttgcatcccttgttagatgaccgcgaaggaaaaagaaccttgcttctcattattacttcggataaagggctttgtggaggttttaacggttccattattcgtaagacagcccagtacttgaaagataatgaccaaaacgaaaactccttaatagttgctggtaagaaaggaaacgatatttttagtaaccgtccagtaacgattgttgaagaccttgtgggttggactaaggactttgattatttaaaggcacaggctattggtgggaatttagccacaatgttttcggagaataaaatcgataaggttctagtagtttacaacgaatttaaatcggttatgcagcaggaagttgtcgtcgagcagttgctgccggttgtgccagaaaaagtcgagcagggaaaagattctgttgccatggattatatttacgagccggatgaggaaacgattcttaatgtattactaaaacgctatgtagcagatgtggtttatcgtgcatttttagagtctagtgcgagtgaacatggtgcccgcatgacagcgatggattctgctagccgtaatgcaggggaaatgatcgatggtttaacattaacctataataaagctcgacaggcatacataactaaagaattaatagaaatagtaaatggcgctgaggccctaaaaggctga

SEQ ID NO: 273397 - DNA, 561 bp, Unknown
  Bacterial polypeptide expressing nucleotide sequence isolated from the Sargasso Sea
aatgggttctggagacgtagtacaggttattggtgcggtggtcgacgtaaaatttgcggcaaacgaagtaccgaaaattttcgatgcgctgaacatagaaaacagtgagatcgtgttagaagttcaacaacaattgggtggcggtgttgttaggacgatagcccttggctctacagacggtttacggcgtgggataagtgcggtgaataccgggaagggtattaccgtgccagttggagagcagactttagggagaatcatgaatgtgcttggggaacctatagacgaatgtggcccgataggtgagcaagaacgtatggaaatacatcgtgaagcgcccaagtttgtagaactctcacctgcaacggaactattggaaaccggaatcaaagtgatagacctcatatgtccgtttgcgaaaggagggaaggtggggctgtttggcggagctggggtcggaaaaacagtcaatatgatggagttaatcaacaatattgcgactgaacattctggactttcggtttttacaggtgttggagaaagaacgagagaaggtaacga

SEQ ID NO: 273398 - DNA, 859 bp, Unknown
  Bacterial polypeptide expressing nucleotide sequence isolated from the Sargasso Sea
aaaaaaagaatttcaagtgttaaatcaacacaaaaaataaccaaagccatgaaaatggtagcgtctgcgaagttgagaaaagctcaagaaaatgcagagaaagggagaccattttctgagaaaatgaacaatataattttaaatttaagcaattctattaccgacaaagacagtgcctctaagtttttggttggaactggaaaaaacaatgtacacctgtgtgttgtaattactgccgatcgaggtctttgcggaggatttaataccaatatatgcagaaaagccaaaagttattttgagaatattttaaaagagggaaaaacgcttaaaatttttacaatagggtcaaaaggtcatgaccaattaaaaagagcgtatagtcaatacataatagagaaaataaactacaaaaatgttaaaaagcttacatataacgaagcagaagatgttgctaaaaaaataataaaactattcaacgattcccaatttgatatctgtactatattttataataaatttaaaaatattataactcaaactccacaagctcaacaaattataccaatcgaaagcccaacaaagactgaagaaaaaaagtctgaaagtttttatgagttcgaaccagaggaagacgaaatattgaacgatttacttccccgcaatatatcaactcaaatttttaaagcctttttagaaaatgccgcaagtgagcaaggttcaagaatgacggcaatggatagtgcaacaagaaacgcaggtgatttagttgataaattaactattaactataatagaagcagacaggccgcaatcactaaagaattaattgaaattatttcgggggcagaaagcttataat

SEQ ID NO: 273399 - DNA, 856 bp, Unknown
  Bacterial polypeptide expressing nucleotide sequence isolated from the Sargasso Sea
attacacaagttataggagcagtagtagatgttaaatttgatggagaattgcctgaaattttaactgctttagaatgtaaaaatggagataatagattagttttagaagttgctcaacatttaggggagtctagcgtcagaactattgcaatggatgcaacagaaggactaaaaagaggtgacgaagtaactgatactggagctcctataaaggttccagttggaccagaaacattaggaagaattgttaatgtagttggagaagcaatagatgaaaaaggtcaggttaaaactaaagaaagttggcctatacatagagcggcaccaaaatttaatgaccaatcaactgaaactgaaattttagttacaggaattaaagtagttgacttactagcaccctatgcaaaaggaggtaaaataggtttgtttggaggagctggcgtaggaaaaacagttattattatggaacttattaacaatatcgctaaggctcatggtggattttcagtatttgcaggcgtaggtgaaagaactagggaaggaaatgacctttatcatgaaatgatagagtccggtgtaattaaaccggatggaccagggtcaaaagcagctttagtatatggacaaatgaatgaacctccaggcgcaagagctagagttgctttaactggattaacagtagctgaatattttagagatcaggaaggtcaagatgttctatttttcgtagacaatatatttagatttacacaagcagggtccgaagtttcggcattgctaggcagaataccttcagcggtaggttatcaacccacattagcgacagatatgggaaattacaagagagaatcacaac

SEQ ID NO: 273400 - DNA, 433 bp, Unknown
  Bacterial polypeptide expressing nucleotide sequence isolated from the Sargasso Sea
tctagaaagattgcggaacttggtatttatcctgcagtagatccacttgattctacttcaaggattttaactcctgacattttaggagatgagcattataactgtgcccaacgtgttaaagaattgcttcagagatataaagaacttcaagatataattgccattcttggtatggaagaattatctgaagaagacaaattagctgtagctagagcaagaagggttcagaggtttttatcacaaccatttcatgttgcagaacaatttactggaattccaggtgctttagttgatattaaggatacaattaaagggtttaacatgataatggatggtgagcttgatcacattcctgaagcggcgtttaaccttaagggtaatattgaagaagcaattgaagcaggtgaaaagatgcttgccgaaacaaaataaa

SEQ ID NO: 273401 - DNA, 555 bp, Unknown
  Bacterial polypeptide expressing nucleotide sequence isolated from the Sargasso Sea
ttacaaccacaaataaaggatctattacatctgttcaagctatatatgtgcctgcggatgatttaacagacccagcacccgccacatctttttcacacctagatgcaacaacagtattgtcaagacaaatagcagagataggaatctatccagctgtggatccattagactcaacttctagaatattagatccaagaatagttggtgatgaacattatagagttgccagagaggttcaaaaagtattacagacttacaaatctttgcaagatattattgcgatattaggtatggatgaactgtctgaagaagataaattaacagtggctagagctaggaaaattcaaagatttttatctcaaccgttttttgtggcagaagtatttacaggttctccaggaaaacttgttgatctggagtctacaattaagggttttgatgcaatttgcaaaggtgaatacgaccatttgccagaggcagccttttatatggtaggaacaattgaagaagctgttgaaaaagctgaaaaaatggcaaaagaggctgcagcataat

SEQ ID NO: 273402 - DNA, 730 bp, Unknown
  Bacterial polypeptide expressing nucleotide sequence isolated from the Sargasso Sea
atgccaagtttagacgatcttaagaagagaattaaaagcgttaaatctacacagaagattacaaaagcaatgaaaatggtagctgcggctaaattgaaaaaagcacaagaaaatgctgaaaaaggaagaccttacagtcaaaaaatgcaaaatataattcttaatttaactaaatcaatcaatgatccagaaaatgctcccaagctccttgtaggcacaggaaaagataaaatcaatttatgtgtggtattaacagcagatagaggattgtgtggtggttttaactctaatatttgtaaacttgcaaagacaaagtttgaaaagattttgagtgaaggaaaagaacttaaaataattacagtaggaactaaaggtttggatcagattaaaagagaatatggaaaatatgtaattaaaaaatttagttttaaaaataagaaacaaattacatttagcgaagctgaaacggtaggaaatgaaatcataaatttatttaaacaaaatcaatttgataaatgtattttgttttataataattttaaaaatgtaattacacagatcccacaagctcaacaaattatcccagcagaaaataactcatcaaaagaaaaagaagaaagcctgacttcgtatgagtttgaacctgaggaagatgaaattttagaagatttattacctaaaaatatttcaacacaagttttcaaagctttcttagaaaatgctgctagcg

SEQ ID NO: 273403 - DNA, 686 bp, Unknown
  Bacterial polypeptide expressing nucleotide sequence isolated from the Sargasso Sea
tatggctagtttggatgatttaaaaaaaagaatttctagtgttaaatctacacagaaaataactaaggctatgaagatggtggcagcagcaaaacttagaagagctcaagaaagtgcagaaaaaggaagaccttattctgaaaaaatgaataatataattcttaatctttcaaacggaatatctgataaagaaaatgcaccaaaacttcttgttggaactggagaagaaaaaactcatttatgtgttgttatgacgtcggatagaggtttatgtggtggttttaatacaaatattattaaaaaggcaaaacagtattttcaaaaaatattaaaagaaaataaaatattaaaaattataactgttggatcaaaaggttatgatcaactaaaaagacaatataaagaaaacattattgaaaaaatttcatttaaagactctaaaaatattaattattttgatgcagataaagttggaaaaattataattaatagatttgaaaaaaaagaatttgatgtgtgtgcaattttttataatcaatttaaaaacgtaataacgcaaataccgcaagaacatcaaattatacctttaaaatctaatgaagaaaaagatactatttctaacagcagttatgagtttgaaccagatgaagatgaaattttaagtaatttattgcctaaaaatattt

SEQ ID NO: 273404 - DNA, 461 bp, Unknown
  Bacterial polypeptide expressing nucleotide sequence isolated from the Sargasso Sea
tgcccatttagatgctactactgtattatcaagaaaaatttcagaacttggaatatatcctgctgtagatcccctagattcaacttctagaattctaactccagaaatattaggagatgaacattataattgtgctcaaagagtaaaggagttattacaaaagtataatgagcttcaagatataattgcaattctaggtatggaggagctatcagaagaagataagcttgctgtagctagggcaagaagagtacagcgttttctctctcaaccatttcatgttgcagaacaatttactggaataccaggtgcactagtagacataaaggatactatcaaagggttcaatatgataatggacggtgagctagaccatctaccagaagctgcttttaacttaaaaggaaatattgaagaggcaattgaggcaggagagaagatgttatcagaagcaaaataaa

SEQ ID NO: 273405 - DNA, 824 bp, Unknown
  Bacterial polypeptide expressing nucleotide sequence isolated from the Sargasso Sea
gctggagctgaagcactttaaatatgggaaagatatgagtaacggaacagtagtacaaataattggagcagtaatagacgtggagtttcccaaagaaaacttaccaaaagtttatgatgcacttagggtagatgaaaaagatctagtcttagaggttcaacagcagctgggagatggtgtggtaagaactatagccatgggggcatcagagggtttgcaaagaggggtatcagtaactaacacggggcaaccaatatcagttcccgttggagaggggactcttggaagaataatgaatattttaggtgatcctattgatgaaaaaggtgaaatagatgcaaaagaaaaaatgcctatccacagggcggcgccttcttacgaagaccaggcagactcctctgagcttttagagactggaatcaaggttatagatcttatttgtccttttgctaaaggcggcaaggtaggtctcttcggtggagctggtgttggaaagacagtaaacatgcaggaacttattagaaatattgcttatgaacacagtggattctcggtctttgcaggtgttggagaaaggacaagagaaggcaacgatatgtatcatgagatgatagagggaggcgtattggacaaggtagctcttgtttatggacaaatgaacgagcctcctggaaacaggcttagggtggggctttcgggacttactatggcagaaaagtttagagatgacggaagagatgttttgttatttatagacaatatttacagatatacccttgcaggaactgagtgctctgccttattgggcaggatgccctcagctg

SEQ ID NO: 273406 - DNA, 274 bp, Unknown
  Bacterial polypeptide expressing nucleotide sequence isolated from the Sargasso Sea
atgatcgagtctggtgttattaaacaggacggaccaggatttaaagcagcattagtttatggacaaatgaatgaacccccgggcgctagagctagagtggcacttactggattaactgtagcagaatattttagagatcaagagggacaagatgtacttttctttgttgataatatttttagatttactcaagcaggttcagaagtatcggcccttttgggtagaattccatctgcagttggttatcaaccaacattagcaaatgatatgggta

SEQ ID NO: 273407 - DNA, 364 bp, Unknown
  Bacterial polypeptide expressing nucleotide sequence isolated from the Sargasso Sea
aatggtagcaactccatcaacttcttcacaaacaaagggcgtagtccgtcaggtaattggacctgttctagatgtagaattcccagccgggaaattacccaaaatactaaatgctttaagaattgaagcaaagaatcctgctggacaagacatagcgctcactgcagaagtccaacagctacttggtgatcatagagtcagagcggtggcaatgagcggtacagacggtcttgtgagaggtatggaggcaatcgatacaggcgcaccaatatctgtgcctgttggagaagcgactctaggaagaatattcaatgttttaggagaaccagtagacgaacaaggtccagtaaacactacagatact

SEQ ID NO: 273408 - DNA, 844 bp, Unknown
  Bacterial polypeptide expressing nucleotide sequence isolated from the Sargasso Sea
ggagaaatggttgagttcgaggatggttcgaaaggaatggcattaaatctggaaaacgataacgttggagtagtaatatttggtgatgatagaaacataaaggaaggagacactataaaaagaacaaacgcgattgtagatgtccctgtcggtaaagaacttttaggaagagttgttgatggtttgggaaatccgatagatggaaaaggagctctttcagttaaaaatagaaaaagagttgaggtaaaagcaccaggtataattccaagacaatctgttaatgagccgatgcaaacaggcttaaaatccatagactctctcattccgattggaagaggacagcgagaattaataattggcgataggcagactggtaaaacagctgtagcgatagatgcaataataaaccaaaaaaaaatcaatgagtcctcggatgaaaagaaaaaattatattgtgtttatgtggcaatcggtcagaagcgatcaaccgtagctcagattacaaaaactttagaggaggcaggtgcattaaaatacacaacaatagttgcggctacagcatcagactcagctcctttacaatttttagcaccttacacgggttgtactataggcgaatattttagagataatggtatgcatgctttaatagtttatgatgatttatctaaacaagcagttgcttatagacaaatgtctttgttgttgagaaggcctccaggaagggaagcctatccaggtgacgtattttatttacatagtcgtctcttagaacgagcggctaaattaaatgaaaaaagtgggggcggatcattaacagctttaccaattatcgaaacgcaag

SEQ ID NO: 273409 - DNA, 622 bp, Unknown
  Bacterial polypeptide expressing nucleotide sequence isolated from the Sargasso Sea
tatggctaataatttaactggaaaaatatcacaagttcttggagctgttgtggatgtagagttcgatggtgaacttcctgcaatcatgaatgctttggaagttgataataatggaacaagattaatgctagaggttgctcagcatttaggtgaaaatgcagttcgtacaattgcaatggataccactgacggattagtaagaggtcaaacagcgactgatacaggtgcccccatttctatgcctgtaggtccagaaacacttggccgtattatgaacgttgttggagagcctgttgatgaaagaggtgacattggaacaacaaaaacttatccaatccacagacctgcccctgagtttgttgaccagtctacagaaacagaagttctagtaactggaataaaagttgttgatctattagctccctatgcccgaggtggtaagattggattatttggtggagctggtgttggtaaaacagttttgattatggaattaatcaacaacattgcgaaggcacacggtggttattctgtgtttgctggtgttggtgaaagaactcgtgaaggtaatgatttataccacgaaatgattgaatcaggcattattgatcttaaaggtaaa

SEQ ID NO: 273410 - DNA, 637 bp, Unknown
  Bacterial polypeptide expressing nucleotide sequence isolated from the Sargasso Sea
aatggaatatactactattgttgcggcaacagcatcagatgcagcacctctacaatttttggcaccatatactggctgtgcaatgggagaatactttagggataatggcatgcacgcattaattatatatgatgatctttcaaagcaagcagttgcttatagacaaatgtcgcttttattaagaagaccacctggaagagaagcttatccaggagatgtattttatttgcatagtagattattagaaagagcggctaaattaagcgatgaacatggaggaggatccttaacagctcttccaataattgaaacgcagggaggtgatgtttctgcatttattccaaccaatgtaatatcaattacagatggtcaaatctttttagaaacagagttatttaatcagggtattaggccagcaattaatgttggattatcagtctctagagtaggatcatctgcacaaacgaaagcaatgaaaaaagtttcaggatctatgaaacttgaacttgcacaatatagagaaatggcagcatttgctcaatttggatcagatttggacgcatcaacacaaaaacttctaaatagaggatctaaattgactgaattattaaaacaaaaacaatattcaccattaact

SEQ ID NO: 273411 - DNA, 851 bp, Unknown
  Bacterial polypeptide expressing nucleotide sequence isolated from the Sargasso Sea
gttgaagtaaaagctccaggtataatccctagacagtctgtaagcgaacctatgcagacaggtttgaaatcgatagactctctcataccagttggaagaggacaaagagaattaattataggtgataggcaaacaggcaaaaccgcagttgcgatagatgcaattattaatcagaaaaaaataaatgagtcctcagacgaaaagaaaaaattatattgcgtttacgtagcaataggtcaaaaacgttcaacagttgctcaaattacaaaaactttagaagaagctggagcgttaaaatacacaacgatagttgcagctacagcatctgactctgcacctcttcagtttcttgctccatatactggttgtacaattggtgaatattttagagataatggtatgcatgcattaatagtatatgacgatttatcgaagcaagctgtggcttacagacaaatgtccttattactaagaagacctccaggtagagaagcatatccaggtgatgttttctatttacacagtagattgctggaaagatccgcgaagttaagtgatgtcaatggcggaggctctctcaccgctttaccaattattgaaacgcaagccggagatgtatctgcttatattcctactaacgttatatcaattactgatggacaaatatttttagaaactgaactttttaaccaaggaatacgaccagcagtaaatgttggtctatccgtgtcacgtgtaggatctgcagctcaaactaaggctatgaaaaaagtagcaggttctataaaactagaacttgcacagtacagagaaatggctgcgttcgcacaatttggatcagacttagacgc

SEQ ID NO: 273412 - DNA, 583 bp, Unknown
  Bacterial polypeptide expressing nucleotide sequence isolated from the Sargasso Sea
gaatgaacctcctggagcaagagcaagagttgcgcttactggtttaactgtagctgaatacttcagagatcaggaaggtcaggatgtacttttcttcgtagataacatctttagatttactcaggcaggatcagaagtttcagctttattaggaagaattccttctgctgttggatatcaaccaacattagctactgacatgggtaatttacaagagagaattactactacaaacaaaggatcaattacatctgtacaagcaatttatgtacctgctgatgatttaacagatcctgctcctgccacgtcgtttgctcacttagatgcaacgactgtactttcaagacaaattgcggaaattggtatatatcctgcagtagatccacttgattcaacatcaagaattttagatccaagaattgttggtgatgagcattacagagtagcaagagatgttcaaagaatactacaatcatataaatcattacaagatattatagctattcttggtatggatgaattatctgaagaagataaactagttgtagcgagagctagaaaaatccagagatttttatctcaa

SEQ ID NO: 273413 - DNA, 802 bp, Unknown
  Bacterial polypeptide expressing nucleotide sequence isolated from the Sargasso Sea
attattggagcggtagtagatgtaaaatttgatggagaactaccagaaatattaactgcattagagtgtgataatggaggaaatagactagttttagaagtagctcagcatttaggggaatcgagcgtgagaactattgctatggatgcaacagaaggtctaaaaagaggagatgaagttacagatactgctgctccaattaaagttcctgttggcccagaaactctaggaagaattattaatgtaattggagaacctatagatgaaaagggcgaagttaaaacaaaagaaaattggcctattcatagatcagcaccagaatttaatgaccaatcaacagaaaccgaaattttggtaactggaatcaaagtagttgatttattggctccatacgcaaagggtggtaagattggtttatttggtggtgcaggtgtaggtaaaactgtacttatcatggaattaattaataacgttgcaaaggcacatggtggattttctgtttttgcaggagttggtgaaagaactagagagggaaacgatctttatcatgaaatgatagagtcaggagtaattaaacctgaaggtaaaggatcaaaagctgcattggtttacggtcaaatgaatgaaccaccaggagcaagagctagagttgcattatcaggtttaacagttgcagaatattttagagatcaagaaggacaagatgtactttttttcgtggataatatatttagatttactcaagcaggttcagaagtatctgcattattaggaagaataccttctgctgtaggataccaac

SEQ ID NO: 273414 - DNA, 709 bp, Unknown
  Bacterial polypeptide expressing nucleotide sequence isolated from the Sargasso Sea
agagataaagaaggtcaagacgttttgttcttcgtagataacatatttaggtttactcaagcgggatcagaagtatcagctctgttaggaagaatcccctcagcggtgggttatcaaccaacgctagctacagatatgggtaatttgcaggagagaattacctctacggataaaggctccatcacttctgtacaagctatttacgttcctgctgatgacttaactgatccagcaccggcaacatctttttcacacttggatgctacgacagtattatcaagacaaatcgccgaaataggaatttaccctgctgtagatccattagactcaacttcgagaattttagatccaagagtagttggtgaagagcattacagagtagctcgagatgtgcagaaaattttacaagcgtataaatctcttcaagatatcattgctattttaggaatggatgaactttctgaggaagataaattaaccgttgcaagagcgagaaaaatacaaagatttctatctcaaccgttttttgttgctgaggtatttacaggatctccaggaaaattagttgacctagatgatacgataaaaggttttgacgctatttgtaaaggagaatacgataatctacccgaagcagcattttatatggttggtggtatagaagaggttattgaaaaagcagaaaaattatctaaagacagtaaataat

SEQ ID NO: 273415 - DNA, 433 bp, Unknown
  Bacterial polypeptide expressing nucleotide sequence isolated from the Sargasso Sea
ttaaaagcagttgatgctatggttccaataggaagaggtcaaagggaattaattattggtgatagacagactggtaaaacagccgttgcaatcgatgcaatcattaatcaaaaaggtacgggcattaaatgtatttatgttgctattggtcaaaaacaatccaccgttgccaatgttgttagaaaactagaggaatatggagctatggaacacactattgttgtttcagccacagctgccgacccagcacctatgcaatatttatcagcctatgctggatgcacaatgggagaatattttagagataagggtgaagatgctttaatagtttatgatgacctttcaaaacaagctgttgcatatagacaggtatcattgcttctcaaaagacctccaggaagagaggcatatcctggagacgtattctatcttc

SEQ ID NO: 273416 - DNA, 791 bp, Unknown
  Bacterial polypeptide expressing nucleotide sequence isolated from the Sargasso Sea
gatgcaatacctctcagcatattcaggttgtgctttgggggaatattttagagacacagggcaggatgcattaattgtttacgatgatttgtcaaagcaagcagttgcttacagagagatatcgctattacttagaaggcctccaggaagagaagctttccctggagatgttttttatcttcactcaagacttttagagagagcagctagagtaaatgcggaatatgtagaaaaaattacagaaggaaaggtaaaaggtaaaacaggatctctaacagccttaccaattattgaaacacaagccggagatgtatctgcttttgttccaactaatgtaatttcaattactgatgggcagatatttttagaaacagatctttttaattcaggcgttagaccagctattgacccaggactttctgtatcaagagttggtggagctgcacaaactaagataattaaaaaacttagtggaggaattagaacagaccttgctcagtacagagagcttgcggcattctcacagtttgcatctgatctagatgacgcaacaaaagaacaactagaacacggtaagcgaattacagagcttcttaaacaaaaacaatattctccaatgagtgttgctgatcaagctatgagtttatatgcagccgataaaggatatatgaaagatgttgatatagataaagtaggtgactttgaatcagctcttttagcttattttgaatcagaaaaatctgacctaaaaaaacaaattaatgataccggagactgggatgacgatattg

SEQ ID NO: 273417 - DNA, 881 bp, Unknown
  Bacterial polypeptide expressing nucleotide sequence isolated from the Sargasso Sea
aatgttgctaaagctcacggtggattttcggtttttgcaggtgtaggagaaagaactagagaaggtaacgatttgtatcatgaaatgatagactctggtgttattaaaccagatggagaaggttctaaagcagctttagtatacggacaaatgaatgagcctccaggagcaagagctagagtagcactaactggtttaaccgttgctgaatattttagggatcaagaaggtcaagacgttttattctttgttgataatatttttagatttacacaggcaggatccgaagtatccgctttacttggtagaataccttcagcagtgggatatcaaccaactttagcaacagatatgggtaatttacaagaaagaattactacaacaaacaaaggctcaatcacatctgtacaagcaatttatgtaccagcagatgacttaactgaccctgctcctgccacttcgtttgctcatttagatgcaacaacagtgctttctagacaaattgctgagattggtatttatccagcggtagatcctttggactcaacttcaagaatattagatcctagaatagttggtgatgaacattatcgagttgcaagagaagtacaaaaagttttacaaacttataaatcacttcaagatattattgcaattttagggatggatgaattatctgaggaagataagcttattgttgcaagagcaagaaaaattcaaagatttctatctcaacctttcttcgtagcagaagtatttactggttcaccaggaaagcttgttgatttagagtctacaattaaagggtttgatgctatttgtaaaggtgagtatgaccacttacctgaggctgcattttacatgttggaactatcgaggaa

SEQ ID NO: 273418 - DNA, 628 bp, Unknown
  Bacterial polypeptide expressing nucleotide sequence isolated from the Sargasso Sea
tatgacttctgatagaggattgtgtggaggttttaatacaaatataattaaaaaagcaaaactatactttcaaaaagttttagatgaaggaaaagttttaaaaattattactgttggctcaaaaggttacgatcagttaaaaagatcttataaagataatattgttgaaaaaatatcttttaaagaatcaaaatatgttaattattttgatgccgataaagtaggaaaaataattatagataaatttgaaaaaaaagaatttgatgtatgtgcaattttttataatcaatttaaaaatgtaataactcaaataccacaagaacagcaaataattcctttaaaaaattctgagacagaaggatcttcatctgaagataactatgaatttgaaccagaagaagatgaaattttaagcaatttattgcctaaaaatatatctactcagatttttaaagctatgttagaaaattcagctagcgaacaaggttcaagaatgagcgcaatggataatgcaaccagaaacgcaggtgaaatggttgacaagcttactattcagtataatagaagccgtcaagcagcaattactaaagaactaattgaaattatatcaggagcagaaagtttataa

SEQ ID NO: 273419 - DNA, 257 bp, Unknown
  Bacterial polypeptide expressing nucleotide sequence isolated from the Sargasso Sea
tatgagaaaaggacaaatcacacagattattggggcggtagttgacgtaaaatttgatgaagaattaccagaaatattaactgcattagaatgcgataatgctggaaataggcttgttttagaagtagctcagcatttaggagagtcaagtgtaagaacaatagcaatggatgctacagaaggtttaaaaagaggagatgaagtgatagatacaggagctccaattaaagttccagttggtcccgaaacattaggaa

SEQ ID NO: 273420 - DNA, 682 bp, Unknown
  Bacterial polypeptide expressing nucleotide sequence isolated from the Sargasso Sea
aatgtcacttctattaaggaggccaccaggacgagaagcgtaccctggtgatgttttttatttacatagtagacttttagaaagatcagccaaattgagtgatacaaatggtggaggttctttaactgctttaccaataattgaaactcaggcaggtgacgtttcagcatatatccctacaaatgtaatttcgattacagacgggcaaattttcttagaaactgaattatttaaccaaggaattagacctgcggtaaatgttggattgtccgtttcgagagttggttctgctgcacaaactaaagcaatgaaaaaggtggcaggctcaataaaactagaacttgcacaatatagagaaatggccgcatttgcacaattcgggtcagatttagacgcttcaacacagcaattgttaaatcgaggggctaaattaacggaacttctaaaacaagatcaatattctccaatgacagttgctgaacaagtaatatcagtttttactggggtggagggatatttagatgatgtagatttggataagattaaaaaatttgaaaaggatattatcgaaaaaattaaatctgaaaatcctgagattatagactctatacaatctacaggaaaacttgatgaagataccgaaaaattattatcaaaagcaattgaggattacaaaaaataa

SEQ ID NO: 273421 - DNA, 507 bp, Unknown
  Bacterial polypeptide expressing nucleotide sequence isolated from the Sargasso Sea
aatgccaagcttagatgacttaagaaaaagaatttcaagtgttaaatcaacacaaaaaattacaaaagctatgaagatggttgcagctgcaaagcttcgtaaagcacaagaaatggccgaaaatggaagaccttatagtgataaaatgaatgtggttattcaaaatttaagcaaagctataagcgatccctcgaatgcgccaaaacttttaattggttctggcaatgacaaaacgcatttgtgtgtagtgatgacagctgacaggggtttatgcggaggttttaatactaatattgtcaagcaggcaaagaattactttaacaaaattttaaaagaatctaaaaatctcaaaataattactgtaggaacgaaggggttagatcaattaaaaagagaatacggtaagtatattgttaaaaaaattgacttcaaaaacaaaaaacaaatttcctttaaagatgcttctatagtcggagatgaaattgtaaaattatttaaaaataatga

SEQ ID NO: 273422 - DNA, 619 bp, Unknown
  Bacterial polypeptide expressing nucleotide sequence isolated from the Sargasso Sea
cttgaaagagcagctaaattaagtgatgaacatggtggtggatcacttacagcactgccaattattgaaacacaaggtggagacgtatccgcgttcattccaactaacgttatttcaattacagacggacaaattttccttgaaacagaactatttaaccaaggtataagacctgcaattaacgtaggtttatcagtgtctagggttggttcatcagctcaaacaaaagcgatgaaaaaagtttctggttcaatgaaattagagctagcacaatacagagaaatggcagcttttgctcaatttggatctgatttagatgcatctactcagcaacttttgaatagaggctctaaactaactgaacttttaaaacaaaaacaatattcacccatgactgttgcagaacaagttatttcagtattttgtggagtaaaaggttatttggatgatattgatttaaaagacgttgctgaatttgagaacaagattattgaaaaatgtaaatcagataagcctgaaattatcgaatcaattttaacttcaggaaaacttgaggaagataaagaaaaattacttgttgaggtaataactcaattaaaaggaaattttaaatcttaat

SEQ ID NO: 273423 - DNA, 878 bp, Unknown
  Bacterial polypeptide expressing nucleotide sequence isolated from the Sargasso Sea
tatgagtactaaaataaacccatcagaaatctcaagcatcataaaaaagaaaattgaagattataagggtgcaagttctgaatcaaatgtaggagaagttctttctacagcagatggcattgttcaaatttttggactagaggatgcaatgtatggagagctattagattttggagagggcacctatggcttggcgcttaatcttgagaatgattctgttggggcagttgttttaggtgacgctggacatatcaaggagggtcaaaaagtaaaaacaactggaagaattttagaagttcctgttggggaagggttaaaaggacgtgttattgacgcactaggtagaccaattgatggaaaaggggaagttaagtcagaaacaaatgcacctattgaagttgtagcgccaggtgttattgacagacaaggtgttgatcagccagttcaaacaggaatcaaatctatagatgtaatggtgccaattggtcgcggtcaaagagaacttattattggagaccgccaaacaggaaaaactgcaattgcagtagatgcaattattaaacagaaagattcagacataacatgtgtatatgtggcaataggccaaaaacagtctactgtagcaacagttgtaagacagcttgaagaagctgatgcactcaaaaatacaattgttgtttcagcaagtgcagcagaaagtgcttccttgcaatttttagccccttactcaggctgcactatgggtgagtattttagagatagaggcgaagatgctttaataatttacgatgacctatcaaaacatgctgttgcttatagacaaatatcactccttttaaaaagaccaccaggaagagaaacattttctggtgacattt

SEQ ID NO: 273424 - DNA, 477 bp, Unknown
  Bacterial polypeptide expressing nucleotide sequence isolated from the Sargasso Sea
tcttagaaactgaactattcaatcaaggaataagaccggctgttaatgttggattaagtgtttccagagttggatcagctgcacaaaccaaggcaatgaagaaagttgctggatccattaaactggagcttgctcaatatcgggaaatggctgcatttgcacagtttggttctgatttggatgcctcgactcaaaggctattgaatcgtggatctaaattaactgaattacttaaacaaaatcaatattcaccgctaagtgttgctgaacaagttatctcagttttttctggtgttaatggatatttagacgacatagatctaggagaaattaagtcatttgaatcagatttaattgatctaatgcgctcatctcatcaagatataattaattctattaatgattctggaaacttagatgatgacattaaggataaacttgttggtataattgaagagtttaaaaaaagcagataat

SEQ ID NO: 273425 - DNA, 920 bp, Unknown
  Bacterial polypeptide expressing nucleotide sequence isolated from the Sargasso Sea
aattcatcgatcagcccctaagcatgaagacttatcaacttcaactgaaatgttagttactggtattaaagttgttgatatgatggagccgtatacaaaaggaggaaaaacaggcctatttggcggtgctggagttggaaaaactgttttaattcaggagctgattagaaatattgctacagagcatggtggctactcggtttttgctggtgtaggagagagaactagagaaggaaatgatttatataatgagatgacagaatcaggtgttatcgaaaaaactactatggtatttggtcaaatgaatgaacctccaggtgcaagattaagagtagctcttagcggtcttacaatggcagagtattttagagatgatgaaggtagagatgtattactatttattgacaatatattccgatttacacaggcaggatcagaggtttctgcattattaggcaggatgccttctgctgttggttatcaacctactcttggtactgaaatgggtgatttacaagaaagaattacgtctacaaaaaatggatctattacttcagtgcaagctgtatatgttccggcagatgatctaactgacccggctcctgcaacagctttcgcacatttggacgcaacttcagttttagaaagaaaaatagccgaacttggtatatatcctgcagttgatccactggcatccacttctagaattctagaccctcgtgtgataggtgataatcattataatacggctcgcgaggttcagaatattcttcaaaaatataaggatttacaagatatcattgcgatactaggtatggatgagttatcagatgatgataaactttcggtttctagagcacgaaaaattaaaaggtttatgtcacaaccattttttgtagcagagcaatttactaagtgaa

SEQ ID NO: 273426 - DNA, 691 bp, Unknown
  Bacterial polypeptide expressing nucleotide sequence isolated from the Sargasso Sea
ggcatatcccggcgatgtattttatttacattcccgtttgttagaacgtgcttcgcgaattaatgaagattatgtagaaaagattacaaacggggaagtcaaaggtaaaacaggttcattaactgcattaccaattatcgaaacacaagcaggagacgtttctgctttcgttccgaccaatgtgatttcaataaccgatggtcagatatttttagaatcagacctttttaactcaggttttagaccagctattaacgcagggctgtcggtatcgcgagtaggcggtgctgcacaaaccaagattattaaaaaactaggcggcggcgttcggttggcgcttgctcaatatcgtgaactagcagcttttgcccagtttgcgtctgatttagatgaggcaacaagaaaacagctagaacgaggccaacgcgttatggagttaatgaagcaaaaacaatatacccctttaaatgtggctgaaatgggcgtcagtttgtttgctgtagaaaatggttttatcgatgatatcgagctggaaaaaattggcgcttttgaatcagcattacatgattatatgaaaagtgaacaatcggctttaatggataaaattggtgtcgagggtaattacgatgatgatattgaaactgaaatgaatagcgcgattgataagtttaaaaaaaataatacttggtaa

SEQ ID NO: 273427 - DNA, 463 bp, Unknown
  Bacterial polypeptide expressing nucleotide sequence isolated from the Sargasso Sea
ttgctccttagacgcaacaactgtactttctagacagattgctgaaattggaatttatccagctgttgaccctttagattcaacttcaagaattctagatcctagaatagttggagacgagcattatagagttgctagagaggtacaaaaagttctgcaaacttataaatctttacaagatattatcgcaattttaggtatggatgaattatccgaagaagataaattagttgttgctagagccagaaaaatacaaagatttctatctcaacctttctttgttgctgaagtatttactggttcgccaggtaaacttgttgacttagaatcaacgatcaaaggctttgatgctatttgcaaaggtgaatatgatcatctgccagaagctgcattttatatggttggtactattgaggaagctgtacaaaaagctgagagtttagctaacgaagctgccgcataa

SEQ ID NO: 273428 - DNA, 874 bp, Unknown
  Bacterial polypeptide expressing nucleotide sequence isolated from the Sargasso Sea
gattcagatcttcctcaaatattagatgctcttcaggttgataataatggacaaaaactgatattggaagtggcacagcatcttggtgaaaacgaagtaaggactatagctatggatagcaccgatggtttagtccgtggcatggacgttgtccaaacaggtgctccaattacggttcctgttgggccagacacattaggtagaattcttaatgttattggtgatccagtagatgatggcaagccggtaaagtccaaaacaacattaccaattcatagagatgccccagaatatgttgatcaatccacatctgctgatattttggtaacaggcataaaagtggttgatcttttagcaccttatgcaaaaggaggtaaaattggactttttggtggtgctggtgttggtaaaacagttttaattatggagcttataaataatgtagctaaagcacacggtggatattctgtatttgcaggtgttggcgaaagaactagagaaggtaatgatctttttcatgaaatggtagaatctggagttattgttccagatggtccaggttctaaagcagcacttgtatatggacaaatgaatgagcctcctggagcaagagctagagtagctttaacaggattaacattagctgaatattttagagatcaagaaggtcaagatgttctatttttcgttgataatatttttagatttactcaagctggatctgaggtttcagctttattaggcaggataccatctgctgtaggttatcaaccaacgttagctacagatatgggagcacttcaagaaagaattacaactacgacaaaaggatctattacttcagtgcaagcaatatatgttcctgcagatgatt

SEQ ID NO: 273429 - DNA, 871 bp, Unknown
  Bacterial polypeptide expressing nucleotide sequence isolated from the Sargasso Sea
ggcaaaactcattggcgaagtaattcgtcttacaggcgatgtagcatttatccaagtttatgaatcaacaagtggtctaaaacctggtgaacctgtagtaggcacaggaaatccactaagtgttcttttaggacctggaattattggtcaaatttatgatggaattcagagaccactaaaagacttggcagacaagtctggttcttttatcggacgcggaattactacaactcctgtagatatgacaaaaaaatatcatttcaatccaactgttgcagttggtgatgaggtagaaccaggaaacatcattggaactgttccagaaacttcattaattgaacacaaaattctagtcccaccaaatcatgcaggtggaaaaattacaaaaattgttagtgaaggagattatgatcttgaaactgaaattgcagttgttgaaaaagatggtcaatctgcaccactaaagatgtatcacaagtggcctgtaagatcacctagaccttacttgaaaagatatgatccaacaattccattgcttactggtcaaagagttattgacacattcttcccattagccaaaggtggaactggttcaattccaggtgcttttggaactggaaagacagttactttacaccagattgcaaaatgggctgattctcaagtagtagtctacattggttgtggtgaaagaggaaatgagatgacagaagttctagtcgaatttccagaactaaaagatcctcgtacaggaaaacctctaatggatagaactgttcttgttgcaaacacttcaaacatgccagtagcagcaagagaggcaagtatctacactggtgttacaattgcagaatattatagagacatggga

SEQ ID NO: 273430 - DNA, 823 bp, Unknown
  Bacterial polypeptide expressing nucleotide sequence isolated from the Sargasso Sea
atcatccagcagcaaatcgaaaatttcgagaagcagaccacaaaaaccgaagttggaaccgtcttggaagtcggtgatggaatcgcacgagtctatggacttgacaacattgttgccggcgaacttgttgaattcccaaataaccttcaaggcatggccctcaatctggaagaggataatgtcggtgtcgtactttttggtgatgaccgaaacatcaaggaaggagacgaagctagaagaaccgagcgtatcgcagaagttcctgtaggtgatgccatgctaggtcgggttgtggaccctcttggacaaccgattgatggcaaaggaccgattgagacctcagaaagcagaagagtcgaagtcattgctccgggtattgtcacacggaagtcggtgcatgaacctcttcagacaggtctcaaggcaatcgactcgatggtcccgattggacgcgggcaacgtgagttgatcattggcgaccgccaaactgggaagaccgccatcgcgatggataccatcatcaaccaaaaagggggtgatgtggtctgcatctatgtagggatcggtcagaagcgttcaacgatggcgaagattgtctcaaaactccaggagtatggtgcaatggaatacaccattgtggtctctgcaaccgcttcagaacctgcacctctgcaattcctggcaccctactccggtgtcagcatgggggaatatttccgggataaaggaaaacatgtgctttatatctatgacgatctttcgaaacaggccgtggcatatcgaaagctttctcttttgttgagacgccccccctggacgcgag

SEQ ID NO: 273431 - DNA, 724 bp, Unknown
  Bacterial polypeptide expressing nucleotide sequence isolated from the Sargasso Sea
tatggcaagtttagatgatttaaaaaaaagaatagtgagtgtaaaatctactcaaaagattactaaggcgatgaaaatggtagcagcggctaaacttaagagagcacaagaaaatgctgaaaaaggaagaccatattcagaaaaaatgaataatattattttaaatctagctgatggaatatctgacaaagaaaatgcacctaaattgctagcgggaactgggcaagacaaaatacatttatgcgttgtattaacttctgacaggggtctttgtggtggttttaactcaaatattattaaaaaagccaagatttattttggaaaagtattaggagaaggtaagacactaaaaattattactgtaggatcaaaaggatatgatcaactaaaaagattatatagtgataaaattgtcgaaaaaatatcttttaaagagtcaaaaaatgtaaattattttgatgctgaaaaagttggaaaaataataattgaaagttttttaaaaaaagaatttgatgtatgtacgattttttataataaatttaaaaatgtgattacccaaatacctcaagaacaacaaataattcctttaaaatcatctgagtcagaagattctgcttcagaggataattacgaatttgaaccagaggaagatgaaatattgagtaatttattaccaaaaaatatttcgactcaaatttttaaagcgatgttagagaattcagct

SEQ ID NO: 273432 - DNA, 943 bp, Unknown
  Bacterial polypeptide expressing nucleotide sequence isolated from the Sargasso Sea
agttatcgatttaatttgtccttttgctaagggtggaaaaattggtctctttggcggtgctggtgtaggtaaaacagtgaacatgatggagctcattaacaatattgcaaccgagcactctggtctatcagtgtttgccggtgttggagaaagaactagagaaggaaatgatttttattatgaaatgcaagaatcaggcgttgttaacgtagaaaaaccaagcgaatcaaaagttgcgatggtatatggccaaatgaatgagcctccgggcaacaggctaagagtagctttaacaggcttaacgattgctgaaaagtttagggatgaaggacgggatgtgcttctctttattgataacatttacagatatacgcttgctggtgttgaagtatcagctctattaggtaggatgccatcagcggtgggatatcagccaactcttgctgaagaaatgggcgcgcttcaagagagaattacatcgacaaagattggatcgatcacctcaattcaggcagtttatgtgccagctgatgatttaaccgacccttcacctgcgactactttcgctcacttagatgctacagttgtgctttcaagacaaattgctgagttaggtatttatcctgctgttgatccgctagattctacttcaagacagttagatccgttggttgttggagctgagcactacgaggttgcacaaggtgttcaaggagtgctacaacgctatcgagagcttaaagatatcattgctattttaggtatggacgaactctctgaagaagataagctaacagttgcaagggcaagaaaagttgaaagattcttgtctcaaccattcttcgttgcagaggtttttacaggatctcctggaaaatacgtttctttagaagatactattaaagcctttaaagggatcttagcaagcgattatgacgacctt

SEQ ID NO: 273433 - DNA, 840 bp, Unknown
  Bacterial polypeptide expressing nucleotide sequence isolated from the Sargasso Sea
tgaaaaacagaagttatattgtgtttatgttgctataggtcagaaaagatcaaccgtaagacaaatagaaaaaaccttacaagaagctggagcaatggaatatacaacaatagtggctgcaaccgcttcagatgcagcgccactacagtttttagcaccatatactggttgtactatgggagaatactttagagataatggtatgcatgctttaattatttatgatgatctttcaaaacaagcagttgcatatagacaaatgtcattattacttagaaggccaccaggacgtgaggcttatcccggagatgtattctatcttcacagtagattgctagaaagagcagctaaactaagtgatgaacatggaggaggatcactgacagcgcttcctataatagagactcaaggaggggacgtttctgcatttattccaacaaacgtaatctcaattacagatggtcagatattcctagaaactgaactttttaaccaaggaattagacctgcaattaatgtaggcttatcagtatcaagagttggatcctcagcacaaactaaagcaatgaaaaaagtttctggatcaatgaaacttgagttagcacaatatagagaaatggcggcatttgctcagtttggatcagatttagatgcatctactcaaaaattattaaacagaggttctaaattaactgaactattaaaacaaaaacaatactctcctatgactgtagctgaacaggtaatttcaatattttgtggtgttaaaggtcatttggatgatattgaacaaaaaaatattgctgattttgaaaataaaattatagaaaaatgcaagtc

SEQ ID NO: 273434 - DNA, 853 bp, Unknown
  Bacterial polypeptide expressing nucleotide sequence isolated from the Sargasso Sea
tttgaaacttgggattaaagttatcgaccttttagcgccttatagacaagggggaaaagttggattattcggaggtgctggtgttgggaaaacagtacttattcaagaattaattaataatattgccaaggaacatggaggcgtctctgtttttgggggcgtaggggaaagaacaagagaaggtaacgatttatatgaagaatttaaagaatcaggcgttatcaatgcagatgatttaactcaatcaaaagttgcattatgttttggacaaatgaatgagccacctggtgcaagaatgagagttggcttatcagcacttacaatggccgaacattttagagatgtaaataaacaagacgttctactttttgttgataacatttttagattcgttcaagctggttctgaagtatctgcattacttggaagaatgccttcagctgttggataccaaccaactctaggaactgatgttggtgaattacaagaaagaattacatctacgctagaggggtcaataacatctattcaggctgtatatgttcctgctgatgacttaacagacccagctccagctacaacttttgcccatttagatgctactaccgtgcttgcaagagctcttgcggctaagggaatttatccagcagttgatccattagactcaacaagcactatgctacagccatcagttgtgggagatgagcattacaaaacagccagggctgttcaatctacattacaaagatacaaagaacttcaagatattattgcaattcttggtctagatgagctttctgaagaagatagattaacagtagacagggccagaaaaattgaaaaatttctttca

SEQ ID NO: 273435 - DNA, 877 bp, Unknown
  Bacterial polypeptide expressing nucleotide sequence isolated from the Sargasso Sea
tatggctagtttagatgacttaaaaaaaaggatttcgagtgttaaatccacgcaaaaaataacaaaagctatgaaaatggtagctgctgctaaattaaaaagagcccaagagagtgcagaaagaggaagaccatattctcaaaaaatgaacaatgttattctaaatttatctaacggaatatcagacaaagaaaatgcgccaaagttaatgtctggaactggaaaagataagacgcatctttgtgttgttttgacctcagatagaggtttatgtggtggatttaatgcaaatattattaaaaaggcaaaaagtttttttagaaaattagataaagaggataaagagctcaaaataattactgttggatctaaaggtaatgatcaattgaaaagactttacggagataagataatagagaatatctcttttaaaaattcaaaaaatgcaaattattttgatgctgaaaaagttggtaaaattattattgaaaaatttgaaaaaaacgaatttgacttttgtacaattttttataatcaatttaaaaacgttattactcaaataccacaagctcaacaaataattcctctaaacacagatatcgatgaggagaataaatctgaggagacttatgagttcgagcctgatgaagatgaaattttaaataatttgttgccaaaaaatatctcaacacaaatttttaaggcaatgttagagaattcagctagcgagcaaggagcaagaatgagtgcaatggataatgctactagaaacgcgggtgaaatggttgataaacttactattgaatataatagaagtcgtcaagcagcaattactaaagaactaatagaaattatatcaggagcggagagtttataa

SEQ ID NO: 273436 - DNA, 301 bp, Unknown
  Bacterial polypeptide expressing nucleotide sequence isolated from the Sargasso Sea
tttctatgccggtctgagccgcaagggtctgcgcttcttcgagctgtacgtggagccgaccccgatcatgctcccgttcaagatcatcgaggaattcaccaagcccctgtcgctctccttccgtctgttcggaaacatcctggccgacgaactcgctgtgggcgttctggtgtatctcgtgcccctgctggtgcccctgccggtgatgttgcttggcctgttcaccagtgccattcaggcgttgatcttcgcgaccctcaccgccttctacatcggtgaaggtctgcacgaggcccactaa

SEQ ID NO: 273437 - DNA, 715 bp, Unknown
  Bacterial polypeptide expressing nucleotide sequence isolated from the Sargasso Sea
tatgaaaaaaggaaaaattacacaaattattggagctgtagtagatgtaaaatttgatggtgaactaccagaaattttaacagcactagaatgtaaaaatggtgaaaatagattagttttagaggttgctcagcatttgggagagaccagcgttagaacaattgctatggatgctacagagggattaaaaagaggagacgatgtaactgatacaggggcacctataaaggttccagttggcccagaaacgttaggaagaattgtaaatgtgattggcgagcctattgatgaaaagggtgaagtaaaaacaaaagaaagttggcctatccatagagcagcaccagaatttaatgatcaatcaactgaaacagaaattttggtaacaggaataaaagtagtagatttattggcaccttatgcaaagggtggtaaaataggtttgtttggtggtgctggagttggtaagacagtattaattatggaattaattaataacgttgcaaaagcgcacgggggattttcagtttttgcaggagtaggagaaagaactagagaaggtaatgacctataccacgaaatgatcgagtctggcgttattaagccagatggtgaaggttctaaagctgcattagtttatggtcaaatgaatgaaccaccgggtgcaagagccagagtagcattatcgggtttaacagttgcagaatattttagagac

SEQ ID NO: 273438 - DNA, 736 bp, Unknown
  Bacterial polypeptide expressing nucleotide sequence isolated from the Sargasso Sea
taaaaaatttaatgatattctaactaatgtttcctctactctagataattctgatcatccgatgatgaaaagtaataagggtaataaaattttattaattgcattatcttcaaatagaggtttgtgtggcgggtttaataataatattgttaaagaaataaaaaaaactatttcttctaatcctgaaaataagtacagcatcttaacagttggtaaaaaagtatttgatgcatttaaaaaatcagatttaattaataatagtgaccaactaccaaaagatacccaatccatatgggattctttaaattatgagaattctataggtataactaataaattaattagttcatttaagaataaccaatttgataaagcatacataatctataattcatttaaaaacgctgctattcagaccatacagaatgaaccttttttgcctgtaagtcaacctaaaaatgaatccagtaccaatacggattatatttatgatccagataaagaagaaattcttaacgatttaattcctcaatctttaaaaatacaattatataaagctcttttagattcatttgcttcagagcatggtgcgcgaatgactgctatgcacaaggctacagataatgcaaatgaaatgaaaaatgatcttaaattattttacaataaagcccgtcaggcagctataaccaatgaaattcttgagattgttgctggggcagaggctttaggaggataa

SEQ ID NO: 273439 - DNA, 441 bp, Unknown
  Bacterial polypeptide expressing nucleotide sequence isolated from the Sargasso Sea
aatggcaagtttagacgatttaaaaaaaagaatatccagtgttaagtccactcaaaaaattactaaagctatgaaaatggtggcagctgcaaaactaagaagagctcaggagagcgctgaaaaaggaagaccttactctaaaaaaatgaataatattattctaaatctatcaagtggaatttctgataaagaaagtgcaccccaattacttgtcggatcaggtgaaaataaaattcatctatgtgtagttttaacttctgacagaggtttatgtggtggttttaatagcaatattattaaaaaagcaaaatcttattttcaaaagattttaaatgaaggaaaaactttaaaaattattactgttggatcaaagggttatgaccaattaaaaagagtatataaagataatattattgaaaagatttcttttaaagagtctaa

SEQ ID NO: 273440 - DNA, 571 bp, Unknown
  Bacterial polypeptide expressing nucleotide sequence isolated from the Sargasso Sea
atgtcaaaaaaagttggtaatgtttctcagataattggtccggtagtagacgtttcttttgatacaacaagtacagaattacctaagatttatgattccttagaaattattaaagatgatggttcagtacttgttcttgaagttcaatctcatgtaggtgaggatatggttagaacaatttctatggactcaactgatggcttacaaagaggagctgaggtagtttctactggaaatccaattcaaatgcctattggtaaagatatatatggtcgtttatttaatgttattggagatgctattgatggtatggagaacttacccaaaattgaagaaaatggtttaccgattcacagagaggcgccaccttttgagcagctttcaacatctacagaagttttatttacaggtataaaagttattgatcttattgaaccttacgcaaaaggtggtaaaattggtttatttggtggagccggtgttgggaaaacagtacttatccaggaattaattaataatatagcaaaagggcatggtggattgtcagtttttgctggtgtggtgaaaggac

SEQ ID NO: 273441 - DNA, 720 bp, Unknown
  Bacterial polypeptide expressing nucleotide sequence isolated from the Sargasso Sea
attaataacgtagctaaggaatcaggaggatattctttttttgctggagtaggagagagaactagagaaggtaacgacctatacatggaaatgaaagaatccggagttttaaataagacaggcttagtgtttggtcaaatgaatgagcccccgggagctagagctagagtagcgttgacgggtctaacgcaagctgaatattttagagacaaagaaggtcaggatgtattgctttttgtagacaatatttttagattcactcaagctggatctgaggtttccgccttgcttggaagaattccctcagctgttgggtatcaaccaaccttggcaacagacttaggagcattacaagaaagaattacttcaactgttaatggatcaattacatcagttcaagcaatctatgtacctgcagatgatttgactgatccagctcctgccacaacttttgcacatttggacggtacaattgttctgtctagacagctagccgaacttggaatatatcccgctgttgatccattagattcaacatcaagaatgttagatccaaggatagtaggtgacgagcactacagagtggcccgtgaagttcaaagaattcttcaaagatacaagcaattgcaagagataattgctattttgggtatggatgaattatccgaacaagataagattgatgtctcaagggctagaaaaatccagagatttttatct

SEQ ID NO: 273442 - DNA, 764 bp, Unknown
  Bacterial polypeptide expressing nucleotide sequence isolated from the Sargasso Sea
tatgagcaaaggaataatcacacaagttattggagcagtagtagacgtaaaatttgaaggagagcttccagaaattttaacagctttagaatgtaaaaatggggataacagattagttttagaagttgctcagcatctaggcgaaactactgtaagaacaattgcaatggatgcaactgagggattaaagagaggagatgaagttactaatactaaagctcctatacaagttcctgtaggacctgaaactcttggaagaattataaatgtgattggagaaccgattgatgaaagaggagaagttaaaacaaaagaaacatggccaattcacagagcagcacctgaatttaatgaccaatcaactgaaacagaaatattagtcactggtattaaagttattgatcttcttgctccatatgcaaaaggaggaaaagttggactttttggaggtgctggtgttggaaaaacagttttaattatggaattgattaataacgttgctaaagctcatggaggcttttcagtttttgctggcgttggtgaaagaactagagaaggaaatgatctttatcatgagatgatagagtctggagtaattaaaaaagatggagacgggtcaaaagctgctttagtttatggacaaatgaatgagccccctggagcaagagcaagagtcgcgcttacaggtttaactgtagcagaatatttcagagatcaagaggggcaagacgttcttttcttcgtggataatatttttagattta

SEQ ID NO: 273443 - DNA, 892 bp, Unknown
  Bacterial polypeptide expressing nucleotide sequence isolated from the Sargasso Sea
attccacgacaatctgtaagtgagccaatgcaaactggtctaaaatcaattgatagtttaataccaattggtagaggccaaagagaattaataattggagatagacaaacaggcaagaccgcagttgcaattgatacaattataaatcaaaaggaaattaataaatctaataatgaaaaagacaaactgtattgtatttatgttgctataggacaaaaaagatcaacagtagcacaaatcgttaaaactttagaggaagccggcgcaatgagttatacaactattgtttctgctaccgcatcagatcctgctcctttgcaatttttggcgccttactcaggctgtactatgggagagttttttagagataatggaatgcatgctctaattatttatgacgatttatctaaacaggcagttgcctatagacaaatgtcacttttattacgtagacctcctggaagagaagcttatcctggtgatgtcttttacttacacagtaggttgctagaaagagccgctaaacttaatgataaacaaggaggaggttcattaactgcccttccaataatagaaactcaggctggagatgtttcagcatacataccaacaaatgttatttcaattacagacggtcaaatttttctagaaacagaactttttaatcagggtattagaccagctgtaaatgtcggtttgtctgtatctagagttggttcagcagcacaaacaaaagcaatgaaaaaagttgcaggttcaataaaacttgagctagctcagtatagggaaatggctgcttttgctcaatttggctcagatttagatgcagctacacaaaaattattaaatagaggttcaaaattaactgaactccttaaacaaaaccaatact

SEQ ID NO: 273444 - DNA, 763 bp, Unknown
  Bacterial polypeptide expressing nucleotide sequence isolated from the Sargasso Sea
cccggcgcccgcgcccgagtggggctgacaggcttgacgctcgccgaatacttccgtgacgaggaggggcaggatgtgctcctctttatcgacaacatcttccgctttacgcaggcgggatcggaagtgtccgcgttgttgggacgcattccttcggcggtcggctatcagcccaccctgggaactgatatgggccagctgcaggaacgcattacctcgacgaacaaagggtctatcacgtcggtacaggcgatctacgtgccggcggatgatctgaccgatccggcgcccgcgacggcattctcgcacctcgatgcgacgacggttctcaatcgccagatcgcagagctcgggatttacccggctgtggatcctctggactcgacatcgcgcatgctcgatccgcggattatcggtgacgaacactacgaagtggcgcgcgaggttcagcgtgtcctgcaaacctataaatcgctccaggacatcatcgcgatcctcggcatggacgagctctccgaggacgacaagctgactgtgtcgcgggcacgcaagctgcagcgtttcctcagccagccgttccacgtcgcagaggtcttcaccggacatgccggtgtcttcgtaccgctggaggagacgatcagaggattccaggaaatcgtcgccggcaaacatgacgacctgcccgaagcagcgttctacatggtcggcacgattgatgacgttgtcgagaaggccaaggagatggcggccgaagccgcgtagc

SEQ ID NO: 273445 - DNA, 865 bp, Unknown
  Bacterial polypeptide expressing nucleotide sequence isolated from the Sargasso Sea
acctattgatcaaaaaggtaaagtggcgacaaaagaaagttggccaatacatagacctgccccaaaatttacagatcaatctacagagacagagatactggttacagggataaaggttgtagatcttctagcaccttattcaaaaggaggtaaaattggtttattcggtggagctggagtaggaaaaacagtaattataatggaattaataaataacattgccaaagctcatggaggattttctgtatttgctggagtaggagaaagaactagagagggaaatgatttgtatcatgaaatgatcgaatcgggtgtaattaaacctgatggaaaaggttctaaagcagccctagtgtacggacaaatgaatgaaccacctggagctagagctagagttggtttaacaggattaaccgttgcagaatattttagagacaaggaagggcaagatgtattattttttgtcgataacatatttagatttacccaagctggttcagaagtttcagcattactaggaagaattccatcagcagtaggttatcaaccaactttagcaactgatatgggaaatttacaggaaagaattaccacaacaaataaaggttcaataacatctgtccaagccatatatgttcctgccgatgatttaactgatcctgctccagcaacttcgtttgcacatttagatgcaacaacagttctatcaagacaaattgccgaacttggaatatatccggcagtagatcctttagattctacttcaagaattttagatccaagaatagttggcgaagaacactatagggtagcaagagaagttcaaaaaatattacaaacatataaatctttacaggatataatt

SEQ ID NO: 273446 - DNA, 460 bp, Unknown
  Bacterial polypeptide expressing nucleotide sequence isolated from the Sargasso Sea
tttggaaggcatcgcgaaaggcgcaattgagtttgctgcggcgtccgatattggcgcaagattaatccagatgtttgaggcgggcgacttcgatgtttgctcacttatttataataaattccaatctgccatgacacagattgttaccgtacagcagatcattcccgcaagtgttccagaagaggtggatgctgctccatcattgggagcttatgaatacgaacctgatgaggaacagattttagcagaattgttaccaaggaatgtatctacacaagtattctcagccttactagaaaatacagcgagtgaacatggggcgagaatgacggctatggatagtgctactcgcaacgcgggtgatatgatagacaagctaactttgacgtataacagaacaagacaagccttcattactaaagaacttatagagattatatctggtgctgaggccttgtga

SEQ ID NO: 273447 - DNA, 323 bp, Unknown
  Bacterial polypeptide expressing nucleotide sequence isolated from the Sargasso Sea
aatgagtactaatgcaaccggtaaaattacacaggttattggtgcagtcgtggacgttcagtttgaaggtgatctgccaccaattttaaacgctctgcatactcaaaatggtgatacgcgacttgttctggaggtggcgcagcatttaggcgaaaatatggttcgaaccattgctatggatagtaccgaagggctcgttaggggaagcgaagttatcgatacaggtgacgccataaaggttccagtaggaccagagactctcggtagattgataaatgtaatcggtgagacaattgatgagggtgagcctataaaatctaaaa

SEQ ID NO: 273448 - DNA, 613 bp, Unknown
  Bacterial polypeptide expressing nucleotide sequence isolated from the Sargasso Sea
actaatgtgatttctattacagacggtcagatattcctacaagacgacctcttcaaatcaggtataaggccagcaattgatgtaggtatttccgtttctagagttggttctgcagctcaagtaaaggcaatgaaaaatgcagtaggaactctcaagtcggatttgcagcagttccgtgaacttgagtctttcgcagcgttcggatctgatttagatgcagtttctcaggctcaactcgatcgaggataccgattaacagagctgctgaagcaaggattgaactcacccttgttagtcgaagagcaagtagtttctatctgggctggtaccaggggtcatttagataatgtcgaaatcgctgatgtcagtaggtttgaatcagaattacttgactggtttaggacacgtcacggagcgattttgagcgaaatacgtgaatcaggaaatataggcgatgaggatgctttcgaatcagcaattgcagctttttcagagcagtttgaaggtacaaatcctactcaagatacgccagatgcagagtttgctgatacggattcgaacatagttgatgcagatacaactttgcctgaggaagatatttcggaggcctagt

SEQ ID NO: 273449 - DNA, 933 bp, Unknown
  Bacterial polypeptide expressing nucleotide sequence isolated from the Sargasso Sea
gagaaacaaacacaaattgttcttgaagtcgcacagcatttaggtgaaggaaaaattagagctatttctatgcaaggtacagatggtcttcgaagaggtgctgaggttagtaatactggttctcctatttccgttcctgttggtgaagctaccttaggtcacatctttaacgtttatggccgttcattagatgttcctactgaatctcttgatattaaagagaggtggccaatccatagaaacccacctccattcgaagaagtgacagcacaaaatgaaatgtttgagactggtattaaagtaattgatcttttaattccttacgtacaaggtggaaagataggattatttggtggtgctggtgttggaaaaacagttcttattcaagaaatgattaacagagtagcaacacaccatagtggagtctctgtattcgctggtgttggagaacgaacaagagaaggaaacgaccttttccgagagatgcaagagtcaggagtaattgacaagactgcattagtgttcggtcagatggatgaaccgcctggtgttaggttgcgagttgctctttcagccctaacaatggcagagtattttagagatgtagaacaacaagatgtattgttatttattgataatattttcagatttagccaagctggttcagaagtatcaacattattaggacgtatgccttcagctgttggttatcagccaacacttgctgatgaaatgggcttccttcaagagagaattacttctctaaaaggaagatctattacctcgctacaggctgtatatgtacctgctgatgatattacagaccctgcaccacatactgcttttgctcacttagatgcaagaacagttttagacagaaaagttgcagacttaggtatctatcctgcagttgtcctcttgactcatcaagtc

SEQ ID NO: 273450 - DNA, 870 bp, Unknown
  Bacterial polypeptide expressing nucleotide sequence isolated from the Sargasso Sea
atggccaatacacagagaagctcctaagttcacagatcaatcaactgagacagaaattttagaaacaggaatcaaggttatcgatcttttggcaccatactcaaaaggtggaaaaataggcttgtttggtggagcaggagtaggaaaaacagttattataatggagttaattaacaacatagcaaaagcgcatgggggattttcagtgtttgctggagttggagagagaacacgagaaggaaatgatttatatcatgaaatgatcgaatctggagttataaagccagatggaaaaggatcaaaagcagctctagtatatggacaaatgaacgaacctccgggcgcaagagctagagtcggattaactggcttgacagtcgcggaatattttagagacaaagaaggtcaagacgttttatttttcgtagataatatttttagatttacccaagcaggatcagaagtttctgctctgttaggaagaataccttcagcggttggatatcaaccaactctagctacagatatgggaaatttacaagagagaataactactacaggcaaaggttcaattacttctgtacaagcaatatatgtcccagctgatgatttaacagatcctgcaccagcaacatcattttcccacttggatgctacaaccgttctttcaagacaaattgcagaacttggaatttatccagcagttgatccattagactctacttcaagaatactagacccaagaatcgttggtgaagaacattatcgagtagcaagacaagttcaaaaaattttacaaacatataaatcattgcaagatataatagctattttgggaatggatgaactctcagaagaagacaaactaac

SEQ ID NO: 273451 - DNA, 774 bp, Unknown
  Bacterial polypeptide expressing nucleotide sequence isolated from the Sargasso Sea
ttttgcaggagttggtgaaagaacgagagaaggaaacgatctttatcatgaaatgatagagtcaggagtaattaaaccagaaggtacaggatcaaaagctgcattagtttatggtcaaatgaacgaaccaccaggtgcaagagctagagtggcgttatcagggttaacagttgctgaatattttagagatcaagaaggtcaagatgtactttttttcgtagataatatttttagatttactcaagctggctctgaagtttccgcattattaggaagaatcccatctgctgtaggataccaaccaactttagctacagacatgggtaatttacaagaaagaattacaacaacaaacaaaggttctattacatctgttcaagctatctatgtgcccgcagatgatttaactgatccagcgcctgccacatctttttcacacttagatgcaacaacagtgttatctagacaaatagcagagattggaatttatccagctgtagatccattagattcaacttctagaatattagatccaagaatagttggagacgaacattatagagttgctagagaagttcaaaaagtattacaaacttacaagtccttacaggatattattgccatattaggtatggatgaattgtctgaagaagataagctaactgtagctagagctagaaaaatacaaagatttttgtctcaaccattcttcgttgcagaagtttttacaggctctccaggaaaattagtagatttagagtctacgattaaagg

SEQ ID NO: 273452 - DNA, 826 bp, Unknown
  Bacterial polypeptide expressing nucleotide sequence isolated from the Sargasso Sea
tatgagcaaaggaatcattacacaagttatcggagcagtagttgatgtaaaatttgaaggtgaattaccagaaattttaacagcactagaatgtaaaaatggaaataacagacttgtcttagaggttgctcaacatctaggagagtcaacagcaagaacaatcgctatggatgctacagaaggattaaaaagaggcgatgaagttgtaaacactaatgctccaataaaagtaccagttggacctgaaactttaggaagaattattaatgtagttggggaaccaatagatgaaaaaggagaagttaaaactaaggaaaattggcctatccacagacctgcacctgaatttaatgatcaatctactgagacagaaattcttgttacaggtataaaggtaatcgatttgttagcaccctatgcaaaaggtggaaaaattggattattcggtggcgctggtgtaggtaaaacagttttgattatggaattaattaataacgtcgctaaagctcatggtggattctctgtttttgctggtgttggggaaaggactagagaaggaaatgatctttatcatgaaatgatggattcaggagtaataaaaccagaaggtccaggctctaaggcagcactagtttatgggcaaatgaatgagcctcctggagcaagggctagagttgcgcttacaggtttaacggttgccgagtattttagagatcaagagggtcaggatgttttattttttgttgataatatttttagatttactccagcaggctcagaagtttcggctctcctaggacgaataccatcagcagtaggataccaa

SEQ ID NO: 273453 - DNA, 608 bp, Unknown
  Bacterial polypeptide expressing nucleotide sequence isolated from the Sargasso Sea
tatgcaaattaatccttcagaagtaacaaaaattttaaaagaacaaattaaaaagtttggagaaaaagcagaaatctctgaagttggccaagtgctttcagtcggggatggtattgccagaatttatggtttggacaatgttcaggccggagaaatggttgagttttctggaggaataaaaggaatggctcttaatttggaaagtgacaatgttggagtagtaatttttggcgatgatagatcaattaaagaaggtgatgttgttaaaagaacaggagcaattgtagattcgcctgttggaaaaaatctgttaggtagagtggtagatgcattaggaaatcctatagatggaaaaggagatctagataaaaaaattgaaagaagaagggttgatgttaaagcaccaggaattattccaagaaaatctgtaaatgaacctatgcaaacaggacttaaggctattgatagtttgataccaattggaagaggacaaagagaattaattattggagacagacaaacaggaaaaactgcagtagctattgatacaattattaatcaaaaggaaataaataaaactggtgatgaaaaaaataaactttattgta

SEQ ID NO: 273454 - DNA, 735 bp, Unknown
  Bacterial polypeptide expressing nucleotide sequence isolated from the Sargasso Sea
cactaatcatttatgatgatctgtcaaaacaagctgttgcgtatagacaaatgtcgttgttattaagaagacccccaggaagagaagcatatcctggagatgttttttatttacatagtagattattagaaagagcagcgaaattaaatgactcaaaaggaggaggttcactgactgctttacctattatagaaactcaagcaggggacgtttcagcatatattccaactaatgtaatttctataactgatggacaaatttttttagaaactgaattatttaatcaaggaataaggcctgcggttaacgtaggtttatcagtatctagagtcggatctgctgcgcaaactaaagcaatgaaaaaagttgcaggctcaatcaaactagaactggcacaatatagggaaatggcagcttttgctcagtttggttcagacttagatgcttcaactcaaaaattgttaaatagaggatctaaactaaccgaacttcttaaacaaggccagtattctccaatgacagtggctgaacaggttatatcaattttctgtggtgtgagaggatatttagatgatattgcactaaatgatatttcagagtttgagaaaaaagttcttcaaaagtgtaaaaatgataaaccagaaataatccaatcaatcataagctctggaaaactcgaggaagagttcgaaaaaaaattaattcaattaattaaagaaataaaaggtaaataat

SEQ ID NO: 273455 - DNA, 491 bp, Unknown
  Bacterial polypeptide expressing nucleotide sequence isolated from the Sargasso Sea
tcaaatatttttagaaactgaactttttaatcaaggtattagacctgcaattaatgttggtttatctgtctcaagagtaggatcatctgctcaaactaaagcgatgaaaaaagtttctggatctatgaaattggagttagctcaatatagagaaatggcggcatttgctcaatttggatctgatttggatgcatcaacacagcagctactaaataggggctcaaaacttactgagctacttaaacaaaaacaatattcacctatgactgttgctgaacaagttatttcagttttttgtggagtaaaaggatatttagatgatattgatttaaaagatatttctgaatttgaaaataagattattgaaagatgtaaatctgaaaaacctgagatcattgagtcgattcaaagctcaggtaaacttgaagatgataaagaaaagttactagttgaagtaatcactaaattaaaggaaaattttaaatcttaaa

SEQ ID NO: 273456 - DNA, 349 bp, Unknown
  Bacterial polypeptide expressing nucleotide sequence isolated from the Sargasso Sea
atggcaagtttagatgatcttaaaaaaagaatagctagtgtaaaatctacacagaaaattaccaaagctatgaaaatggtggcagctgctaagcttagaagagctcaagaaagtgctgagaaaggaagaccatactcaaaaaaaatgaataatattattcttaatttatctaatgggattttagacaaacaaaatgcgccaaaattactaactggatcaggaaatgataaaatacacctttgtgttgtgatgacttctgatcgaggtttgtgcggtggttttaattctaatataattaaaaaagctaagatctattttgctaaactttcagaagaaggaaaagattaaa

SEQ ID NO: 273457 - DNA, 502 bp, Unknown
  Bacterial polypeptide expressing nucleotide sequence isolated from the Sargasso Sea
aatgtcaaaaaatataggtaaagtttcaaaagtaattggagctgttgttgatgttgaattctcatcaaaagaaagtacactgcctgagatatatgactcacttgagattaaaagagaagatggtactatcttagttcttgaggttcaatctcacataggtgaaaatatcgttagaacaatatcaatggattcaactgatggactcagcagagggacagaagttgtagcaacaggtaacccaatacaaatgccaattggtaaagaagtttatggaagactttttaatgttgttggcgatccaattgatggtcttgaagtattgcctaaaattaatgatgacgggatgtctatccatagacaagctcctgactttgatcagctatctacatctactgaagttttatttacaggaataaaagttattgatcttattgagccatatgccaaaggtggtaagattggattatttggtggagctggagtaggtaaaacagtactaatt

SEQ ID NO: 273458 - DNA, 828 bp, Unknown
  Bacterial polypeptide expressing nucleotide sequence isolated from the Sargasso Sea
taatgaccaatcaacagaaacggaaattttggtaactggaattaaggtagttgatttattggctccatacgcaaagggtggtaaaatcggtttatttggtggtgcaggcgtaggtaaaactgtacttatcatggaattaattaataacgttgcaaaggcacatggtggattttctgtttttgcaggagttggtgaaagaactagagaaggaaacgatctttatcatgaaatgatagagtcaggagtaattaaacctgaaggcacaggatcaaaagctgcattagtttacggccaaatgaatgaaccaccaggagcaagagctagagttgcattatcaggtttaacagttgcagaatattttagagatcaagaaggacaagatgtactttttttcgtggataatatatttagatttacgcaagcaggttcagaagtgtctgcattattaggaagaataccttctgctgtaggataccaaccaaccttagctactgatatgggaaatcttcaagaaagaattactactacaaataaaggctctattacttctgttcaggctatatatgtgccagcggatgacttaacagatcctgcgcccgcaacatcattttcacacctagatgcaacaactgtgttatctagacaaatagcagaaattggaatttatcctgctgtggatccattagactcaacatctagaattttagatccaagaattgttggtgatgaacattatcgagttgctagagaggttcaaaaaatactacaaacatataaatctttacaagatattattgcaattttaggtatggatgaactatccgaaga

SEQ ID NO: 273459 - DNA, 863 bp, Unknown
  Bacterial polypeptide expressing nucleotide sequence isolated from the Sargasso Sea
attacacaaattattggagcagtagtagatgttaaattcgatggagagttaccagaaatattaaccgcgttagagtgcgataatagcggtaatagattagtattagaagttgcgcagcatttaggagaatcaagtgtaagaacaatagctatggatgcaacagagggtctaaaaagaggagacgaagtaacaaatactggagctccaattaaagttcctgttggtcccgagactttaggaagaattataaatgtaattggtgagcctattgatgaaaagggagaagttaaaaccaaagaaaattggccaattcatagatcggcaccagaatttaatgatcaatctacagaaacagaaattttagtaacaggtattaaagttgttgacttgttagcgccatacgcaaaagggggtaaaataggtttatttggtggagctggagtaggcaaaactgttcttattatggaattaattaataatgtagcaaaagcccatggaggattttcagtttttgcaggtgttggagaaagaactagagaaggaaatgatctttatcacgaaatgatagaatcaggagtaattaaaccagaaggcaaaggatcaaaagctgcattagtttatggtcagatgaacgaaccaccaggagcaagggctagagttgcattgtcaggattgacagtcgcagaatattttagagatcaagaaggtcaagacgtgctttttttcgtagataatatctttagatttactcaagcaggatcagaggtgtcagcattattaggaagaattccttctgcagtaggatatcagccgacattagcaactgacatgggaaatcttcaagaaagaattacaactacaaa

SEQ ID NO: 273460 - DNA, 382 bp, Unknown
  Bacterial polypeptide expressing nucleotide sequence isolated from the Sargasso Sea
aaagctgttgctggcacagttcggctagagctggctcagtacaatgagctgaaggcgtttgcgcagtttgggtctgacttagatgaagcaactcaaaagacccttcgcaggggagctgtgctggttgaagtgctgaagcagcctcagtaccagcccgctcctattggcttacaggttgcgatgatttttgctgcaacgagaggctatcttgatgaggtagaggttgaggccatcaagggctgggaaaaagcgtttagcacttatttgggagctcagtgccagagcttgttaaagcgggttgctgatggagcaaaacttaaggagattgaacaggagcttgtggctgctattgaggagcataaaaaggggtatgctgcataat

SEQ ID NO: 273461 - DNA, 1009 bp, Unknown
  Bacterial polypeptide expressing nucleotide sequence isolated from the Sargasso Sea
tattcaagtaatcggagctgttgtagatgttcaatttgaaggagatctaccagaaattttaacagctttagtcgtagataactcaggcaataaactgattttagaagtagctcaacatttgggagaaaatagtgttaggacaatagctatggatagcactgaaggtctaaagaggggagaccaagtaaaaaatacaggttccccgataagtgtgcccgttggaccagagactctcggacgtattattaatgttattggagaaccaatagatcaaaaaggcgaagttaaaacaaaggagagatggcctatacacagagaagccccaaaatttacagatcagtccacagaaactgaaattttagaaacaggaattaaagtaatagatcttttagcaccttattccaaaggtggaaaaataggtttattcggtggagcaggtgttggaaaaacagttattatcatggagctaattaacaacattgcaaaggctcatggtggattttcagtatttgctggagtaggtgaacgaacaagagaaggaaacgatttatatcacgaaatgatagaatcaggtgtaattaaacctgagggaaagggttctaaagccgctttagtttatggacaaatgaacgaaccgcctggtgccagagcacgagttggattaaccggattaacagttgcagaatattttagagataaggaaggccaggacgttttgttttttgtagacaatatatttagatttacccaagcaggttcagaagtttccgccttattaggaagaattccatcagcagttggatatcaaccaacattagccactgatatgggaaatttacaagagagaattacaactacaggaaaaggatctatcacttcagtgcaaagcatctatgtgccagcagacgatttaacagacccagcttcagctacttcattctcacatttgggatgcaacacagttctttctagaccaatagctgaactaggaatttatcccagccgttga

SEQ ID NO: 273462 - DNA, 478 bp, Unknown
  Bacterial polypeptide expressing nucleotide sequence isolated from the Sargasso Sea
aaaagaattattaggaagagtagttgatggattaggaaatccaatagatggcaaaggtgcattagacaaaggaataaaaagaagcagagttgaagttaaagcccctggtataattccacgaaaatctgtaagtgagcctatgcaatcaggacttaaatcagttgatagtttagttcctattggtagaggtcaaagagaattaattataggtgataggcaaactgggaagactgcggtcgcaattgacactataattaatcagaaaaaaataaatgaatctaatgatgaaaaacaaaaattatattgtatttatgtagcaattggccaaaaaagatcaactgtcagacaaatagaaaaatctttagaagaggctggggctatggagtatacaacaatagttgctgcaacagcatcagatgctgcaccgcttcagtttttagctccttacactggatgtgcaatgggagaatattttaga

SEQ ID NO: 273463 - DNA, 841 bp, Unknown
  Bacterial polypeptide expressing nucleotide sequence isolated from the Sargasso Sea
aatgcagtctggcttgaaagcaattgacagtttagttccaattggaagaggccaaagagaactaataattggagataggcaaacaggaaaaactgcagttgcagtggacacaattataaatcagaaaaaaataaacgagactggtgatgaaaaacaaaaattatattgtatttatgttgcgataggccaaaaaagatctacggtaaggcaaattcaaaaaaccttagaggaagctggtgcaatggattatacaactattgttgcagccacagcatctgatgctgcaccacttcaatttttagcgccttacactggttgcgcaatgggtgagtattttagagataatggaatgcatgctttaatcatatatgatgatttatcaaaacaagctgtagcatataggcaaatgtctcttctgttaagaagaccccctggaagagaagcatacccgggtgatgtattttatttacatagcagattactagaaagagctgcaaaattaagtgatgaacatgggggcggatcattaacggcgttaccaattattgagacacaagcgggagatgtttctgcttatataccaactaatgttatttcaattactgatggacaaatatttcttgagactaatttatttaaccaaggtattagacccgcaattaatgttggcctttccgtttcaagagtaggctctgcagcacaaactaaagcgatgaaaaaagtctctggatctatgaaattggaattagctcaatatagagaaatggctgcatttgcgcaatttggttctgacttagatgcatctactcagaaacttttgaatcgaggatcaaaactaact

SEQ ID NO: 273464 - DNA, 284 bp, Unknown
  Bacterial polypeptide expressing nucleotide sequence isolated from the Sargasso Sea
catggtatctatacgccctgatgaaatcagttcaatcttaaaacaacaaataactgattatgaccaatctgtaagtgttagcaatgtaggaactgttctgcaaatcggtgatggcattgcaagaatatatggcttagatcaggtcatggcaggtgagttattagaatttgaggatggtaccgaaggtatagctttaaatcttgaagatgataatgttggagccgttttaatgggtgaggcacttggtgtccaagaaggaagtaacgttaagtccacaggaaaaa

SEQ ID NO: 273465 - DNA, 916 bp, Unknown
  Bacterial polypeptide expressing nucleotide sequence isolated from the Sargasso Sea
tatcggtagaataattgatggtaatggactaccaatagatggcaaaggaccgattactactatgacagaatatccattaatgggcaccccaattaatccactggaaagaaaaaggctaaaggagcctttggatattggaattcgatctattaatggcctactttcttttgctaaaggacaaaggttaggaattctagcaggtaccggcgtcggcaaatcagttttaatgggtatgattgcaagaaataccaacgccgatataaatgtgatcgcattgattggtgagagaggaagagaagtaaaagaatttatcgatgagaatttaggcgaggaaggattgaaacgctcgatcgtaatagcagcagcctcagacgaacctcctcttgtaagattgcaaggggcgtttattgctacgacgattgcagaatattttcgagatcaaggacaggatgtaatgctgatgatggattcactaactcgtttcgctttggcgcaaagagaaatcggtctgtcggttggggaacctccaaccacccgtggttttactccttcagttttttccatattgccaaagctccttgaacgtgcaggaacatccgccagtgaaggatctattacagcactctataccgttttggttgaaggagatgacttaaatgaacctatttccgacgcggttcgcgctattcttgatgggcatattgttttgagccgtgaactcgcatcccataatcattatcctgcaattgatatacttaatagtataagtcgattaatgattgatgttgtgaccaaagaacatcaagaactttctatgaagtttaaagattttctggcaacttataagtccgctgaagatttaatcaatattggcgcatacgtaaaaggtagtaacccaaaaattgatatggcaatt

SEQ ID NO: 273466 - DNA, 740 bp, Unknown
  Bacterial polypeptide expressing nucleotide sequence isolated from the Sargasso Sea
tgaaaaaatgaataatataattcttaatctttcaaacgggatatctgataaagaaaatgcaccaaaactacttgctggaactggagaagaaaaaactcatttatgtgttgttatgacctcagatagaggtttatgtggaggcttcaatacaaatattattaaaaaagcaaaacagtattttcaaaaaatattaaaagaaaataaaatattaaaaattataactgttggatccaagggttatgatcaattaaaaagacaatataaagataatataattgaaaaaatttcatttaaagactctaaaaatattaattattttgatgccgataaggttggcaaaattataattgatagattcgaaaaaaaagaatttgatgtatgtgcaattttttataatcaatttaaaaatgttattactcaaataccacaagaacaacaaattatacctttgaaatctaatgaagaaaaagatgtcaattctgaaagtagctatgaatttgaaccagaagaagatgaaattttaagcaatttattacctaaaaatatttctacacagatttttaaagcaatgttagagaattcagctagcgagcaaggttcgagaatgagtgctatggataatgcaacaagaaatgcaggtgaaatggttgaaaaacttacaattcagtataatagaagccgtcaagctgcaattactaaagaactaattgaaataatatcaggagcagaaagtttataat

SEQ ID NO: 273467 - DNA, 643 bp, Unknown
  Bacterial polypeptide expressing nucleotide sequence isolated from the Sargasso Sea
tcggaagtttcagccttactgggtcgcataccatctgctgttggatatcaaccaactttggcaactgatatgggagcattacaagaacgtattacaactacaaacaaaggatctattacttcagttcaagcaatttatgttcctgcagatgatttaactgaccctgcgcctgcaacttcattttctcatttagatgctacaacggttttaaatagagcaatttctgaaaaaggaatttatccagcagttgatcctctagactcaaattcaagaattttagatccccaagttgtaggtgatgatcattatcgtgttgcaagagaagttcaaagagttcttcaaacatataaaagcttacaagatattattgcaattttgggaatggatgaactttccgaagaagataaacttacagttgcaagagcaagaaaaatagaaaagtttttatcacaacctttttttgttgctgaggtatttactggttctcccggcaaatatgtagagctagaagataccattaaaagttttgatggtttggttaagggtgagtatgatcatttaccagaagctgccttttatatggtaggcggaatagaagaagctttagaaaaggcaaaaaaattagaggctgaagcagcttaga

SEQ ID NO: 273468 - DNA, 699 bp, Unknown
  Bacterial polypeptide expressing nucleotide sequence isolated from the Sargasso Sea
gacaaatgtcattgctattaagaagacccccaggacgtgaggcttatcctggagatgtattttatcttcatagtagattacttgaaagagctgcaaaattaagtgatgaacatggtggtggttcacttactgcactcccaattattgaaacacaaggtggagacgtatccgcgtttattccaactaatgttatttcaattacagatggacaaattttccttgaaacagaactatttaaccaaggtataagacctgcaattaacgtaggtttatcagtatctagggttggttcatcagctcaaactaaagcgatgaaaaaagtttctggttcaatgaaactagagctagcacaatacagagaaatggcagcttttgctcaattcggatctgatttagatgcgtctactcagcaacttttgaatagaggctctaaattaactgaactcttaaaacaaaaacaatattcacctatgactgttgcagaacaagttatttcagtattttgtggagtgaaaggttatctggatgatattgatctaaaagatgttgctgagtttgaaagtaagattattgaaaaatgtaaatcagacaagcctgaaattatagagtcaattttaagttcaggaaaacttgaggaagataaagaaaaattacttgttgaggtaatcactcaattaaaaggaaattttaaatcttaat

SEQ ID NO: 273469 - DNA, 756 bp, Unknown
  Bacterial polypeptide expressing nucleotide sequence isolated from the Sargasso Sea
tatgtatcagggtaaagctacacttgttatttatgatgatctaactaaacaagctcaggcttatagacaaatgtctcttcttttaaaaagaccaccaggaagagaggcttatccaggagatgttttctatttacacagtagattattagaaagagcagcaaaactttctgatgctatgggagggggctctatgacagctcttccaattattgaaactcaggcaggggatgtttctgcttatatcccaactaatgttatttcaattacagatggacaaatatttttgagtgcagatttatttaactcaggattaagaccagctattaatgttggtatttctgttagccgtgttggaggagcagctcagacaaaagcaattaaaaaaattgcaggaactttaaaattagaactcgcacagtttgatgaactagctgctttttctcaatttgcatctgatcttgatgaagcaactcagcaacaacttgaacgaggcaaaagactaagagagttattaaagcaacctcaattctctccgctgaaccttgcagaacaagttgcagttgtttatgcaggagttaaaggtcttattgatgaggttcctgttgaagatgttactaaatttgcaactgaacttagggaatacctaaagttaaataaagcagaatttatagaagagattcttaaagaaaagaaattaaatgatggattagaagcgacgctaaaagaggtgataaatgaagttaaatcatcaatgct

SEQ ID NO: 273470 - DNA, 694 bp, Unknown
  Bacterial polypeptide expressing nucleotide sequence isolated from the Sargasso Sea
aatgtcattgcttttacgtaggccccctggtcgcgaagcgtaccctggggacgtgttctatttacactcgaggttgctagagagatccgctaagttgggtgatgaccatggaaacggatcgttaaccgctctcccaataatagaaactcaaggcggggatgtatctgcatttatcccaacaaacgttatttcgattactgatggccaaatattcttggaaacagagctgttctatcagggcatacgaccggcagttaatactggactctcagtctcccgcgtgggctcatctgctcaaacagattcgatgaaatctgtagctgggccggtcaagctttcgttggcgcaatacagagagatggcagccttcgcccagtttgggtctgatttagacgcggcgacacaacagttgctgaataggggtgctagattaacagagctcatgaaacaaccacagtactctccattaactaatgccgagattgtttgcctcatttttgcggggacgaatggttatttggataaaatagatgtgtcagaggttggacgttttgaggctggattgttgactaatttaaggggcaagcactctgacttgttagaatatattacaaaagaagatcccaaaatcaaaggtgaggctgctaataaaataagctctgttttagatgagttttcagcagattttgcgtag

SEQ ID NO: 273471 - DNA, 475 bp, Unknown
  Bacterial polypeptide expressing nucleotide sequence isolated from the Sargasso Sea
gcaacatcatttgcacacctagatgcaacaacagtgctttctagacaaatagcagaaattgggatttatcctgccgttgacccacttgactcaacctcaagaattttggatcctagagttgtaggcgatgaacattatagagttgccagagatgtacaaagaatattacaatcttataaatcattacaagatataatagcaattttaggtatggatgaattatctgaagaagataaattagttgtcgccagagcaagaaagatacaaagatttttatcacaacctttcttcgtagcagaggtatttacaggatcaccgggaaaattagttgatttagagtcaactattaaaggatttgatgcaatctgcaagggtgagtatgaccatcttcctgaagcagcattttatatggtaggaacaattgaagaggcaatagagaaagctgagaaaatgtctaaagaagtggcagcataat

SEQ ID NO: 273472 - DNA, 667 bp, Unknown
  Bacterial polypeptide expressing nucleotide sequence isolated from the Sargasso Sea
atggaaaagattagagtagaagaagttagtagcattatagcagaaaagatcaaaaactatggaaaaaaaatagagctgcaggaagtcggaactgttctaagcgttggtgatgggattgctcgtgtttatggtttagaacatgctgtagctggagagttggttgagttttcatgtggagtaaagggggttgttttaaacctagaagaagacaatgttggaatctcagttttgggagagagtcaaaaaatttgcgagggggattctgtaaaaaggttaaaagaaattaactctgtccccttgggtgagagccttcttgggagggttgttgatgctttaggtaaccctgttgatggtaaaggtcctcttaacctagaaacaagtggggttgttgaggttaaagctcctggtatcatagacagaaaatctgtagatgaacccttgcagacaggtattaagtgtattgatgctatgacacctataggcagagggcagagagagcttattattggagataggcaaacaggtaaaacggctttagcaattgacacaattataaatcaaaaaaataaagatgtgatttgtttttatgttgctattgggcaaaaagcctctactgttgcacaaattgttagtaaattggaagaaagtgggtgctatgaagtatagt

SEQ ID NO: 273473 - DNA, 394 bp, Unknown
  Bacterial polypeptide expressing nucleotide sequence isolated from the Sargasso Sea
atgagaaaaggacaaattacccaagttataggagcagtagtagatgttaaatttgatggagaattgccagaaatattaacagcattagagtgtaaaaatagtggcaatagacttgttttagaagttgcacagcatttaggcgaatcaagtgtaagaacgatagctatggatgctacagaaggtttaaaaagaggagatatagttactgatactggagcaccaatcaaagttcctgttggacctgaaaccttaggaagaattataaatgtaattggtgaacctattgatgaaaaaggagaggttaagactaaagaaaactggcctattcatagatcagctccagaatttaatgatcaatcaactgaaactgaaattttagtgacagggattaaag

SEQ ID NO: 273474 - DNA, 823 bp, Unknown
  Bacterial polypeptide expressing nucleotide sequence isolated from the Sargasso Sea
tatgtccataaacccttcagaagttactaaattacttaaagatcaaataaaaaattttggtgaaaaagccgaagtttcagaaattggaaaagttttatcagtaggtgatggaattgcacgagtttacggtttggataatgttcaagctggagaaatggtcgagtttgaagatggctctaaaggtatggcattaaacttagaaaatgacaatgtaggagttgtaatttttggagatgatagaaaaattaaagaaggcgatacaataaaaagaactaatgcaattgtagatgtgccggttggaaaagaattgttaggaagagttgttgatggtttgggaaatccaatagatggaaaaggagctatctcttctaaagaaagaaaaagagttgaagtaaaagctccaggtataattccaagacaatctgttagtgaaccaatgcagacaggtttaaaatctatcgactcacttattcctgtaggaagaggccaaagagaattaattatcggtgatagacaaacaggtaaaacagcagttgcaattgatgcaattataaatcaaaaaaaaatcaacgagtcctctgatgaaaagaaaaaactttattgtgtttatgtagcaattggtcaaaaacgttcaactgtagctcaaataacgaaaactttagaagaagcaggcgcacttaaatacacaacaatagttgctgcaacagcatcagactctgcaccacttcagtttttagctccttatactggctgcacaataggtgaatattttagagataatggaatgcatgctttaatagtttacgacgactgtcaaaacagg

SEQ ID NO: 273475 - DNA, 701 bp, Unknown
  Bacterial polypeptide expressing nucleotide sequence isolated from the Sargasso Sea
tatgtcacaaaaagttggtaaagtttctcagattatcggtcctgtagttgatgtttcttttgatacagctaacacagaattacccaagatttatgattcattagaaataaaaaaagatgatggttcagtgctagttttagaagttcaatcacacgtaggtgaggatatggttagaactatatcaatggactctacagatggtttacaaagaggcgcagatgttgtatcaactggcaatccaattcaaatgcctattggtaaagatatctacggtcgtttatttaacgttataggagatgcaattgatggtatggaagacttaccaaaaagcggtaaaagtggcttacctattcatagggaagccccaccatttgaacaactttctacctcaacagaagttttatttactggaattaaagttattgatttgattgagccatatgcaaaaggtggaaaaattggtctttttggaggtgcaggtgttggtaaaactgttctcattcaggagcttatcaataatatagctaaaggacatggtggattatctgtttttgctggtgttggtgaaagaacgagagaaggaaatgatttacttcgtgaaatgttagaatcgggaattatcgactatggtaaagaatttatggaatctatggaaaatggtggatgggatctaagtaaggttgataaaaaagcattagaga

SEQ ID NO: 273476 - DNA, 499 bp, Unknown
  Bacterial polypeptide expressing nucleotide sequence isolated from the Sargasso Sea
gctgtgtatgtgccagcagatgatttaacagacccttcaccagcaacaacgtttgctcacttagatgctaccgttgttctttcaaggcaaatttctgagctaggaatatatcctgctgttgatcctcttgactcaacaagtaggcagctcgatcctttcgtggtcggggatgatcattatgaagttgcccaaggagttcaaaagatcttacaaagatataatgagcttaaagatatcattgcaatcctaggaatggatgagctttctgaagaagataaagggcttgtagctagggcgagaaaggctcaaagatttttatcccagcctttctttgttgctgagatttttactggaactccaggaaagtatgtttcgcttgaggacactattaaagcatttaagggaattcttaatggagattacgaccatcttcctgaacaggcattttatatggttggaactattgaagaggctgtagaaaaagctaagactttataag

SEQ ID NO: 273477 - DNA, 880 bp, Unknown
  Bacterial polypeptide expressing nucleotide sequence isolated from the Sargasso Sea
ggtattgcaagggttcacggcctagataacgtccaggctggtgaaatggttgaatttccaggaggaattcgtggtatggctctaaatttagagagtgataacgtaggtgtcgttattttcgggtctgaccgggacattaaagaaggggatgtagtaaagcgtactaattcgatcgtggatgttcctgcaggagatgcccttctggggcgcgtggtggatggtctaggtaatcctcttgatggaaagggtccaatcaagggggtagagcgcagagtagcggatgttaaagcccctggtattattcctcgcaaatcagtacacgagccgatggcgacgggtcttaagtcagttgatgctatgatacccattggtagaggtcaacgagagttaattattggagatcgtcaaacgggtaaaacagcagtagctttggataccattctcaatcagaaaagttataatgatgctgcaggcgatgatgagagcaaaaaattatattgcatctacgttgcggttggtcagaaaagatcaacagtggcacagcttgtgaaaaaactggaagaaagtggtgcaattgaatattcaatcgtggtcgctgcaaccgcatcggatccagcccctatgcagtttttggcaccttattctgccacatctatggcggaatattttcgagataacggcagacatgctcttatcatctatgatgacttgtccaaacaagcagttgcttaccgtcaaatgtcattattgctaagacggccaccggggcgagaggcctatcctggagatgttttctatctgcactcacgtttgcttgagagatcagctaaattaaatgaagataatggagctgggtctttaacagctttaccggtgattg

SEQ ID NO: 273478 - DNA, 694 bp, Unknown
  Bacterial polypeptide expressing nucleotide sequence isolated from the Sargasso Sea
aatgtcattgctattaagaagacccccaggacgtgaggcttatcctggagatgtattttatcttcatagtagattacttgaaagagcagctaaattaagtgacgaacatggtggtggatcacttactgcactaccaattattgaaacacaaggtggagacgtatctgcgtttattccaactaacgttatttcaattacagacggacaaattttccttgaaacagaactatttaaccaaggtataagacctgcaattaacgtaggtttatcagtatctagggttggttcatcagctcaaacaaaagcgatgaaaaaagtttctggttcaatgaaattagagctagcacaatacagagaaatggcagcgtttgctcaatttggatctgatttagatgcatctacccagcaacttttgaatagaggctctaagttaactgaacttttaaaacaaaaacaatattcacccatgactgttgcagaacaagttatttctgtattttgtggagtaaaaggttatcttgatgatattgatttaaaagacgttgctgaatttgagagcaagattattgaaaaatgtaaatcagataagcctgaaattatcgagtcaattttaacttcaggaaaacttgaggaagataaagaaaaattacttgttgaggtaatcactcaattaaaaggaaattttaaatcttaa

SEQ ID NO: 273479 - DNA, 613 bp, Unknown
  Bacterial polypeptide expressing nucleotide sequence isolated from the Sargasso Sea
aatgagtgatactggcgtaataaaacaaataataggtgctgttatcgacgttgagttcgataaagcccaaattccgaacatctatgatgccttggttgttagtgaaaacaatcttgttcttgaaacacaacaacaattaggtgatggagttgttagaactgttgccatgggaaccactgaagggttaaaaagagggctagacgttgaaaataccaaagcaccaataagcgttcctgttggcgaggcaaccctaggaagaataatgaatgtattgggcgatccaattgatatgaaaggtgaagtaaagacaaaagaaagaatgcctatacacagaaagccgcctgaatatgtagatctgtcagattcaaatgaaattctagaaacaggcattaaggttatcgatctagtttgtccatttgccaaaggcggaaaagttggattgtttggcggtgctggtgttggaaaaacagtcaacatgatggaactgattagaaatatagcgattgagcattcaggctactcagtttttgccggcgttggagaaagaaccagagaaggaaatgacttttatcatgaaatgacagattcaaatgttctagataaagtttctctt

SEQ ID NO: 273480 - DNA, 509 bp, Unknown
  Bacterial polypeptide expressing nucleotide sequence isolated from the Sargasso Sea
tatttcaataacagacggacaaatttttcttgaaactgaactttttaatcagggaataagaccagctgttaacgtaggactatccgtatcaagagtaggttcagccgctcaaactaaagccatgaaaaaagttgcgggttccataaagcttgaattagcacagtacagggaaatggctgcatttgcacaatttggctctgatcttgatgcatcaacgcaaaaacttcttaatagaggatcaaaattaaccgaattattaaaacaaaatcaatattcaccaatgaccgtagcacaacaagtcatagcagttttttctggtgtaaaaggttttttagatgatgttgatttgcctaaaattaaagatttagaaaaaaatatttatgaagaaataaaatcttcgaatccagaaataatagataatattaatagtacaggaaaattagaagaagagactgaaaaaaagttaaagctaattattgagcagtttaaaaagaaaaatagtaaataaa

SEQ ID NO: 273481 - DNA, 883 bp, Unknown
  Bacterial polypeptide expressing nucleotide sequence isolated from the Sargasso Sea
gggagtaggaaaaacagtaaacatccaagaattaattcgtaatatagcctatgagcatagcgggtactctgtctttgctggagtcggagagaggactagagaaggcaatgatatgtaccatgaaatgatagagggtggagttctagacaaggttgccttagtttatggtcagatgaacgaaccccctggaaacagactacgggttgccctttcaggattaacaatggcagaaaattttagagatgaaggaagagatgttttgttatttgtagataacatatacaggtacacactggcaggaacggagtgttcagcccttctcggaagaatgccttctgctgttggatatcaacctacccttgcggaggaaatgggcgtattacaagaaagaattgcctccactaaaactggatctataacctctgttcaagctgtttatgtgccagcagacgatttaacagacccttcgcccgcaacaactttcgctcacttagatgcaaacgtcgttctatcaagacagattgcctctttgggcatttatcctgctgttgatccattagattcaaacagcagacagcttgaacctggaatagttggccaagaacattatgatgtggccaactcagttaagcagatactaaatagatataaggaactgaaggacatcattgcaattttaggaatggatgagctatctgaagatgataagttggttgttgcaagggctagaaaaatagaaagattcctctctcagcctttctttgtagccgaagtattcactcaagtaccaggaaaatatgttcctctgtctgagacgataagagggttcaaaggtattgttaatggagactatgatgacattcctgaacaggcctttttaatg

SEQ ID NO: 273482 - DNA, 531 bp, Unknown
  Bacterial polypeptide expressing nucleotide sequence isolated from the Sargasso Sea
ttacatctgtacaagctatatatgttcctgctgatgatttaacagatcctgcaccagcaacatcgttctcacatttagatgctacaacagttttatctagacaaatcgctgaacttggaatttatccagcggttgatccacttgattcaacatctagaattttagatccacgaattgttggtgatgaacattatagagttgcaagagaagttcaaaaaattctccaaacttataagtctctacaagatattattgcaattttaggtatggatgaactatctgaagaagataaattaactgtagccagagcaagaaaaattcaaagatttttatcacaacctttctttgtggcagaagtttttacaggctcaccaggaaaacttgttgatctagagtcaactatcaaaggttttgaggcaatttgcaaaggtgaatacgatcatttaccagaatctgctttttatatggtaggaacaatcgaggaagctgttgaaaaagctgagaaaatggcaaaagaagcagcagcataat

SEQ ID NO: 273483 - DNA, 901 bp, Unknown
  Bacterial polypeptide expressing nucleotide sequence isolated from the Sargasso Sea
ggataggcaaacaggaaaaactgcagtcgcaattgatacaattataaatcaaaaaaaaattaatgagtctgatgatgagaaaaaaaagctttattgtatttatgttgccattggtcagaaaagatcaacagtagcacaaattttaaaaactttacaagatgcaggtgcaatggactatacaattatagtttcagctactgcgtctgatccagctcctctgcaattcttagctccctatactggttgtacttttggtgaattttttagagataatggaatgcatgcgctgataatttatgatgatttgtctaagcaagctgttgcctatagacagatgtcacttttgcttagaagaccaccaggaagagaagcatatccaggagatgttttctacctacatagtagattacttgaaagagcggccaaattaaatgacgataatggtggaggttcgcttaccgctttaccaataatagaaacgcaggcaggcgatgtatctgcttatattccaactaatgttatatcgattactgatggacaaatctttttaggaactgaattatttaaccaaggaattagacctgcagtaaatgttggtctatctgtttctcgagttggttcagctgcacaaactaaagcaatgaaaaaagtagctggatctataaaacttgaattggcgcagtatcgtgagatggcagcatttgcccaatttggatctgacttagatgcatctacacaaaaacttttaaacaggggatctaaactcacagaactcctaaaacaagaccaatacagcccaatgacggtagctgaacaagtggtcacaatatatgcaggagtaaaaggttatctcgacagtattgaaataggacaaattcgttcttttgaagagggtttatta

SEQ ID NO: 273484 - DNA, 508 bp, Unknown
  Bacterial polypeptide expressing nucleotide sequence isolated from the Sargasso Sea
aatggaaaaaaatataggtattgtaacccaaataattggagctgtagtagatgtgcagtttaacgatgagttacccgaaattttgaatgcccttgagactgaaaataatggcaataggctagtgttagaggtagcacaacacctgggtgaaagtacagtcagagctgttgcaatggatgccaccgaaggcttagtcagaggagcaaaggttacagatcttggaggtccaatatcagtgccagttgggaatgaaactctcggtagaatacttaatgttgttggcgaccccgtggatgagaaagggccggtcaaggcctcagagaaaagaccaatacatcagcctgcacctgagttttcagaacaatcaactgaaacggagatcctggttactggtataaaagttattgatcttttagccccttacgcgaagggtggtaagattggtctttttggtggtgctggtgttggcaaaaccgttttaattatggaattgattaataatatagca

SEQ ID NO: 273485 - DNA, 576 bp, Unknown
  Bacterial polypeptide expressing nucleotide sequence isolated from the Sargasso Sea
cagaagagatgggggtattacaagaaagaattacctcaacaaaaactggctctatcacatccatacaggctgtttatgttccagctgatgacttaacagacccttctccagcaacaacttttgctcacttagatgcaacagttgtgctatctagaagaattgctgaattaggaatatatcctgctgttgatcctctagattcaacctctagacagcttgatccactggttgttggtcaagagcattacgaagttgcgcaaagagttcagggcgttctacagagatataaagagcttaaagatattattgcaattttgggtatggatgaattatctgatgaagataaaaatacggtttcaagagcaagaaaagttgaaaagtttttatctcaacctttctttgtggcagaagttttcacaggctcacctggaaaatatgtatcagttaaagataccattcaaggctttaaagaaatattagatggtgttcatgacgatgttcctgaacaagcattttatatggttggttccatagatgaagttttagaaaaagctaaaactgtaaaaaatgattgat

SEQ ID NO: 273486 - DNA, 856 bp, Unknown
  Bacterial polypeptide expressing nucleotide sequence isolated from the Sargasso Sea
aatggcagatgctaatatccaaaatataagcgaacagctaaaaactaaaattaaaggacttgaatcaaattttaagtctgacgaagttggtaccgtaacttctgttggtgatggtattgctaaaatctatggattagatcaagctatggctggtgaacttgtatcttttgataacggaataataggtttagttttaaatttagaagaggatagtgtaggggtagcaatttttggggatgatagttctgtattagaaggagatacagttaaaagaactggtgatatcgctcaagtcggagtaggtaactcaatgttaggaagagtagttaatggtttggggcaaccaatagatggtaaaggcgatattcaagcaacagaattcaaacctgttgagataaaagctcctggtgtaattgcaagaaaatctgttaatgaaccccttcaaacgggaattaaagctattgactctatgataccgataggaagaggacaaagagagttaattttgggggatagacaaactggaaaaacagctattgctgttgatacaatcataaatcagaaaggaaaaggagttaattgtatatatgtagctatcggtcaaaaacagtctacagttgcgcaggttgtagaaaaattgaaggagaatggagcctttgaatatacaacagttgtagcagctaatgctagtgaccctgcaccgtatcaatttctttcaccatttactggatgtgcaataggcgaatactttagagataatggacaacatgcattagttatttatgatgatttaactaaacatgcatactcatatagacagctttcacttcttcttagaagacctcccggtagagaa

SEQ ID NO: 273487 - DNA, 817 bp, Unknown
  Bacterial polypeptide expressing nucleotide sequence isolated from the Sargasso Sea
atggtatctatacgccctgatgaaatcagttcaatcttaaaacaacagataactgattatgaccaatccgtaaatgtaagcaatgtaggaactgttctacaaattggtgatggcattgcaagaatatacggcttagatcaggtcatggctggtgaattattagaatttgaggatgggactgaaggtatagctcttaatcttgaagatgataatgtcggtgcagttttgatgggtgaagcgttgggtgtacaagaaggaagtaatgtaaaatcaacaggaaaaatcgcatctgttccagtcggagaagctatgaagggaagagttgttaaccctttagggcaaccaatagatgggaaaggtgagattccaacaagtgataatagacttattgaagaaatggctccaggaataattaagaggagatcagttcatgaacctatgcaaacaggtatcacttctatagatgcgatgatacctgtgggaagaggtcaaagagaattgattattggagataggcaaactggaaaaactgctatcgcaatagatacgataattaatcaaaaaggccaagacgtagtctgtgtctatgtagcgattggtcagaaatctgcatcagtagcaaacgttgttgaagttttaagagaaaaaggagctcttgaatatactgttgtggtaagtgcaggagcctctgaagcggcagccttacagtatttagctccttacactggagctgcaatagctgagcatttcatgtaccaaggcaaagctactcttgttatttatgatgatttaactaagcaggctcaagcttatagac

SEQ ID NO: 273488 - DNA, 298 bp, Unknown
  Bacterial polypeptide expressing nucleotide sequence isolated from the Sargasso Sea
atgaaggaaaaaggaaaaattattcaagtgatcggggctgtagttgacgtacagttcgaaggggaattgcctgaaatattaacagcactagaagttgataactcaggaaataagttaatattagaagtcgctcaacatttaggtgaaaatggtgtgagaactatagccatggatagtactgaaggattaaagagaggggatgctgttcaaaatacaggtgctcccataagtgttccagtcggaccagagactttgggaagaataattaatgtgataggtcaacctattgatcaaaaag

SEQ ID NO: 273489 - DNA, 610 bp, Unknown
  Bacterial polypeptide expressing nucleotide sequence isolated from the Sargasso Sea
gccgtaggttatcaacctactcttgcaactgatatgggatcacttcaagaaagaattacatctacaaataaaggttcaattacatctgtgcaggcaatatatgttcctgctgatgatttaaccgatcctgctcctgcaacctcgtttgcacaccttgatgcaacaaccgtgctttcaagacagattgcagaacttggcatttatcctgctgttgatccgttagatagtacttcaagaatattagaccctcgcgttgttggagatgaacattatcaagttgcaagaaatgtacaggctgtactgcagacttataagtctctacaagacatcattgcaattttaggtatggatgagttatctgaagaagataaattaacagtagccagagcacgtaagattcaaagatttatgtcccaaccgttctttgttgccgaagtctttacaggaactcccggaaaatatgttgaattagaggatacgatcaaaggatttgatgcgatctgtaagggtgaatatgatcatctacctgaggcagctttttatatggttggtacaatagaagaagctattcaaaaagcagaaaaaatggctgaagaagccgctgcgtaac

SEQ ID NO: 273490 - DNA, 463 bp, Unknown
  Bacterial polypeptide expressing nucleotide sequence isolated from the Sargasso Sea
ccttttccacttggatgcactacagttttaaatagagctatttcagaaaaaggaatatatcctgcagtcgatccccttgactctacatcaagaattctagatccacaggtagtaggtgatgatcattatagagtagcaagagaagttcaaagagtacttcagacttataaaagtcttcaggatattattgcaattcttggtatggatgaattatcagaagaagataaactaacagtcgcaagagctagaaaaattgaaaaattcttaagtcaaccattctttgtagcagaggtatttacaggttcacccggtaaatatgttgatcttgaagatacaataaaaagctttgatggtcttgttaaaggtgaatacgatcacatgcctgaagcagcattttatatggttggtggcatagatgaagcaattgaaaaagcaaaaaaacttgaggctgaagcagcataat

SEQ ID NO: 273491 - DNA, 816 bp, Unknown
  Bacterial polypeptide expressing nucleotide sequence isolated from the Sargasso Sea
ccatgcaatacattgcgccttatgctggtgctgcaatgggtgagtatttcagagataatggtaagcatgcactcatagtttatgacgatctgtcaaaacaggctgttgcatacagacaaatgtctcttgttttaagacgtccacctggtagagaagcttttccaggggatgtgttttatctacacagcaggctgctcgaaaggtcatcaaaactttctgaatccttgggaggagggtcattgacggcgctaccaattatcgaaacccaagagggagatgtttccgcttatatccccacaaatgttatttctattactgatggtcaaatttttcttgagacaaatttatttaattctggtgtaagaccagctataaatgttggcctatcggtttctcgtgtgggtggaaatgctcaaataaaagctatgaaatcaattgcaggtactcttcggctagatttagcgaactacagagaaatggaggctttcgcaaaatttggttccgatctagacaaagcaactattgcccagctgacacgcggtgagaggatggtggaaatattaaaacaaaatcaatacgtaccgatgaacatagataagcaggtggctattatttatgctggttcaaaaggctatttagacgatttagaaattgaaagggtattagaattcgagtctggattatttgagtatcttgattcaaatgcatcatcagctttgtcgtctatcataatggaaggcttgatatctgatgagacagaaaaattgttagataaagctatcaatgattataagcaggcattcattactgagtaag

SEQ ID NO: 273492 - DNA, 877 bp, Unknown
  Bacterial polypeptide expressing nucleotide sequence isolated from the Sargasso Sea
tggaataaatccttcagaagttacaaaaatattaaaagaacaaatcaaaaattttggtgaaaaagccgaagttgcagaagtagggcaggtattatcagttggagatggtatcgcaagaatttatggtttggataatgtacaagctggtgaaatggtggaattttcagatggatcaaaagggatggctcttaacttagaaagtgaaaacgttggtgttgtaatttttggtgatgatagaaatgtaaaagagggtgatgtagtaaaacgtactggtaacattgttgatactcctgttggaaaggaattgttaggaagagttgtagacggtttaggaaatcctattgatggaaaaggtccatttgataaaaatattaaaaaaactagagtagaagtaaaagcaccaggaattattcctcgtcaatcagtcaatgaaccaatgcaaactggattaaaatcaatcgatagtttggttccaattggaagaggtcaaagggaattaattattggtgacagacaaacaggtaaaactgcagttgctgtggatgcaattattaatcaaaaaaaaataaatgaatctggtgatgaaaaacaaaaattatattgtatttatgttgcagttggacaaaaaagatcaacagtaagacaaattcaaaaaactttagaggaagcaggtgcaatggagtacacaactattgttgcagctacagcatcagattctgcgccattacaatttttagctccatatacaggatgtgctatgggtgagtattttagagataatggaatgcatgcacttattatctatgatgatttatctaaacaagctgttgcttacagacaaatgtctctattattgagaagacctccaggccgtgag

SEQ ID NO: 273493 - DNA, 838 bp, Unknown
  Bacterial polypeptide expressing nucleotide sequence isolated from the Sargasso Sea
atggctagtttagatgatttaaaaaaaagaatttctagtgttaaatcaacacagaagattactaaagcaatgaaaatggttgcagcagcaaaactgagaagagcacaagaaaatgctgaaaaaggaagaccttattcagagaaaatgaataaaattattattaatctttcaagtggaatatctgataaggaaaatgcaccaaaacttctcgctggaacaggggaagaaaaaattcatctttgcgttgttttgacatccgatagaggtctatgtggaggttttaatacgaatattattaaaaaagcaaaacaatattttcaaaaaatattaaaagagaataaaatattaaaaattataactgttgggtcaaaaggttatgatcaactaaaaagacaatataaagaaaatataattgataaaatttcatttaaagattctaaaaatattaattattttgatgctgataaagttggaaaaattataattaatagatttgaaaataaagaatttgatgtatgtgcaattttttataaccaatttaaaaatgttattactcaaataccacaagaacaacaaattatacctttaaaatcaaataaagaaaatgaaacaagttctgaagataattatgaatttgaaccagaagaagatgaaattttaagcaatttattgcctaaaaatatttctacacagatttttaaagcaatgttagaaaattcagcaagtgaacaaggttcaagaatgagtgccatggataatgcaacaagaaatgcaggtgaaatggttgacaaacttacaattcagtataacagaagtcgtcaagctgcaattactaaag

SEQ ID NO: 273494 - DNA, 904 bp, Unknown
  Bacterial polypeptide expressing nucleotide sequence isolated from the Sargasso Sea
aaacggaaaaattattcaagttatcggggcagtggtagatgtccaattcgagggagaattgccagaaatcttgacagcactggaagttgaaaatacaggaaataaattaattttagaagttgcgcagcatcttggagaaaatggtgttagaactatagcgatggatagcactgagggtctaaaaagaggagatcaagttcataatacaggagcacctataagcgtaccagttggtccagagacattaggccggattattaatgtaataggccaaccaattgaccagaaaggtgaagtaaaaactaaagaaaaatggcctattcatagagaagcaccaaagtttactgatcaatctaccgaaacagagattttagaaacaggtataaaagtcattgatctattagctccatattcaaagggtgggaaaataggtttatttggaggagctggagtcggtaagacagtaataataatggaattgattaataatatagccaaagcacatggtggtttttcagtttttgctggagttggtgaaagaacacgagaaggaaatgatctctaccacgaaatgatagagtcaggagttatcaaaccagatggtaaaggatcaaaagcagcacttgtatatggacaaatgaacgaacctcctggagcaagagctagagttggattgacaggacttactgtagcagaatatttcagagataaagaaggacaagacgttctcttttttgttgataatatttttaggtttacgcaagcaggttcagaagtatctgctcttttgggaagaattccctcagctgtaggttaccaaccaacattagctactgatatgggtaatttgcaagagagaattacaactactggaaaagggtcgataacatctgtccaggctata

SEQ ID NO: 273495 - DNA, 436 bp, Unknown
  Bacterial polypeptide expressing nucleotide sequence isolated from the Sargasso Sea
cctggtatttctgtttctagggtgggtggagcagctcaaaccaaaatcatgaaaaaacttagtggaggcgtcagaaccgcattagctcaatatagagaacttgcagccttctctcagtttgcatctgatttagacgatgcaacaaaagctcagcttgctagaggaattagaattaccgagctgatcaaacagaaacaatattccccaatgagcgtagcccaacaatcattaagtatttttgctgcagatagaggctacatggatgacgttgaggttgaaaaaattggcagttttgaagaagcattgcatggatactttacatctgaaaaagcagacctagaaaagagcatcaatgatactggtgattggaatgatgatattgaaaagcaattcactgaagttgttgagcagtttaaaaaaacacaaacgttttaat

SEQ ID NO: 273496 - DNA, 550 bp, Unknown
  Bacterial polypeptide expressing nucleotide sequence isolated from the Sargasso Sea
ggtttatttggtggagccggtgttggaaaaactgtccttataatggagttaataaacaacgttgcaaaagcacatggtggattttcagtttttgctggagttggagaaagaacaagagaagggaatgatctttaccatgaaatgatagactctggtgtaattaaaccagatggagatggatcaaaagcagctcttgtttacgggcaaatgaatgaacctcctggtgcaagagcaagggtagctcttactggattaacagtagttgaatattttagagaccaagaaggacaagatgtgctttttttcgtggataatatttttagatttacacaagcaggctatgaggtatcagcacttcttggaagaattccatctgctgttggatatcaaccaactttagcaactgacatgggtaatttacaggagaggattacaactacaaataaaggttcaattacatctgttcaagcgatttatgtacctgcggacgatttaacagatccagctcccgcgacatcctttgctcacttagatgctacaacggtactat

SEQ ID NO: 273497 - DNA, 943 bp, Unknown
  Bacterial polypeptide expressing nucleotide sequence isolated from the Sargasso Sea
agagttgctcgggcgagtcgtagattctctaggctatcctattgacggaaaaggagaaattgaaagccaaaaatcggagccaatagagaagatagcccctggggtgattgctcggcagtccgttgatcaaccagtgcagactggtcttaaatcaatcgattcgatggtgcctattgggcgtggccagcgcgagttgataataggagacaggcaaaccggaaaaactgcagttgcggtagatgcgataatcaaccaaaaaggtactggaattaagtgtatttatgttgctatcgggcaaaaggcctcttcaatcaatgcagttataaggaaacttgaagaacacgatgccatggagcataccatcatcgttgcggcaacagcgtccgactcagcagccatgcagtatatcgcgccatattcgggttgtgcgatgggagaatattttcgagataggggagaggacgcactaatcatatatgatgatttgactaaacaggcttgggcatatcgccaagtctcgttgttactccgacgacctccaggtcgtgaagcataccctggggatgttttttatttgcattctaggttattggaacgggccgcaagggtaaactcagaacacatagaaaaaatcactaatggcgaggtgaaaggcaaaacaggctccctaactgctttacccataattgagacccaggcgggagacgtttccgcgtttgttccaactaatgtgatttctattactgacggccaaatttatttggaaacagaccttttcaattcaggttttaggccggctatcaatgctggattatcggtttcgcgagtcggcggtgcagcgcagacaaaaatcataaaaaaattgggaggaggagtacgactagccttggctcagtacagggagcttgctgcgttttcccaaatttgcgtcagatttggatga

SEQ ID NO: 273498 - DNA, 574 bp, Unknown
  Bacterial polypeptide expressing nucleotide sequence isolated from the Sargasso Sea
tatgggatcaatgcaagaacgcattactactacaaacaagggctctataacctctgtgcaagcaatctatgtaccggcagatgaccttacagatccagcccctgcgacgtcgttcgcccatctagatgcaacaacggtattgtcacgtcaaatagcagaacttggcatctatccggcggtggatcctctagattccacatcgcgtattctggatccccgtattcttggcgacgagcattatgaggtagcacggagtgtgcaggaggttttgcaaagatataaaagtctccaagatatcattgccatcctcgggatggacgagttatctgaagaagataaactcgttgttgcgagagcaagaaaaatccaacgatttttgtcccaaccatttcatgtggcagaaatttttaccggttttcccggtgtcttagttagcctagaggatacaattaaaggatttaaaggacttgttgcaggagattatgatgatcttcctgaggcagcattttatatggttggaactatagacgatgcagtcgagaaggctaaaaaattggctgctgaagcagcttag

SEQ ID NO: 273499 - DNA, 860 bp, Unknown
  Bacterial polypeptide expressing nucleotide sequence isolated from the Sargasso Sea
aataaaccctatccatcgtcctgctccaaggcatgaagaccttgctacttctactgaaattcttgttactggaataaaagttgtggaccttatggaaccatacactaaaggtggtaaaactggtttatttggtggtgctggagttgggaaaactgttttgattcaagaattaattagaaatattgctacagagcatggtggttattctgtttttgctggagttggagaaagaaccagagaaggtaatgacctttataacgaaatgactgagtcaggcgtaattgaaaaaacaactatggtatttggtcaaatgaatgaacctcctggagctagattacgtgttgcgttgagtggtcttgctatggctgaatattttagagatgatgaaggaagagatgtgttattatttattgataacatttttcgttttacacaagctggttctgaggtgtcggcattattaggtcggatgccctctgctgtaggatatcaaccaactttgagtacagaaatgggtgatttacaagaaagaataacatcaacaaagaatggttccattacatctgtacaagctgtttatgttcctgcagatgacttaacagatcctgcccctgcaactgcttttgcccatttagatgcgacgtctgttcttgaaaggaaaattgcagaactaggaatatatccagctgttgatcctctcgcctctacatctagaatattagacccaagaattataggtgataggcattatgatactgctcaaaaagtgcaagccgtattacaacaatacaaagatcttcaagacattattgctatcctaggaatggatgaattatcagatgatgataagttaacggtct

SEQ ID NO: 273500 - DNA, 791 bp, Unknown
  Bacterial polypeptide expressing nucleotide sequence isolated from the Sargasso Sea
agcatattcaggttgtgcaatgggagaatattttagagatacagggcaggatgcattaattgtttacgatgatttgtcaaagcaagcagttgcttacagagagatatcactattgcttagaaggcctccaggtagagaagctttccctggagatgttttttatcttcactcaagacttttagagagagcagctagagtgaatgcggaatacgtagaaaaaattacggaaggaaaggtaaaaggtaaaacaggatctctaacagccttgccaattattgaaacacaagccggagatgtatctgcttttgttccaactaatgtaatttcaattaccgacgggcagatatttttagaaacagatctttttaattcaggcgttagaccagctattgatccagggctttctgtatcaagagttggtggagccgcacaaactaaaataattaaaaagcttagtggtggaattagaacagaccttgctcaatacagagagcttgcggcattctcacagtttgcatctgatctagatgacgctacaaaagaacaattagaacacggtaaacgaattactgagcttctaaaacaaaaacaatactctccaatgagtgttgctgaccaagctatgagcttatatgcagctgacaaaggctatatgaaggatgttgatatagataaagtgggcgacttcgaatcagctttattagcttattttgaatcagaaaaatctgatctaaaaaagcaaatcaacgatactggagactgggatgacgatattgaaaacccagtttaaa

SEQ ID NO: 273501 - DNA, 635 bp, Unknown
  Bacterial polypeptide expressing nucleotide sequence isolated from the Sargasso Sea
tggttcagaagtttcagcactactaggtcgtattccatcggcagtgggttatcaaccgactctaggtactgaaatgggagcgatgcaagaacgaattacatcgactaaagatggttcaattacatcaatccaggcgatatacgttcctgcagatgactatactgatcctgcgcctgcgacaacatttgctcaccttgatgctacgacagaattatcacgaccaattgctgaacttggtatttacccagctgttgaccccctttcttcttcatcaactatattaactccagatgttgtcggtgagttacattataatactgctaaagaagttaaacgaattttacaaagatataaagagcttcaggatattatcgctattttaggtatggatgaattaactgaagatgataaattattagtctctcgtgcaagaaaaattcaaaaatttatgtcacaaccatttcatgtggcagaagtttttacaggtttccctggtgtttttgttgaaattgaagatacagttaaatcatttaaggccattattgacggagaagtagatgatttacctgagcaggccttttacatggttggtggaatagatcaagtaagggagaaggccaaaaagttaggttaat

SEQ ID NO: 273502 - DNA, 313 bp, Unknown
  Bacterial polypeptide expressing nucleotide sequence isolated from the Sargasso Sea
atgaaaaaaggaaaaatcacacaagttattggagcggtagttgacgttaagtttgatgaaaaactacctgaaattttaacagctttagaatgcaataatgcaggtaacagattggtattagaggttgctcaacatttaggagaatctagcgttagaacaattgcaatggacgcaacagagggactaaagagaggtgatgaagtaaccgatacgggcgccccaataaaaataccggtaggaccagaaactttgggaagaattataaatgtaattggagaaccaattgatgaaaaaggagaagtaaaaaataaag

SEQ ID NO: 273503 - DNA, 718 bp, Unknown
  Bacterial polypeptide expressing nucleotide sequence isolated from the Sargasso Sea
gccggtgttggaaaaacagttaacatgatggagcttattagaaacattgcaatcgaacattcaggctattcagttttcgcaggagtgggcgaaagaacaagagaaggcaatgatttttatcatgaaatgacagattcgaatgttttggataaggtttccttggtttatggacagatgaatgagcctcctggcaacagacttagagttgccttaactggtttaaccatggctgaaaagtttagagatgagggcagagatgtattgttgtttgttgacaatatttacagatatactttggccggtgttgaggtatcagctttacttggtcgtatgccgtcagctgttggttatcaaccaactcttgcagaagaaatgggtgttttgcaagaaagaattacctcaacaaaaacaggttcaattacatctattcaagcagtctatgtgccagctgatgacttaacagacccatcaccagctacaacctttgcgcacctggatgcaacggttgttttgtctagaagaattgcagagttaggcatatacccagccgtagatccgctcgactcaacttcaagacaacttgacccaaatatagttagtcaagaacactatgatgtggcacaaagagttcaaggtgtattgcaaagatacaaagagctaaaagacatcatcgcaatacttgggatggatgagctttcagacgacgataaaaacacag

SEQ ID NO: 273504 - DNA, 784 bp, Unknown
  Bacterial polypeptide expressing nucleotide sequence isolated from the Sargasso Sea
gttaaagaaggagatgtagtaaaaagaactggtaatattgttgatacaccagttggtaaagaattattaggtagagtagttgatggtttaggaaatcctattgatggcaaaggtcctttagataaaggtattaaaaaaagtagggttgaagttaaagcacctggtattattccacgtcaatcagttagtgaaccaatgcaaactggtcttaaatcaattgatagtttggttccaattggaagagggcaaagggaattaattattggtgatagacaaactggcaaaacagcagttgcagtagatgcgattattaatcaaaaaaaaatcaatgaatcaggagatgaaaaacaaaaactttattgtatatacgttgcagttggacaaaaaagatcaacagtaagacaaattcaaaaaacattagaagaagctggagctatggagtacacaacaatcgttgctgctacggcatctgactctgctcctttacaatttttagcaccatatacaggttgtgctatgggtgagtattttagagataatggaatgcatgctttaataatttatgatgatttgtctaaacaagcagttgcttatagacaaatgtcattgctattaagaagacccccaggacgtgaggcttatcctggagatgtcttttatcttcatagcagattactcgaaagagcagcaaaattaagtgacgaacatggtggtggatcacttactgcacttccaattattgaaacacaaggtggagatgtatccgctttcattccaactaatg

SEQ ID NO: 273505 - DNA, 814 bp, Unknown
  Bacterial polypeptide expressing nucleotide sequence isolated from the Sargasso Sea
attgaatctggcgttattgatttagaaggtaaagagtcaaaatgtgcattagtttatggacaaatgaacgaacctccaggagcaagagctcgtgtagctttaacaggtttgacagttgctgagtattttagagatatggaaggccaagatgtattattttttgtagataatatttttagatttactcaagctggttcagaggtgtcagctctgcttggtagaattccatctgccgtaggataccaacccactcttgcaactgacatggggtcacttcaagaaagaattacatctacaaataaaggttcaattacatctgtgcaggcaatatatgttcctgctgatgatttaaccgatcctgctcctgcaacctcgtttgcacaccttgatgcaacaactgtgctttcaagacagattgcagaacttggcatttatcctgccgttgatccactagatagtacttcaagaatactagaccctcgtgttgttggagatgaacattatcgagttgcaagaaatgtacaagctgtactgcagacttataagtctctgcaagacattattgcaattttaggtatggatgagttatctgaagaagataaattgacagtggccagagcgcgtaaaattcaaagatttatgtcccaaccgttctttgttgccgaagtctttacaggaaccccaggaaaatatgttgaattagaggatacgatcaaaggatttgatgcgatctgtaagggtgaatatgatcatctacctgaggcagctttttatatggttggtacaatagaagaagctattcaaaaagcagaaa

SEQ ID NO: 273506 - DNA, 377 bp, Unknown
  Bacterial polypeptide expressing nucleotide sequence isolated from the Sargasso Sea
catcagaattttagacccacaagtagttggtgaagaccactacagagttgcaagagaagttcaaagagtattacaaacttataaaagtcttcaagacatcatcgctattcttggaatggatgaattatcagaagaagataaactaactgttgcaagagcaagaaagatagagaagtttttaagtcagcctttttttgttgcagaaatctttactggctctcctggtaaatatgttgaccttgaagatacaattaaaagttttgacgggcttgttaaaggagaatacgatcatatgcctgaagctgcattttatatggtcggcggtattgatgaagcgattgaaaaatcaaaaaaattagaagctgaagctgcttaat

SEQ ID NO: 273507 - DNA, 732 bp, Unknown
  Bacterial polypeptide expressing nucleotide sequence isolated from the Sargasso Sea
atgcttatagacagatatcattgcttcttagaaggccaccaggaagagaagcgtatccaggagatgtattttatttacactcaaggctattagagcgttgtgcaaaagtttcagatgaattaggaggagggtctttaaccggtctaccaattattgaaactaaagctggtgacgtttcagcctttattcctacaaatgttatctcaattactgatggtcagatatatcttgagagtgaattgttctactcaggaattagaccagctgttaatcctggtacatcagtatctcgtgtaggaggtgctgctcagattaaagctatgaaaaaagttgcaggtcctttaagaattaacttagcacagttcagagaactagaggcctttgctgaatttggttcagatcttgatgccgcctctcaagcacagcttgatagaggtagaagggtagttgagttactaaagcagcaacaatacgaacctgttgcagttgaatatcaagttgtcaccctatttgcagtaacggaaggctatttagataaggtgcctgaggaagatatggtttcaactgaagaaggtcttcatgaatatatagatacaaggcatcctgaaatactcgaaaccataagagatactggtgattttgctgaagatgaattaaaaaatgctgttactgcatttgttaaaacaatagtgacagttgaagaagaagttacaacagaggaagaaagctaaa

SEQ ID NO: 273508 - DNA, 721 bp, Unknown
  Bacterial polypeptide expressing nucleotide sequence isolated from the Sargasso Sea
aatggaaatccgtgcagcagaaatttctgcaatattaaaaaaacaaatagataattttaattctgacgtagagatatctgaagtaggccaagtgctttcagttggagatggaatagctaggattcatggcctagatcaagttcaggctggtgaaatggttgaatttattgatggcactaggggtatggctctgaacttggaggatgataacgttggtgtcgttatttttggaaatgataggaatatcaaagaaggtgagacagtaaaaaggacaggcgcaattgttgacgtccctgttggaaaagaacttcttgggagagtagtagaccctcttggaaatccaattgatggaaaaggtgatattaaagcaactgaaagaagaatggttgacgttaaagcaccgggaattattccaaggaagtcggttcatgaaccaatgcagacaggacttaaggctcttgattctttagttccagttggaagaggtcagagagaattaattattggtgatagacagacaggaaaaacagctgttgcgatagacacaattattaatcaaaagaagaattgggattctggggatgaaacaaaaagattatattgtatatatgttgcgattggtcaaaaacgatcttcagtcgctcaagtagttaaaacattggaagatgctggagctatggaatatacgatagttgtatctgcaacagcatctgaacctgca

SEQ ID NO: 273509 - DNA, 851 bp, Unknown
  Bacterial polypeptide expressing nucleotide sequence isolated from the Sargasso Sea
tttgcgggtgttggagaaagaaactagggaaggaaatgatctttaccacgagatgatagagtcaggagtaattaagccagatggaccaggttcaaaggcagcactagtttatggacaaatgaatgaacctcctggagctagagcgagagttgctttgacaggattgactgtagctgaatatttcagagatcaagaaggtcaagacgtactattttttgttgataatatttttagatttacacaagcaggatcagaggtttctgctttacttggaagaattccatcagcagttggataccagccaactctagctactgatatgggaaatttgcaagaaagaattacaacaacaaataaaggatcaattacatcagtacaagccatttatgttcctgctgatgacttaacagatcctgctccagcaacatctttttctcatttagatgctacaacagtattgtctagacaaattgcggaattaggaatttatccagctgttgatccattggactccacatcaagaattctagacccaagaatagttggagatgaacactatagagtagcaagagaagtccaaaaaatattgcaaacttataaatctttacaagatatcattgcaattttaggtatggatgaattgtcagaagaagataaactaactgtagctagagcgaggaagattcagagatttctatcgcaacccttttttgtagctgaagtgtttacgggttctccaggaaaattagttgaattagactcaacaatcaaaggttttgatgcaatctgcaaaggtgaatatgaccatctacctgaagcagcattttatatggtgggaacaatagacgagg

SEQ ID NO: 273510 - DNA, 519 bp, Unknown
  Bacterial polypeptide expressing nucleotide sequence isolated from the Sargasso Sea
aatgccaagtttagatgatttaagaaaaagaataacaagtgttaaatctacacaaaaaattacaaaagctatgaaaatggtagccgccgcaaagcttcgaaaagcacaagaaatggctgagaaaggaaggccttatagtgataaaatgaattcgataattcaaaatttaagtaaggctataactgatccctcaaatgcccctaaacttttagttggatcagggggagataaaactcacctatgtgttgtaatgacagcagaccgtggtttatgtggaggttttaacaccaatattgttaaacaagcaaaaaattattttaaaaaaattttaaaagactctaaaactcttaaaataattactgtaggtactaagggtttagatcaattaaagagagaatatggcaaatatattattaagaaaattgattttaaaaacaagaaacaaacatcttttgaggatgcctcattagttggtgacgaaattgtaaaattatttaaaaataatgaatttgataaatg

SEQ ID NO: 273511 - DNA, 268 bp, Unknown
  Bacterial polypeptide expressing nucleotide sequence isolated from the Sargasso Sea
tatcttaggtattgaagattatcagatgacgataaatctacagtatcaagagctagataaaattcaaagatttttgacacaacctttttctgttgctgaagtttttacaggttctcctggtaaatatgtttctgttagagatacagtacaaggttttaaagaaattttagaaggcattcacgatgaattacctgaacaagcattctatatggtagggacgattgatgaggctgtagaaaaaggtaaacaaatggctgcttctaactag

SEQ ID NO: 273512 - DNA, 927 bp, Unknown
  Bacterial polypeptide expressing nucleotide sequence isolated from the Sargasso Sea
ccaacaacagttaggcgatggaattgttcgcacattagcaatgggtatttcggatggtttggcgagggggcttgaggtaactaatacgggcgcgcccatttcgatacccgttggggaggaaactctcgggcggatcgtagatgtcctagggaatccaattgatgagaagggcccagtcaatgcgcaagagcatatggcaattcatcgtgccgcaccgacctatgaagatcaggttggcggcaacgaggttctggagaccggtatcaaggttattgaccttatctgcccatttgcacgaggaggaaaggtaggtctttttggaggcgcaggtgtcggcaaaacggtaactatgctggagctcataagaaatatagcgattgagcactctggattatcagtctttgcgggtgttggggagaggactcgagagggcaatgatttttactatgagatggaagaggctggagtcctcgataagatctctcttgttttcgggcaaatgaatgagccccctggaaaccgactgagagttgccctaacgggcttaacgatggccgaaaaatttagggatgaaggtcgtgatgtgctgcttttcgttgacaatatatacagatataccttagcgggaactgaagtatcagccctgttgggtcgaatgccttccgctgtcggatatcagccaacgctcgcagaagagatgggagtgctccaagagagaatcaccaccactaaaacaggttcgataacatctgttcaagctgtatatgtacctgcggacgacctcaccgatccatccccagcaacgacatttgctcatttggattcgacagtcaccctgtctagagcaattacagatttaggaatttatccggcggtcgacccgctcgattccacaagtagacagctcgatcctttggttgtcggaga

SEQ ID NO: 273513 - DNA, 349 bp, Unknown
  Bacterial polypeptide expressing nucleotide sequence isolated from the Sargasso Sea
tgatgagcattacagagttgctagagaagttcaaaaaatcttacaaacttataaatcgcttcaagatattattgccattttaggtatggatgaattatctgaagaagataaattagttgtagctagagctagaaaaatacaaagattcttatctcaaccattctttgttgcagaagtatttactggttctccaggtaagttagttgatttagattcaacaataaaaggctttgcagctatttgtaaaggtgattatgatcatttaccagaagcagctttttatatggttggaacgatagaagaagcgatagaaaaagctgacaaaatggctaaggaagcagctgcttaa

SEQ ID NO: 273514 - DNA, 817 bp, Unknown
  Bacterial polypeptide expressing nucleotide sequence isolated from the Sargasso Sea
aatgatagagtcaggagttattaaaacaaacgaagcaggttcaaaagcagcattagtttacggtcaaatgaatgaacctcctggagcaagggcaagagtggctctgacaggtttgactgttgctgaatattttagagatcaagagggacaagacgttctttttttcgttgataatatttttagatttactcaagcaggttcagaggtatcagctttgctcggtagaattccctcagctgttggatatcaaccaactctagctactgacatgggtaacttacaagaaagaattacaacgactaacaaaggttcaattacctctgtacaagcaatttatgttcctgcagatgatttaacagatccagctcctgcaacatcatttgctcacctagatgcaacgactgtattatctagacaaattgctgaaataggtatttatccagctgtggatccactagactcaacgtctagaattctagaccctagaattgttggtgatgaacattatagagtagcgagagaagttcaaaaagtattacaaacttataaatcactgcaagatattattgcaattttaggaatggacgaactatccgaagatgacaagttaattgttgctagagcaagaaaaattcaaagatttttatcacaaccattttttgttgcagaggtatttacaggttctccaggtaaattagttgatttagaatcaacaattaaaggttttgacgctatctgtaaaggagagtacgatcacttgcctgaagcagcattttatatggttggaacaatagaggaagctatagaaaaaagctga

SEQ ID NO: 273515 - DNA, 410 bp, Unknown
  Bacterial polypeptide expressing nucleotide sequence isolated from the Sargasso Sea
agcagctcaaactaaatctatgaaaaaaatgcagggtccagtaaagctagaacttgctcaatatcgtgagatggcagcatttgcgcaattcgcatcagatcttgatgcttcaacacgtcaactgctggatcgaggagtccgtcttgttgaattgttaaaacaagggcaatattcacctttaacagttccagagcaagtagtttccgtttatgctggggttaaaggttatcttgataaaattgatgtaaaagatgttgttaggtttgaatcagaagtacatgaagaagtaagagctaatcatgcagaacttttagaatcaattgctaaagaaaaagaattatcatctgcaaatgaagaaaaacttaaaagttttttagatgcctttttaaataaatttcagagtaagtaaa

SEQ ID NO: 273516 - DNA, 829 bp, Unknown
  Bacterial polypeptide expressing nucleotide sequence isolated from the Sargasso Sea
aaagctcatggaggattttctgtcttcgcaggtgttggtgaaagaactagagagggaaatgatctttatcatgaaatgatagagtctggagttattaaaacaaacgaagcaggctcaaaagcagcattagtttacggacaaatgaatgaacctcctggagcaagagcaagagtggctctgacaggtttaactgttgctgaatattttagagatcaagaaggacaagacgttctttttttcgttgataatatttttagatttactcaagcaggttcagaagtatcagccttacttggtagaattccgtctgctgttggatatcaaccaactctagcaactgatatgggtaacttacaagaaagaattacaacaactaataaaggttcaattacttctgtacaagcaatttatgttccagcagatgatttaacagatccagctccagcaacatcatttgctcacttagatgcaacgactgtattatcaagacaaattgctgaaattggtatttatccagctgttgatccactagactcaacgtctagaattctggaccctagaattgttggtgatgaacattacagagtagcgagagaggttcaaaaagtattgcaaacttacaaatcactgcaagatattatcgcaattttaggaatggatgaactatccgaggaagataagttaattgttgccagagcaagaaaaattcaaagatttttatcacagccattttttgttgcagaggtatttacaggttctccaggtaaattagtagacttagagtcaacaataaaaggttttgatgccattgtaagggagagtatgatca

SEQ ID NO: 273517 - DNA, 955 bp, Unknown
  Bacterial polypeptide expressing nucleotide sequence isolated from the Sargasso Sea
gaggtaaaagctccaggaataattccagaaaagtcagttaatgaaccaatgcaaacccgattaaaagctattgatagtcttatcccaattggaagaggccagcgtgaacttattattggcgataggcaaacaggaaaaacagctgttgctattgatacaataataaatcaaaaaaaaattaatgagtctaatgatgaaaaaaagaaactttattgtatttatgttgctataggtcaaaaaagatcaacagttgcacaaattcttaagacattgcaagatgcgggagcaatggagtatacaatcattgtttcagcaacagcatctgaccctgctcctctacaatttctagcaccttatactggttgcacatttggagaattttttagagataacggtatgcacgcattaattatttatgatgatttatccaaacaagcagttgcttatagacaaatgtcactattattaagaagaccccctggcagagaagcatatcctggagatgttttttatttacatagtagattacttgaaagagctgcaaaacttaatgatgataatgggggaggttcgcttacagctttaccaattattgaaacacaagctggagatgtttcggcatacattccaactaatgttatatcaataacagatggtcaaatatttttaggaactgaattatttaatcaaggaattagaccagcagttaatgttgggctttctgtttcacgagtagggtctgctgcccaaacaaaagctatgaaaaaagttgcaggctcaattaaacttgaattagctcagtatcgtgaaatggcggcttttgcacaatttggttctgacctagatgcctcaacacaaaaacttttaaatcgagggtctaaattaactgaattattaaagcaaaatcagtacagtcctatgacagtagctgaacaggtagttgtaatatatgcag

SEQ ID NO: 273518 - DNA, 664 bp, Unknown
  Bacterial polypeptide expressing nucleotide sequence isolated from the Sargasso Sea
atggaaataaatccttcagaagttacaaaaatattaaaagagcaaattaaaaaatttggagataaagccgaaattacagaagttggacaggttttgtccgttggagatggtatagcaagagtttatggtttagacaatgtccaagcaggtgaaatggtagagttcgtagatggatctaaaggtatggctttaaatttagagagtgaaaacgttggtgttgttatatttggagatgataaggcaattaaagaaggtgacacagtaaaaagaacaggagaaatcgttgatactcctgttggaaaagagttgcttggtagagtagtagatggattaggaaatccgattgatgggaagggtgctttagataaaaatgtaaaaaaaagtagagttgaagtaaaagctccaggaattattccaagaaaatctgtaagtgaaccaatgcagtcaggtttaaaagcaattgatagtttagttccaattggaagaggacaaagagaattaatcataggtgatagacaaacaggaaaaacagcggttgccgtagatacaataataaatcaaaaaaaaataaacgaaagtggagatgaaaaacagaaattgtattgtatatatgttgcaattggacaaaaaagatcaacggtaagacaaattcagaaaacttaga

SEQ ID NO: 273519 - DNA, 982 bp, Unknown
  Bacterial polypeptide expressing nucleotide sequence isolated from the Sargasso Sea
ggtaagggtcccattgatgctaagcaaagaggtcgtgtcgaggtaaaggcacctggtattatgccgcgtaagggtgttcacgaacccatgcaaactggattgaaggcaatcgatagcctgatccctgtgggccgtggccaacgtgaactcattattggggataggcagacaggaaaaaccgctattgcaatagacgcgtttattaatcaaaagtcagtgaatgatgctgcgggcgacgatgattcaaagaagttgttttgtatttatgtggcagtggggcaaaaacggtctactgttgcacaaatagttaaaacactagaggactatggagcgatggagtattcaattgtgatagcttcaactgcttctgaaccagcacccatgcaatttttagctccttatgccggctgtaccatgggtgaatactttagagataatggtatgcacgccctgattgtctacgatgacttgtccaaacaggctgtagcttaccggcaaatgtctttgttgctaaggcgccctcctggacgtgaagcataccctggtgatgtcttttacattcactcaaggctgctagagcgtgcagcaaagatgaatgatgagaacggagcaggttcacttaccgcactgccggttatcgaaacgcaagctggtgatgtctctgcatacattccaaccaatgttatttctataaccgacggtcagattttcttagaaaccgaattattctacagaggcataaggcccgcggttaacgtcggactctctgtaagtcgtgttggttcagcggcacaaattaaagcaatgaaacaagttgcaggcagaattaaattggaactggcccagtatcgagagatggcagcgttcgctcaatttgcttcggacttggatccagtgacacaaagactgctggcgaggggtgtccgattaacagaggtattaaaacaggggtcatatgcaccattaaccgtagaagagcagg

SEQ ID NO: 273520 - DNA, 736 bp, Unknown
  Bacterial polypeptide expressing nucleotide sequence isolated from the Sargasso Sea
ctgatcccgcttcaatgcaattttatcgcaccgtattcgggatgctcgatgggcgaatactatagagataggggcgaggacgctttgatcatctatgatgatctaactaaacaagcatgggcctatcgccagatttcacttctgctcagaaggcctccaggaagagaggcatatccgggagatgtcttttacttacactctcgtcttctggagcgtgcagcgagagtaagcgctaactacgtagagaagttcactgaaggtaaggttaagggcaaaaccgggtctctgacagcactgcctgttattgaaactcaggcgggcgacgtatctgcattcgttcccacgaacgtaatttccattactgatggccagatatttttagaaaccgaccttttcaactcgggtatccgtccggcaatgaatcctggtatatcggtttcccgagttgggggtgccgctcagacaaagatcatcaaaaagttagggggcggtattcggatagcgctagcacaatatcgcgagctggcggctttcgcggcttttgcatctgatttggatgatgctactagagcgcagcttgaacatgggcagcgcgtgacagaattaatgaagcagaagcagtattcgccattatcaattgcagagatgggagtatctctttttgcagctaatgaaggatttttggaggatatagagctaaataaagtcttggatttcgaatcggctcttctggcgt

SEQ ID NO: 273521 - DNA, 637 bp, Unknown
  Bacterial polypeptide expressing nucleotide sequence isolated from the Sargasso Sea
atgactataaatccatccgaagtaactaagctactaaaagaccaaattaaaaattttggagaaaaagctcaagtttcagagataggcaaagttttgtctgtgggagatggaattgctcgggtttttggactggacaacgtgcaagcaggagaaatggttgaatttgaggatggatcaaaaggtatggcacttaatcttgaaaatgacaatgtaggcgttgttatatttggagatgatagaaatattaaagagggtgatactataaaaagaactaaagcgattgtggatgtcccagtaggaaaagaactattaggcagagttgttgatggattaggaaacccaatagacggaaaaggggcgcttaaagttaaaaatagaaaaagagttgaagtaaaagcgccaggcataataccaagacaatctgtaaatgaaccaatgcaaactggtcttaaatcaatagactcacttataccaataggaaggggtcaaagagagcttataattggtgataggcaaacagggaaaacagctgtagcaattgatgcaattataaatcaaaaaaaaattaatgagtcctcagatgaaaagaaaaaattgtactgtgtttatgttgctatcggtcagaagcgatcaactg

SEQ ID NO: 273522 - DNA, 688 bp, Unknown
  Bacterial polypeptide expressing nucleotide sequence isolated from the Sargasso Sea
atctggcattgaagtaggtgttcactattattgggatatagcagggatctcactgcatggtgaagtattcattatcagttggcttgtaatcttcttaatcctaggagctgctttcctaggtactagtaatctagagcaaattccaaaaggttggcaaaactttatggaatcagttcttgaatttactacagatattgcaagaaaccagcttggtgaaagtttctaccgtccatgggttccttttgtcagcacgttattcctattcatcttcggatgtaactgggctggtgcacttattccatggaaagttattagtttaccagaaggtgagctagcagcaccaacaaatgacatcaacacaactgttgctctggcattattagtttctgttacgtacttctacgcaggaattagaaaaaagggtttaggttactttggtcgttatcttcaaccaacaccaattcttttaccgattaatatcctagaagattttacaaaacctttatcattaagcttccgactatttggtaacactttagcggatgaactaacaattgcggtaattacactattagtaccgttatttattccactaccaattatgggtcttggtatatttgcgagttcagtacaagctcttattttctctacattagcagcagcttacattgctgaagctgttgaataa

SEQ ID NO: 273523 - DNA, 784 bp, Unknown
  Bacterial polypeptide expressing nucleotide sequence isolated from the Sargasso Sea
atgagtaatggagttgtgacacaaattatcggagcggttatagatgtcgaattcgatagagagaacataccaaacgtatatgaggctcttaacattgttggtcttgaaaccgtacttgaggttcaacagcaattaggtgatggaattgtaagaactatcgctatgggctccactgaaggattaaagagaggcctagaggttgtcagaacaaatgcacccatctctgttccagttgggcaagaaactcttggaagaattatggatgttctaggtaaccctattgatgaaaagggagatatcggcgagaaagaaagacagccaattcataaaagccctccaagctacaccgatcaggcgggatcaaacgaattgctggaaacgggtattaaggttatcgatttaatgtgtccttttgccaaaggcggaaaggttggtttgtttggtggtgccggagtaggtaagactgttaatatgatggaactcataagaaacattgcgattgaacattcagggttttctgtttttgccggagttggtgaaagaactcgagaaggtaatgatttttatcatgagatgactgaatcaaatgttctagataaagtttcgcttgtttatgggcaaatgaatgagcctccaggcaataggttaagagttgctttaactggcctaacgattgctgagaaatttagagatgaaggaagagatgtacttctttttattgataatatttatagaaatacacttgctggtgttgaggtatcagctcttttaggaagaatgccat

SEQ ID NO: 273524 - DNA, 622 bp, Unknown
  Bacterial polypeptide expressing nucleotide sequence isolated from the Sargasso Sea
acgtaaatctgtaagtgaaccgatgcaaactggtcttaaatctatagatagtttagttccaattggaagaggtcaaagagaattgattattggtgatagacaaacaggaaaaactgcagttgctgttgatgctattataaaccaaaaaaagataaacgagtcaaatgatgaaaaacaaaaattatattgtgtatatgtagcaataggtcaaaaaagatctactgttaggcaaattgaaaaaactttagaagaagctggagcaatggaatatacaactattgttgctgctacagcgtcggatgctgctccacttcaatttttagcaccttacactggctgtgcaatgggagaatattttagagataacggcatgcatgcattaatcatctatgatgatctttctaaacaagcagtagcttacagacaaatgtcacttttattaagaagacctccaggaagagaagcttatcctggagatgtattttatttacatagtagactacttgaaagagcagctaaattgagtgatgaacatggaggagggtctttaacagcacttccaattattgaaacacaaggaggagatgtttcagcatttatacctactaatgtaatatcaata

SEQ ID NO: 273525 - DNA, 531 bp, Unknown
  Bacterial polypeptide expressing nucleotide sequence isolated from the Sargasso Sea
tatgagaaaaggaaaaattacacagattattggagcagtagtcgacgttaagtttgatggagaactgcccgaaatattaacagcattagaatgtaaaaatagtggcaatagattagtcttagaagtagcacaacatttaggagaatcaagcgtaagaacaattgctatggatgcaaccgaaggtttgaaaagaggagatgaagtaatagatacaggagccccaataaaagttcctgttggccctggaactttagggagaattataaatgtcattggagaacctatagatgaaaaaggagaagttaaaacaaaagaaaattggcctatccatagatcggcaccagaatttaatgatcaatccacagaaacagaaattttagtaactggaattaaggtagttgacttgctagccccttatgcaaagggtggtaaaattggattatttggtggagcaggagtaggaaaaacagtactgataatggaattaattaacaatgttgcaaaagcacatggaggattttcagtctttgc

SEQ ID NO: 273526 - DNA, 540 bp, Unknown
  Bacterial polypeptide expressing nucleotide sequence isolated from the Sargasso Sea
ggatcacatcaactaaaacagggtcaatcacctcaattcaagcagtttatgttccagcagacgacttgacagacccatcaccagctactacttttgcacaccttgatgcaacagttgtattggcaagatcaattgctgagctgggaatttatcctgccgttgacccccttgattcaaatagccgtcaattagatccaggaatcgtagggcaagagcactacgataccgcgagagctgttcaacaagttttacaaaggtataaagagctacaggacattattgcaattcttggaatggatgagttatcagaagaagataaactcaccgttcaaagagcaagaaaaattcaaaggttcttatcccaaccattttttgttgcagaagtgtttacagggtcccctgggcagtatgtgtcattaagggattccattaaggctttccaaggaatagttgctggtgattatgacgatcttccggaacaagcattttatatggttggaacaattgaagaggcggttgaaaaagcaaaaagtatgtaat

SEQ ID NO: 273527 - DNA, 407 bp, Unknown
  Bacterial polypeptide expressing nucleotide sequence isolated from the Sargasso Sea
cggcgccgcgcagaccaaggcgatgaagaaggtggcgggctcgatcaagctggagctggcgcagtaccgcgaaatggcggccttcgcgcagttcggctcggacctggacgcctcgacccagcgcctgctcaaccgcggtgcgcgcctgaccgagctgctcaagcagccgcagttttcacccatgccggtcgaggagcaggtggtgtcgatctttgccggtaccaacggctatctcgacaagatcgccgtggaccaggtgaccgactacgaggccgccatgctcagcttcatgcggtccgaccatccgcaagtgctcgccgaaatacgcgacacgggcaagtttgaggacggcacgcgcgacaagctcaaaaccgcgctcgatactttcgccaagcaattcgcctgat

SEQ ID NO: 273528 - DNA, 688 bp, Unknown
  Bacterial polypeptide expressing nucleotide sequence isolated from the Sargasso Sea
agaaaaggaaatattacacaagttataggagcagtggtagatgtaaaatttgatggagatctgccagaaattttaaccgcattagaatgtaaaaatggggatagccgactggttttagaagttgctcaacatttaggagagtcaagtgttagaacaattgcaatggatgctacagaaggtctaaagagaggagatgaggttattgatacaggagcaccaataaaagttccagttggaccaggaactttaggaagaattataaatgtagttggtgaaccaatcgatgaaaaaggtcaagttaaaaccaaagaaagttggccaatacatagagcggcacccgaatttaatgaccagtcaacagaaacagaaattttagttacaggaattaaagtaattgatttgttagcaccttacgcaaaaggcggtaaaattggtttgtttggtggagcaggagtaggaaaaacagttatcattatggaacttataaacaacatagctaaagcacatggaggattttcagtatttgcgggtgttggagaaagaactagagaaggaaatgatctttatcatgaaatgatagagtcaggtgtaatcaaacctgaaggaaatggatcaaaggctgcattggtttatggacaaatgaatgaacccccaggagcgagagctagagttgcgttgactggattaa

SEQ ID NO: 273529 - DNA, 766 bp, Unknown
  Bacterial polypeptide expressing nucleotide sequence isolated from the Sargasso Sea
gtattttagagaccaaggaaaagatgtctgtatcatctatgatgatttgaccaaacaagcagctgcctacagagagctctctcttcttttaagaaggccgcctggaagagaagcttacccaggtgatgtcttttacttacacagtcgcttacttgagagggcttgcaagctaagcgatgatcttggcggggggtcgattacagcctttcccattattgaaacccaagcaggagatatttctgcttatattccaaccaatgtgatatccataaccgatggtcaaatttttttagaatcagagcttttctacagcggcattcgaccggctatgaatgtagggctttctgtctcaagagtgggtggtgcagctcaaattccagctatgaaagcagtcgctggatcagtgcgcctagaactagctcagtataacgagctcaaagcctttgcccagtttggatctgatcttgatgagagtactaaaaaaacactcaaacggggttctgtcttggtcgaagttttaaaacaaccccagtatgaaccgcttgatgcagcgatccaagtctgtgttctttatgctgcaaccagaggctttcttgacgaaatggaactgagcttacttgcttcctgggagagttcttttaaggcttatctcagtgaagaaaaaagtaagttgcttgatcagatcagaggaggggcgaagataagcgaatatgagagtgaaattaaagaaaccctttcagcccatatgacgaggtttaaaaactag

SEQ ID NO: 273530 - DNA, 847 bp, Unknown
  Bacterial polypeptide expressing nucleotide sequence isolated from the Sargasso Sea
caaagcgtgagcgagcccatgcagacaggacttaaagcgcttgactctcttgtgcctgtgggtcgaggtcaacgagaattaattattggagatagacaaactggaaaaacagccgttgctatcgatacgattataaatcaaaaggaaattaatcaatcagatgatgagtctaaaaaactttattgtatctatgtagcgattggtcagaaaagatctacagttgctcaggtcgttaaaactttggaagaaaatggggcgatggaatacactattgtcgtcgcagcctctgcttctgatccagcacctcttcaatttttagcaccttacgcaggttgctctatgggtgagttttttcgtgacaacggaatgcacggtctaatcgtttatgatgatttatcaaaacaagcagttgcatatagacaaatgtcattactactaagaagaccaccaggacgtgaagcgttcccaggtgatgttttttatcttcactctcgtcttttagaaagagcagctaaaatgaatgatgaaaatggtggcggaagtttaacagctttacctgttattgaaacacaagcgggcgatgtgtcggcattcattccaacaaatgtgatttcaattactgatggccagattttcttagagacagaattattcttctctggtatcagaccagcgataaatgttggtttatccgtgagtcgtgtgggatctgcagctcaaactaaagctatgaaaaaagttgctggtaaaattaaattagaactggcccaataccgagaaatggctgccttttctcagtttgcatcagacctagacgcatccactaaacaattatggcaagagggag

SEQ ID NO: 273531 - DNA, 799 bp, Unknown
  Bacterial polypeptide expressing nucleotide sequence isolated from the Sargasso Sea
gtatacaacgattgttgctgcaacagcgtctgactctgcaccacttcagtttttagctccttacacagggtgtgcaatgggtgagtattttagagataatggaatgcatggactaattatttatgatgatttatctaagcaggctgttgcttatagacagatgtctctacttttaagaagacctccaggacgtgaagcttaccctggtgatgtgttctatctacacagtagattgttagaaagagcagcaaaattaagtgatgagcatggtggaggttctttaacagcacttccaatcattgaaacacaaggtggtgacgtatcagcttttattccaactaacgtaatctcaattacagatggtcaaattttcttagaaactgaactttttaaccaaggaattagaccagctattaacgtaggtttatctgtttctagggttggttcttcagcgcaaacaaaagcgatgaaaaaagtttctggatcaatgaaattagagttagctcagtatagagagatggctgcttttgctcaatttggttctgatttagatgcatcaacacagcaacttttaaatagaggttcaaaattaactgaacttcttaaacaaaaacaatattcgccaatgacagtagctgaacaagttatttctgtcttctgtggagtaaaaggttatttggacgatattgaattaaaagacattgctgagtttgaaaacaaaattatcgaaaagtgtaagtccgataaacctgaaataattgactcaattcaaagttcaggcaaacttgaagaagaataa

SEQ ID NO: 273532 - DNA, 445 bp, Unknown
  Bacterial polypeptide expressing nucleotide sequence isolated from the Sargasso Sea
tgctcatttggatgctaatgttgttctttcaaggcaaattgcttctctaggaatctatccagcagtagatcctcttgactcaaacagcagacagctcgaaccaggaatagtgggccaagagcactatgatgttgccaactcagtaaagcagatactaaataggtataaagagctgaaagacattattgcaattttagggatggatgagctttcagaagatgacaaactggttgtagcaagagctagaaaaatagaaaggttcctctctcaaccttttttcgtggccgaggtattcactcaagttccaggaaaatatgttcccctatcagaaacaatcagagggttcaaagggatcgttgatggagaatatgacgatattcctgaacaggcatttttaatggccgggggaattgacgaggtagtggaaaaggctaaggacgtttaa

SEQ ID NO: 273533 - DNA, 922 bp, Unknown
  Bacterial polypeptide expressing nucleotide sequence isolated from the Sargasso Sea
ggttggtgaaataatagaggttggtgatggagttgccagggcatcaggtcttgaaaatgttatgagttctgagcttgttgaattacccaatgatgtatttggaatggctttaaatcttgaagaggataatgttggccttgtattattcggtgaaaccaggctggtcaaggaaggagatattgctaaaagaactggacgtgttgtagaggtccccgtgggtaaagaaatgcttggtagagttgtgaatccattgggtcagccattagatggtaagggaccaataaacagctcaagtacccttcctattgaaagaaaagcattaggtgtaatggctcgtagcccagtaaatgaacccttgcaaactggtattaaggctattgatagtatggtgccaattggtaggggacagcgggagttaattattggcgataggcaaacaggaaaaactgctgtcgcgattgatgcgataataaatcaaaaatatacccatgaaacggatgaccctgtttattgcgtttatgttgccattggacaaaaagcatccactgtcgctagtttagtatcagagctagaagctcaaggagctatggagtatacagtagttgtagctgctaatgcctctgatccggcgcctatgcagtatattgcaccatatgctggttgtgcaatgggggagttttttagagataatggtcagcattctttgattgtctatgatgatctatcaaaacaagcagttgcatatagacaaatgtcacttgttttaagaaggccccctggccgcgaggctttcccgggtgatgtattttatttacatagtcgattattagagcgagcatctaaattatcaaaagaccatggaggcggctcactgacagctcttccagttattgaaacgcaagagggagatgtttcggcatac

SEQ ID NO: 273534 - DNA, 904 bp, Unknown
  Bacterial polypeptide expressing nucleotide sequence isolated from the Sargasso Sea
aagagatctacagttagacaaattgaaaaaacattagaagaagctggagctatggaatatacaacaatagtagcagcaacagcatcagatgcagcgcctttgcaatttttagctccttacacaggatgtactatgggtgagtattttagagataatgggatgcatgctttgattatatatgatgatttatcaaaacaagctgttgcatatagacaaatgtcacttctattaagaagacctcctggaagagaagcctatcctggagatgtattttatttacatagtagattattagaaagagctgcaaaattgagtgatgaacatggtggaggatcattaacggctcttccaattattgaaactcaaggtggagatgtttctgcattcatacctactaatgttatttcaattactgatggtcaaatatttcttgaaacagaactttttaaccaaggaataagacctgctataaatgttggattatctgtatcaagagttggatcatctgctcaaactaaagcgatgaagaaagtttcagggtccatgaaattagaacttgcacagtatcgtgaaatggctgcgtttgcacaatttggttcagacctcgatgcatctactcagaaattacttaacagaggatcaaagttaactgaacttttaaagcaaaatcaatattctcctatgacagttgcagaacaagtcatttctgtattttgtggtgttagaggacatcttgatgatatagaacaaaaggatatttcaagttttgagagtaaaattattgaaaaatgtaaatctgaaaagccagatataattgagtcaatcacagcttcaggaaaacttgaagatgacaaagagaaagaattgaatgaaattattttacaacttaagaaagatttaactc

SEQ ID NO: 273535 - DNA, 784 bp, Unknown
  Bacterial polypeptide expressing nucleotide sequence isolated from the Sargasso Sea
gaggcccttcgtgagatctcgggccgtctcgccgagatgcccgccgactcgggctaccctgcgtacctcggcgcgcggctcgcgtccttctacgagcgctcgggcaagtgccgcctctctggcgcgccggagcgcatcggctcgatctcgatcgtcggcgccgtctcccctccgggtggtgacttctccgaccctgtctgctcggcgaccttgggcatcgtccaggtcttctggggcctcgacaagaagctcgcgcagcgcaagcacttcccgtcgctccactggctcctctcgtactcgaagtacctccgcgcgttggacccgtggtacgaggagaactggccccagttcccgccgatgcgtacaatcgtcaaggagatccttcaaaccgaggacgacttgactgagatcgtccagctcgtcggcaaggactcgctcgccgagggcgacaagctcatcctcgacgtggcgaagatcatcaaggacgattacctccagcagaatggcttctccgattacgaccgcgtctgccccttctacaagtgcgtgtggatgatgaagaacatcaccgacttctacacgctcgcgtcgaaggcgatcgagaactcgaccgccgagaacaagatcacgtgcaacaagatcaagcagtcgatgaacgacacgatctacaagatcgtctcgcaaaagttcaggctgccgaccgacggcgaggaggccaacgttgcgcacttccaggagctcaacgaggagatcttcgacgcgttccgcagctttgaggattaga

SEQ ID NO: 273536 - DNA, 406 bp, Unknown
  Bacterial polypeptide expressing nucleotide sequence isolated from the Sargasso Sea
atcagctcaaacaaaagcgatgaaaaaagtttttggttcaatgaaattagagctagcacaatacagagaaatggcagcttttgctcaatttggatctgatttagatgcatctacccagcaacttttgaatagaggctctaagttaactgaacttttaaaacaaaaacaatattcacctatgactgttgcagaacaagttatttcagtattttgtggagtaaaaggttatctggacgatattgatttaaaagatgttgctgaatttgagagcaagattattgaaaaatgtaaatcagacaagcctgaaattatcgagtcaattttaacttcaggaaaacttgaggaagataaagaaaaattacttgttgaggcaatcactcaattaaaaggaaattttaaatcttaa

SEQ ID NO: 273537 - DNA, 345 bp, Unknown
  Bacterial polypeptide expressing nucleotide sequence isolated from the Sargasso Sea
tatggcaagtttagacgacctaaaaaaaaggatagctagtgtaaagtctacacagaaaattactaaagctatgaaaatggttgcagcagctaaattaagaagagctcaagaaagtgctgagaagggaaggccatattctgaaaaaatgaataatgtaattttaaatttatcaaatggtatatctgataaagaaaatgcaccaaagttattgtcaggcactggtcaggaaaaaactcatctttgtgtggtgatgacttctgatagaggtttatgcggtggatttaattctaatattattaaaaaagctaaaagttatttcgcaaaaattttagatgaaggtaaaga

SEQ ID NO: 273538 - DNA, 913 bp, Unknown
  Bacterial polypeptide expressing nucleotide sequence isolated from the Sargasso Sea
agatggcaaaggtgcactagacaaaggtataaaaagaagtagagttgaagttaaagctccaggcataattccaagaaaatctgtaagcgaaccaatgcaatcagggcttaaatcagttgatagtctagttccaattggaagaggtcaaagagaattaattattggagatagacaaacaggaaaaactgcagttgcaattgatactataattaatcaaaagaaaataaatgagtctaatgatgaaaagcaaaaattatattgtatttatgtagcaattggtcaaaaaagatcaactgtaagacaaatagaaaaatctttggaagaggcaggagctatggaatatacaactatagttgcggcaacagcatctgatgctgcaccacttcaatttttagccccttatactggttgcgctatgggagaatattttagagataatggaatgcacgctttgattatttatgatgatttatctaaacaagcagtagcatatagacaaatgtcattattgttaagaagacctcctggaagggaagcttatccgggagatgttttttatttgcatagtagacttttagaaagagcagctaaacttagtgatgaacacggagggggctcattaacagcactcccaattattgaaacacagggtggcgacgtatctgcttttattccaacaaatgttatttcaattacagatggacaaatatttcttgaaacaaacttgtttaatcaggggattagaccagcaattaacgtaggtttatctgtatctagagttgggtcttcggctcaaacaaaggctatgaagaaggtttctggttcaatgaaattagaattggcacaatacagagaaatggctgcattcgctccattcggatcagatttagatgccctcactcaaaaattataa

SEQ ID NO: 273539 - DNA, 859 bp, Unknown
  Bacterial polypeptide expressing nucleotide sequence isolated from the Sargasso Sea
aggtcctgaaacattaggaagaattattaatgttataggtgaacctattgatgaaaaaggtgaggttaaaactaaggaaagttggcctatccacagagcagcaccagagtttaatgaccaatcaactgaaactgaaattttagtaactggaattaaagtagtagacttattagcaccatacgcaaagggaggtaaaattggtttatttggtggtgcaggagttggaaaaacagtaattataatggaattaattaataatattgcaaaagcacacggtggtttttctgtatttgctggagttggagaaagaactagagaaggaaatgatctttatcatgaaatgatagagtcaggagtaattaaacctgaaggacctggatcaaaagctgcattagtttatggtcaaatgaacgaacctcctggagcaagatcaagagttgctcttacaggattaacagttgcagaatattttagagaccaagaaggtcaggacgtactttttttcgttgataatatttttagatttacacaagcaggctctgaagtatcagccttattaggaagaattccttccgctgtaggttatcaacccaccctagcaactgacatgggaaatttacaagaaagaattacgacaaccaacaaaggatctatcacatcagtacaggcaatatatgttcctgctgatgacttaaccgatccagcacctgcaacatcatttgcacatttagatgcaacaactgtgttatcaaggcagattgcagaacttggaatttacccagctgttgatcctttagactcaacctctagaattttagatccaaggattgtcggtgatgaacattatagagttgcaaga

SEQ ID NO: 273540 - DNA, 802 bp, Unknown
  Bacterial polypeptide expressing nucleotide sequence isolated from the Sargasso Sea
catgagtaaaaaaggaaaaataactcaaattatcggtgccgtagttgatgtaaattttgatggagatttacccgaaatatatactgctttggaggcaaataattctggtaataaattggtgttagaggttgctcagcatttaggtgaaaatgatgttagaactattgcaatggatgcgactgagggtttgaaaagaggcgatgaagttaataacacgggctccccaataagtgtacctgttggaccggaaactttagggagaattataaatgttgttggtgaagctattgacgagaaaggtattgttaaaacaaaggagaaatggccaattcatagatctgctcctaaattcacagatcaagcgactgaaacagaacaactagtaactggtattaaagtaattgatctattagccccatatgcaaaaggaggaaaaattggattattcggcggtgccggagtaggaaagacagttactatcatggagttaattaataatattgcaaaagcccacgggggattttccgtcttcgctggtgttggagaaaggacgagagaaggtaacgatctctatcatgagatgattgagtctggagtaattaagactgaaggaaaaggatcaaaggcagccttggtttatggtcaaatgaatgaaccaccaggggcaagagcacgtgtagcacttacaggattaacagttgcagagtactttagagataaagagggtcaggatgtacttttcttcgttgataacatttttagattcacccaagcaggatcagaagtttcagccctattaggt

SEQ ID NO: 273541 - DNA, 822 bp, Unknown
  Bacterial polypeptide expressing nucleotide sequence isolated from the Sargasso Sea
tatcgttgatgttccaataggtaaaggcctcttaggcagagttgttgatgcccttggtaaccctatagatggtaaaggtgctcttaaaaacgttaaaagatcaagagttgagactaaagctccaggtattatgccaagagaatcagtgagtgaacctatgcaaactggattgaaggcaattgattcgcttatccctgtgggaagggggcaaagagagcttattattggagacaggcaaacaggtaaaacagctattgcgatagatacttttctaaatcaaaagagtactaacgataaagctagtaaagacgatactaaaaaacttttttgtatttatgtagctgttggtcaaaaaagatctacagtagcccaaattgttaaaaccttagaagaaagaggggctttggaatattctattgttgtagcagctacagcatctgatccagctcctatgcaatttcttgcaccttactctgctgctgctatgggagaatttttcagagataatggaatgcatgcagttgttgtttatgatgatttatcaaaacaagcagttgcttacagacaaatgtctctccttttaagaagacctccaggaagagaagcttatcctggtgacgtgttttatctacattcccgcttacttgaaagagctgcaaaattaaatgaagaaaatggatctggatctctaacagccctcccaataattgaaacacaaggtggtgacgtttccgcatttattccaactaatgttatttcaattacagatggtcaaatttttctagaaacagaactcttttataaaggcattaggcctgctgt

SEQ ID NO: 273542 - DNA, 277 bp, Unknown
  Bacterial polypeptide expressing nucleotide sequence isolated from the Sargasso Sea
tttctctgtctttgctggagttggagagagaacaagggaaggtaatgatttatatcatgaaatgatagactccggagtaataaagcctgatggagaaggttctaaagcagctttagtttacggacaaatgaacgaaccaccaggagcaagagcaagagtagcgctaacaggattaactgttgcagaatattttagagatcaggaaggccaagatgtattattttttgtagataatatatttagatttactcaggcaggttcagaagtatctgctcta

SEQ ID NO: 273543 - DNA, 794 bp, Unknown
  Bacterial polypeptide expressing nucleotide sequence isolated from the Sargasso Sea
attagtatatggtcaaatgaatgaaccaccaggcgcaagagctcgagtaggattaacaggtttaacagttgcagaatattttagagataaagaaggccaagatgtattatttttcgttgataatatatttagatttacacaggccggatccgaagtgtcggcgctacttggaagaattccatcggctgtagggtatcaacccacattagctactgatatgggaaatttacaggagagaattacaactacaaacaaaggatcgattacatcagttcaagctatttatgttccagcagatgatttaactgatcctgccccagctacttcatttgctcacctagatgccacaacagtgttgtctagacaaattgcggaactaggaatatatccagctgttgatccgttagattctacttccagaattttagatcctagaatagttggtgaagaacattataaagtagcaagagaggttcaaaaaatattacaaacttacaaatctttacaagatataattgcaattctaggcatggacgaactttctgaagaagacaaattaacagtcgctagagctagaaaaattcaaagatttttatcccaaccattttttgttgctgaagtttttactggttctccaggtaaactggtagacctagaatctacgataaaaggttttgatgctatatgtaaaggagaatacgaccatttaccagaggctgccttttatatggtaggtacgatcgaagaagtagtcgaaaaggcagaaaaaatggcgaaagacgcggcagcttaat

SEQ ID NO: 273544 - DNA, 778 bp, Unknown
  Bacterial polypeptide expressing nucleotide sequence isolated from the Sargasso Sea
aatgaatgagcccccaggcgcaaggatgagtgtaggactatcagccttaactatggctgagcatttccgtgatgtaaataagcaagatgttctcttgttcatcgataatattttcagatttgttcaggctggatcagaggtatctgctttgctgggtcgtatgccatctgcagttggatatcagccaaccttgggaactgacgtgggagagcttcaagaaaggatcacctcaacccttgaaggatctattacctcaattcaggctgtttatgtaccagctgacgacttaacagaccctgcacctgctactactttcgctcacttggacgcaactacagttttagcaagagctcttgcggctaagggaatttatcctgctgttgatccacttgactcaaccagcacaatgctacagccatcggtggtaggcgatgagcattaccgcactgcgagagcagttcaatcaacacttcagagatataaggaattgcaagatatcattgcaattttgggattggacgaattatcagaagaagatagaaagacagttgatcgtgcccggaaaattgagaaattcttatctcagccattctttgtggctgaaatctttacaggtatgtccggtaaatacgtcaaattagaagacacaattaaaggctttaacatgattctctcaggtgaacttgaccagcttcctgagcaagctttctatcttgttggaagcattgatgaagtgaaagctaaagcagaaaaaatagcatcagaatcaaaagcttaa

SEQ ID NO: 273545 - DNA, 842 bp, Unknown
  Bacterial polypeptide expressing nucleotide sequence isolated from the Sargasso Sea
tatgacaagcctagactcagcagaaattagcaaaatcatagagcagcaaattaagcagttcgatgttagtgtggagacacgcactgaaggtaccatcatgagcttgaaagatggtatcgtgcgtttgtacggcatggaagaagtcatgcagggggaaatgattgagttccctggtggaacttatggcattgcactcaatttggagcgtgatgctgtgggcgcagtggtgctcggtccttctggacatttacaggaaggtcaaaccgttaagtgcactggtagaattctagaggtgccggtgggtgaagccatgttgggtcgtgtggttgatgcattgggaaaaccagttgatggtaaagggccgattgacacccagtaccattcccccatagaaaagattgcgcctggggtgattgcccggcaatcggtatcgcaaccgttgcaaaccggtcttaaagccattgacgcactggttcccattggtcgggggcagcgtgagttgatcattggtgaccgtcagacaggtaaaactgcgattgccattgataccatcatcaaccaaaaagatacgggtgtgaaatgtgtgtatgtggccattggtcagaaagcatcatctgtcgctgctgttgtcaacaaattgcaagcacatgatgccatggcgcacacagtgattgtaactgccacagccgcggaggcagcagcgctgcagttcattgcgccttacgcgggttgcgccatgggcgaatacttcagggaccgtggtgaggacgcgctgatcatttacgatgatcttaccaagcaagcatgggcctaccgccagatttcattgttgctacgacgac

SEQ ID NO: 273546 - DNA, 850 bp, Unknown
  Bacterial polypeptide expressing nucleotide sequence isolated from the Sargasso Sea
gtgcacaggccgcatcctggaagttccggttggtaaggaactgctgggtcgcgtagtcgacgcactgggtaaccctgttgacggtaaaggtccactgggcaacaccgagaccgacgcggtcgagaaagttgctccaggcgtgatctggcgtaagtcggtagaccagcctgtacagactggctacaaggctgtcgatgccatgatcccagtcggccgtggccagcgtgagctgatcatcggtgaccgtcagatcggtaaaaccgctctggcgatcgacgcgatcatcaaccagaaagacagcggcattttctgcgtctacgtagccatcggtcagaagcaatcgaccatcgccaacgtagttcgcaagctggaagaaaacggcgccctggccaacacgatcatcgtggctgccagtgcttcggaatctcctgcgctgcaattcctggcaccgtactccggctgcaccatgggtgaattcttccgcgaccgcggtgaagacgcgctgatcgtttatgacgatctgtccaagcaagcagtggcttatcgccagatttccctgctgctgcgccgtccaccaggccgtgaagcttacccaggcgacgtgttctatctccactcccgtctgctggagcgcgcatcccgcgtttccgaagagtacgtagagaagttcaccaacggcgcagtgaccggcaaaaccggttccctgaccgcactgccgatcatcgaaacccaggctggcgacgtttccgcgttcgttccgaccaacgtgatttccatcaccgacggtcagatcttcctggaatcggccatgttcaactcgggcatccgccctgcagtgaacgccggtgtt

SEQ ID NO: 273547 - DNA, 889 bp, Unknown
  Bacterial polypeptide expressing nucleotide sequence isolated from the Sargasso Sea
atattaaatgctttaagaattgaagctaaaaatcctgctggacaagacatagcgctcactgcagaagtccaacagctcctgggcgaccatagagttagagcagtggcaatgagcggcactgacggccttgtaagaggaatggaagcgattgacacgggcgcaccaatatctgtacctgttggagaagcaactttaggaagaatatttaatgttttaggagaaccagtagatgaacaaggtccagtaaatacaaaagatactgctccaattcatagagctgctccaaaattaactgacttggaaactaagccaaaagtttttgaaactgggattaaagttatcgaccttttggcgccttacagacaaggaggaaaagttggattattcggaggtgctggtgttgggaaaacagttcttattcaagaattaattaataacatcgcaaaggagcatggtggagtttccgtttttggtggtgtaggagaaagaactagagaagggaacgatttatatgaagaatttaaagaatctggagttatcaatgcagatgacctaactcaatcaaaagttgctttatgttttgggcagatgaatgagccacctggtgcaagaatgagagttggcttatcagcacttacaatggctgaacattttagagatgtgaataagcaagacgtcctactctttgttgataacatttttagattcgttcaagctggttctgaagtatctgcattacttggaagaatgccttcagctgttggataccaacctactctgggaactgatgttggtgaattacaagaaagaattacatctacattagaagggtcaataacatctatccaagctgtttacgtgcctgctgatgacctaacagaccctgctc

SEQ ID NO: 273548 - DNA, 464 bp, Unknown
  Bacterial polypeptide expressing nucleotide sequence isolated from the Sargasso Sea
tatgactattaatccatcagaaataacaaaattattaaaagatcagattaaaaattttggtgagaaggctgaagtttctgagataggaaaagttttgtcagttggagatggtattgctcgagtctatggtcttgacaatgttcaagctggagaaatggtcgaatttgaagatggatcaaaaggaatggcattaaacttagaaaacgataatgtcggagttgttatttttggtgatgatagaagcatcaaagagggagatacaattaaaagaacaaatgcaattgtagatgttcctgtagggaaagaattacttggaagagtcgttgatggattaggaaatccaattgatgggaaaggaaaattatcttcaaaaagtagaaagagagttgaggtaaaagctccgggtattattccaagacaatctgttaatgaaccaatgcagacaggactaaaatcaattgatt

SEQ ID NO: 273549 - DNA, 863 bp, Unknown
  Bacterial polypeptide expressing nucleotide sequence isolated from the Sargasso Sea
aatggaaataaatccttcagaagttacaaaaatattaaaagaacaaattaaaaattttggtgataaagcagaagtcacagaagttggtcaagttttatcagttggagacggtattgctaggatttatggtttggataatgttcaagctggtgaaatggtagagtttgcagacggttcaaaaggtatggctctaaacctagaaagtgaaaacgttggtgtcgtaatttttggtgatgacagaaatgttaaagaaggggatgtagtaaaaagaacgggtaatattgttgatactccagttggaaaagaattattaggaagagtagtggatggtttaggaaatcctattgatggaaaaggaccattagataaaggaattaaaaaaagcagggttgaagtaaaagctcctggtattattccacgacaatcagtaagtgaaccaatgcaaactggtcttaaatcaattgacagtctagtcccgattggaagagggcaaagggaattaattatcggtgatagacaaactggtaaaacagcagttgcagtagatgcaattattaatcaaaaaaaaatcaatgaatctggtgatgaaaaacaaaaactgtattgtatatacgttgcagttggacaaaaaagatcaacagtaagacaaattcaaaaaacattagaagaagctggagctatggagtacacaacaatcgttgctgctactgcatcggattctgctcctttacaatttttagcaccatacacagggtgtgctatgggagagtattttagagataatggaatgcatgccttaataatttatgatgatttgtctaaacaagcagttgcttatagacaaatgtcattgctattaagaa

SEQ ID NO: 273550 - DNA, 811 bp, Unknown
  Bacterial polypeptide expressing nucleotide sequence isolated from the Sargasso Sea
cagaccggcatcaccgccatcgactcgatgatccccgtcggccgtggccagcgcgaactgatcatcggcgaccgccagactggcaaaaccgccatcgcgatcgacacgatcctgaaccagaaagatcaggacatgatctgcgtctacgtggccgtgggtcagaaagccgcctccgtggccaacgtggtggaagtgctgcgtgagcgcggcgccctcgactacaccgtggtcgtggcggccaacgcttccgagccggcagccctgcagtacctggctccttacaccggtgcctcgatcgccgagtacttcatgtacaaaggcaaggccaccctggtgatctacgacgatctctccaagcaggccgccgcttaccgccagatgtcgctgctgctgcgtcgtccgcccggtcgtgaggcctatcccggagacgtcttctactgccacagccgtctgctcgagcgcgccgccaagctctccgacgagatgggcaagggcagcatgaccgctctgccgatcatcgagacccaggccggtgacgtgtccgcctacatccccaccaacgtgatctcgatcacggatggtcagatcttcctcagctccgacctgttcaactccggcctgcgccccgccatcaacgtgagtgtgtccgtgagccgggtgggtggtgccgcccagaccaaagcgatcaagaagatcgccggcaagctgaagctggagctggcccagttcgacgaactgagcgcgtttctccagttcgcatccgaactggacgccgccacccagagcagctgggccgcggcaagcgtctgaa

SEQ ID NO: 273551 - DNA, 542 bp, Unknown
  Bacterial polypeptide expressing nucleotide sequence isolated from the Sargasso Sea
tgataaaggttctattacctctgttcaagccatttatgttccggctgatgatctaacagatccggctcctgcaacatcattttctcatttagatgctactactgtgctttcaagacaaatagctgaaataggtatttatcctgcagtagatcctctagactctacttcaagaattctagatccaagggtcgttggagaagaacattatagagtggctagagatgtccaaaaaattttacaagcttacaaatctcttcaagatattatagcaattcttggaatggatgagctttcagaggaggataagcttaccgttgcgagagcaagaaagatacaaagatttttatcacaacccttttttgttgcagaagtgtttacgggctctccaggaaaattagttgatttagaatctactataaaagggttcgattcaatatgtaaaggtgagtatgaccatttgcctgaagctgccttttatatggttggaggaatagaagaagtaattgaaaaagctgaaaaattgactaaagacaataaatgat

SEQ ID NO: 273552 - DNA, 430 bp, Unknown
  Bacterial polypeptide expressing nucleotide sequence isolated from the Sargasso Sea
gtcgtattatccagaaacattgcagaacttggaatttatccggctgtagatccgttagactctacaagtagacaactagatccattaataatcgggcaagaacattatgatacaacgagagctgtacaaggagtgcttcaaaaatataaagagcttaaggatattatagcaattcttggaatggatgaattatctgaggatgataagttggcagttaaccgtgcacgcaagatacaaagatatctgtctcaaccgttctacgtagcagagacttttactggaacaccgggaaagtatgtttctttgaaagatacaataagtggcttccaagctattgtaaatggtgactacgatcatctgccagaacaagccttttatatgattggtgagatttctgaagcagaaaaaagagcagaagaaattaaataat

SEQ ID NO: 273553 - DNA, 1006 bp, Unknown
  Bacterial polypeptide expressing nucleotide sequence isolated from the Sargasso Sea
tgtagtgggagaatcaattgatgagaaaggcgatgtaaaaacaaaagaaaaatggcccatacacagaccagccccaaagtttacagatcaagcaacagaaactgaacaattagtaacaggaattaaagttgttgatttactagctccttacgcgaagggtggaaaaattggattatttggaggtgctggagttggtaaaacagttactataatggaattgatcaacaatattgcaaaagcccatgggggattttctgtttttgcaggagtcggagaaagaacaagagaaggaaacgatttgtaccatgagatgattgagtccggagtaattaaaacggagggaaaaggttcaaaagctgcattagtttatgggcaaatgaatgaacctccaggagcaagggccagagttgctttaacaggattgacagtagcagaatattttagagataaagaaggacaagatgtgctcttctttattgacaatatttttagatttacccaagcaggttccgaagtgtcagctttactaggaagaattccatctgctgtaggatatcaacctacattagctactgatatgggaaatcttcaggaaaggattacttctaccgacaaaggatctattacatccgttcaagcaatttatgttcctgcggatgatttaacagatcctgcgcccgcgacttcgttttcacacctggatgcaacaaccgttttatctagacaaattgcggaaattggaatttatcctgccgtagatcctttagactcgacttcaagaatattggatccaagaattgttggagaagagcattatagagtagcaagagatgttcaaagaattttacaagcctacaaatcattacaagatattattgcaattcttggaatggatgagctttcagaggaagataagctaacggtagcacgagcgagaaaaattcaagatttttatctcaaccgttttttgttgccgaagtatttactggttcacccggtaagttag

SEQ ID NO: 273554 - DNA, 650 bp, Unknown
  Bacterial polypeptide expressing nucleotide sequence isolated from the Sargasso Sea
cggaaattccagcggaaaaagaactggtgttattttagtcacaagcgaccgaggactttgcggagggttcaattcaaatctctccaaaactttgctacagcagcttctcgatgaaggagtagagtgtgctgagtttgcaatctttggaagaaagggaaatgattttttcaaaaggaccccgcacaaaatacttatcaatcacgcaggaactcctcctgatcaacatcttagcctggtcagggaggttgtgggtgagtttacaaagcggtttgagaatgatgagctggatcaggtgcttctcgcatacaatcattttataagtgttatttcacaggttccgatgatagagcagcttctgccgattaagcccatagaagctgaatctgtggatgagcgtgaaatactgtttgaaccctcgccggaagagatactgcagactttgctgaagaaatacgttcaaaaccaggtttacgtttcctggctggacacaattgcaggggagcatgcggcccggatgacttctatggatgcggccacaaaaaatgcaggagaaattattgataggctccagctgcactataacaggaccaggcaagctgcaatcacaggcgaactgattgaaatcataagcggcgcagaaagtttataat

SEQ ID NO: 273555 - DNA, 476 bp, Unknown
  Bacterial polypeptide expressing nucleotide sequence isolated from the Sargasso Sea
agcaacatcattttctcacttggatgcaactacggtattatctagacaaattgcagaaatcggaatctatccagctgtagatccgttagactcaacatctagaattttagaccctagaatagttggtgatgaacattatagagttgccagagaagtgcaaaaagtcttacaaacctataaatctttgcaagatataattgcgattttaggcatggatgaattatcagaggaagataaattaattgtagcaagagcaagaaaaattcaaagatttttatcacaaccattttttgtagcagaagtttttacagggtcacctggaaaactagttgaactggaatcaacaattaaaggatttgatgcaatctgcaaaggagagtacgatcatttacctgaagctgcattttatatggtaggaaccattgaagaggccattgaaaaagcagaaaaaatggcgaaagatgctgcagcttaat

SEQ ID NO: 273556 - DNA, 858 bp, Unknown
  Bacterial polypeptide expressing nucleotide sequence isolated from the Sargasso Sea
cttttgcaaagggtggaaaaattggactatttggtggtgctggtgttggtaagacagtaaatatgatggagcttattaataacatagctctgcagcattcagggctttctgttttcgctggtgttggagaaaggacaagagaaggaaatgacttctattatgaaatgcaagaatcaggagttgtaaatattgataaccttggggaatctaaagttgcaatggtatatggacaaatgaatgaaccaccaggaaacagactaagagttgcattaacaggattaactatggcagaaagctttagagatgaaggcaaagatgtcttattatttattgataatatttatcgttatactctagctggtgttgaggtatcagctttgttgggaaggatgccatcagctgttggatatcaaccaactctagctgaagaaatgggggctcttcaagaaagaatcacatctaccaagacaggatcaattacatcaatacaagctgtatatgttccagctgatgatttaaccgatccatctccagcaactacttttgctcacctagatgcaacagttgttctttcaagacaaatctcagaattgggcatatatccggcagtggatccacttgactcaactagtaggcagcttgatccttttgtggtcggggatgatcactatcaagtagctcaaggtgttcagaagattttacaaagatataatgaacttaaagatattatagctattcttggtatggatgagctttctgaagaagataaaggattagttgcaagagctagaaaggcacaaagatttttatcacaacctttctttgttgcagaaatatttactggcacacccaggtaaa

SEQ ID NO: 273557 - DNA, 915 bp, Unknown
  Bacterial polypeptide expressing nucleotide sequence isolated from the Sargasso Sea
gatgtgccggtcggcaaagaattacttggaagagttgttgatggtttaggtacaccaatagacggtaagggcaatttacctgctaaagtccagagaaaaagagttgaggtcaaagccccaggcattattcctcgtcagtccgttaatgaacctatgcaaactggtttaaaagcgattgacagcttaattccaattggaagaggtcaaagggaacttataattggagacagacaaactggaaagacagccgtcgctgttgatacaataataaatcaaaaggcaataaatgagtctaacgatgaaaagaaaaaactttactgcgtatatgttgcgatcggtcaaaaaagatcgactgtagcacaaatcgtcaaaactttagaggatgccggagcaatgaagtatactaccgtcgtatcagcaacagcttcagactcagctccactacaatttttagcaccttatacaggatgtactatcggtgagtattttagagacaatggaatgcacgcactaattatttatgatgatctttctaaacaagctgttgcttaccgtcaaatgtctttacttttaagaagacctccgggcagagaagcatatcctggggatgttttttatttacatagccgacttctagaaagagcagcaaaattaaatgaaaaaaatggaggaggttcattaacagcgcttccaattatagaaactcaagctggagacgtctcagcgtatattccaacaaatgttatatcaattaccgatggtcaaatatttttagaaactgaattatttaatcaaggtattaggcccgctgtaaacgtaggattatctgtttcaagagttggttctgcagcacaaacaaaagctatgaaaaaagttgccggttctattaagcttgaacttgcgcaatatcgggag

SEQ ID NO: 273558 - DNA, 874 bp, Unknown
  Bacterial polypeptide expressing nucleotide sequence isolated from the Sargasso Sea
tcggtgttcgccggtgtgggcgagcgcacccgtgagggcaacgacctcttcttggaaatgaccgaatccggggttatcgagaagaccgctctggtcttcggtcagatggacgagcctccgggcacccgtcttcgcgtcgcgttggctgcgttgaccatggcggagtacttccgtgatgtgcaaaagcaagacgtgctgttgttcatcgacaacatcttccgcttcacgcaggccggttcggaggtgtcgaccctgctcggtcgcatgccctccgcggtgggctaccagccgaccttggccgacgagatgggtcagctgcaagagcgcatcacctcgacccgcggtcactcgatcacgtcgctgcaggcgatctacgtccccgcagacgacctcaccgacccggcgccggcgacgaccttcgcgcacctcgacgccaccaccgtgctgtcgcgcccgatttcggagttgggcatctacccggcggtggatccgctcgactctacctcgcggattctggatcctcggtacatcggtgacgagcattacgcggtcgcggctcgtgtcaaggagattctccagcgctacaaggaccttcaggacatcatcgcaatcctcggcattgacgaactctccgaagaggacaagatcattgtcggccgtgcgcgtcgcatccagcgcttcttgtcgcagaacatgttcgtggcggaggccttcaccggccagccgggctcgttcgtgccgattgaggagaccatcgcctcgttcaagaagctggccgaaggtgactacgaccacctgcccgagcaggccttcttcatgtgcggtggcatcgaagacgtcgagcgcaaggccgcggaactggagaagaagtaac

SEQ ID NO: 273559 - DNA, 466 bp, Unknown
  Bacterial polypeptide expressing nucleotide sequence isolated from the Sargasso Sea
aatggaaattaaagcagcagaaatatcatctgtaattaaagatcaaatatcaaattttgaaactaaggcagatgttgctgaagttggtacagtattaagtgttggagatggaattgctcgagtatatggattagatcaagttcaagctggagaaatggttgagtttcctggaggcataaaagggatgactctaaatttagaaatggacaatgttggagtaagtatttttggagatgatactggtattaaagaaggcgatactgttaagcgtacaggagaaattgttgatgttcctgttggaaaagaattattaggtcgtgtagttgatgggttaggaaatccaatagatggtaaaggtccaattaaatcatctgataaaagaaggattgaattaaaagcaccaggaattatacctcagcaaagtgtaacagaacctatgcaaacaggtatcaaagcactagatgcg

SEQ ID NO: 273560 - DNA, 611 bp, Unknown
  Bacterial polypeptide expressing nucleotide sequence isolated from the Sargasso Sea
aatgccaagcctagatgatttaagaaaaagaattacaagtgtaaagtccactcaaaaaataacaaaggctatgaaaatggttgctgcagcaaaacttcgtaaagcacaagaaatggctgaaaaaggaagaccttacagtgataaaatggacttaataatccagaatttaagtaaagcaattaatgatccatctaatgcgccaaaactactggttggtacaggagaggataaaacgcatctttgtgttgttatgacagctgatagaggactttgtggtggatttaatacaaatatatgtaaattagctaaaaaatattttgatgaagctatcaaatcttctaaaaatttgaaaataattactgttggcaccaaaggtcttgaccaattaaaaagagattatggtcaatatattattaaaagaattaacttaaaagataaaaaaaaattatcttttttagatgcagaagaaatcggtaaacaaatagttgaattatttaaaaataatgaattcgacaaatgtttcatattttataataaatttaaaaatgttatttcacaaattcctcaacaacaaacaagtaatcctgctaaagttgaaaataaaaataaaa

SEQ ID NO: 273561 - DNA, 337 bp, Unknown
  Bacterial polypeptide expressing nucleotide sequence isolated from the Sargasso Sea
cagagtagctagagatgtacaaagaatactgcaatcttataaatcattacaagatatcatagctattcttggtatggatgaattatctgaagaagacaaattagttgtagctagagctagaaaaattcaaagatttctatctcagccattttttgttgcagaagtttttacaggttcgccaggaaaattagttgatcttgattcaacaataaaaggttttgatgcaatttgtaaaggtgagtatgatcatttacctgaagctgctttctacatggttggtacaattgaagaagttatagaaaaggctaagaaaatggaaaaagaagcagcagcataa

SEQ ID NO: 273562 - DNA, 299 bp, Unknown
  Bacterial polypeptide expressing nucleotide sequence isolated from the Sargasso Sea
tatgagaaaaggaaaaattacacagattattggagcggttgtagacgttaaatttgaaggagaactaccagaaatactaacagcgttagagtgcaataacagtggcaatagattggtattagaggttgctcaacatttaggagagtcaagtgtaagaacaattgctatggatgctactgaaggtctaaaaagaggagacgaagtgacagatactggtgctccaattaaagttcccgttggtccagaaactttaggaagaattataaatgtgatcggtgaacctattgatgaaaaaggcg

SEQ ID NO: 273563 - DNA, 373 bp, Unknown
  Bacterial polypeptide expressing nucleotide sequence isolated from the Sargasso Sea
tatggaaaaaattggaaaaatatcacaaataatgggtgcagttgttgatgttacttttgaagatgggaatttacctgaaatattaaatgcattaaatgtagatagaggggatcaggggaaccttgtattagaagttgctcaacatctaggtgaatcaactgtccgtacagtagcaatggattctacagatggactggtaagaggaatttctgctaaagatacgggtaatccaatttcagttcccgttggtccagaaacattaggaagattatttgatgttaccggtaatgtgattgatggaaaaggtgcagtttctgcaaataaggagtatccaattcatcgatcagcccctaagcatgaagacttatcaact

SEQ ID NO: 273564 - DNA, 731 bp, Unknown
  Bacterial polypeptide expressing nucleotide sequence isolated from the Sargasso Sea
attgactgttgcagaatattttagagatcaagaaggtcaagatgtattatttttcgtagataacatttttagatttactcaagctggttcagaagtgtctgccttattaggaagaattccctcagctgtaggatatcaaccaacattggctacagatatgggtaatttacaagagagaattacaactactaataaaggatcaataacatctgttcaggctatttatgtaccggcggatgatttaactgatcctgcgcccgcaacatcatttgctcacttagatgcaacaaccgttctttcaagacagattgctgaaattggtatctatccagctgttgatccgttagactctacttcaagaattcttgatccaagaatagtgggtgatgaacattatagagttgctagagaagttcaaaaaattcttcagacatataaatctttacaagatattattgctattttaggaatggatgagttatctgaggaagataaattaatagtagcaagagcaaggaagatacaaagatttttatctcaacctttctttgttgccgaagtatttactggatctcccgggaaacttgttgatttagattcaactataaaaggttttgatgctatttgtaagggtgaatatgatcatttaccggaggcagcattttatatggttggtacaattgaagaggccattgaaaaagcagaaaaaatgaaaaaagatgtagcttaat

SEQ ID NO: 273565 - DNA, 580 bp, Unknown
  Bacterial polypeptide expressing nucleotide sequence isolated from the Sargasso Sea
actgatatggggaaatttacaagaaagaataacaactaccaacaagggatctattacctctgttcaagcgatttatgtccctgcggatgatttaacagatccagcgccggccacatcttttgctcatttagatgctacaacagttctttcaagacaaattgctgagattggtatttaccccgctgtggatcctttggactctacatctagaattcttgacccgaggatagttggagatgaacattatagagtcgctcgtgaagttcaaaaaatattacaaacttataaatctcttcaagatattattgcaattctgggaatggatgaattatcagaagaagataaattagtagttgcaagagcaagaaagatacaaagatttttatctcaacctttctttgttgcagaagtctttacaggttcccctggaaagctagtagatttagaatctacaattaaagggtttgatgcgatttgcaaaggtgagtacgatcatttaccagaagctgcattttatatggttggaacaattgaagaagctattgaaaaagctgaaaaaattaaaaaagacgccgcttaa

SEQ ID NO: 273566 - DNA, 643 bp, Unknown
  Bacterial polypeptide expressing nucleotide sequence isolated from the Sargasso Sea
gtattttatcttcatagtagattacttgaaagagcagctaaattaagtgatgaacatggtggtggatcacttacagcactaccaattattgaaacacaaggtggagacgtatccgcgtttattccaactaatgttatttcaattacagacggacaaattttccttgaaacagaactatttaaccaaggtataagacctgcaattaacgtaggtttatcagtttctagggttggttcgtcagctcaaacaaaagcaatgaaaaaagtttctggttcaatgaaattagagctagcacaatacagagaaatggcagcttttgctcaatttggatctgatttagatgcatctactcagcaacttttgaatagaggctctaaactgactgaacttttaaaacaaaaacaatattcacccatgactgttgcagaacaagttatttcagtattttgtggagtaaaaggttatctggatgatattgatttaaaagacgttgctgaatttgagagcaagattattgaaaaatgtaaatcagataagcctgaaattatagagtcaattttaagttcaggaaaacttgaggaagataaagaaaaactacttgttgaggtaatcactcaattaaaaggaaattttaaatcttaat

SEQ ID NO: 273567 - DNA, 864 bp, Unknown
  Bacterial polypeptide expressing nucleotide sequence isolated from the Sargasso Sea
atctgcacccgaatttaatgaccaatctacagaaacagaaattttagtaactggaattaaagtagtagatttattggcaccatatgcaaaaggtggaaaaatcggtttatttggtggtgcaggagttggaaaaacagttcttattatggaattaattaacaatgttgcaaaagcgcatggaggattttcagtttttgcaggagttggcgaaagaactagagaaggaaatgatctttatcacgaaatgatagagtcaggagtaattaaaccagaaggtacgggatcaaaagctgcattagtttatggtcaaatgaacgaaccaccaggtgcaagagctagagtggccttatcaggattaacagttgctgaatattttagagatcaagaaggtcaagatgtacttttttttgtagataatatttttagatttactcaagctggctctgaagtttcggcattattaggaagaatcccatctgctgtaggataccagccaactttagctacagatatgggcaatttacaagaaagaattacaacaacaaacaaaggttctattacatctgttcaagcaatctatgttcctgcagatgatttaactgacccagcacctgcaacatctttttcgcacttagatgcaacaacagtgttatctagacaaatagcagaaattggaatttatccagctgtagatccattagattcaacttctagaatattagacccaagaatagttggagatgaacattatagagttgctagagaagttcaaaaagtattacaaacttacaagtccttgcaggatattatcgctatattaggtatggatgagttgtctgaagaagataaactaactgtagctag

SEQ ID NO: 273568 - DNA, 934 bp, Unknown
  Bacterial polypeptide expressing nucleotide sequence isolated from the Sargasso Sea
tgcgttaaagaatgtaaaaagagcaagagttgaaacaaaagctcctggtatcatgccgagacaatcagttcatgaaccaatgcaaactggtttaaaagcaatcgattccttgattccaattggaagaggacaaagagaattaataattggtgacagacaaactggtaaaacagcaattgcaattgacacttttttgaatcaaaaggccgtaaatgatgctgcgggaaaagacgagagtaaaaagcttttttgtatatatgttgcagtaggtcaaaaaagatctacggtagcacaaattgttaaaactcttgaagaaaatggagctcttgattacacaatagtagttgctgcaaccgcatctgatccagctccaatgcaatttttggctccttattcggctgccacgatgggagaatattttcgtgataatggtatgcatgcagttatagtatatgatgacctatccaaacaagccgtagcatacagacaaatgtcattattattgagaagacctcctggaagagaagcatatcccggtgatgttttttatctacattcaagattattagaaagagcggctaagctaaactcagataatggatctggttctttgacagctttgcctgtaattgaaacacaaggtggagatgtatctgcttttattccaacaaatgttatatcaataactgatggacaaattttcttagagactgaattgttttataaaggtattagaccagctgttaatgtaggattatctgtttcaagggtaggttcttcagctcagattaaagcaatgaaacaagttgcaggaactatcaaacttgatcttgctcaatatagagaaatggctgcctttgctcaatttgcatctgatttagatacttctactagacaattgcttgcgagaggcgagagacttactgagttataa

SEQ ID NO: 273569 - DNA, 316 bp, Unknown
  Bacterial polypeptide expressing nucleotide sequence isolated from the Sargasso Sea
caaaaaattttacaaacttataaatccttacaagatattatagcaattttaggaatggatgaactatctgaagaagataaactaacggttgcaagagcaaggaaaatccaaagatttttgtcacaacctttttttgtagctgaggtttttactggttcaccaggaaaattagttgaccttgaggcaacaattaaaggatttgatgcaatatgcaaaggtgaatacgatcatttacctgaagctgcattttatatggtgggcactattgaggaagcaatagaaaaagcagaaaaaatggcgaaagatgctgcttaat

SEQ ID NO: 273570 - DNA, 862 bp, Unknown
  Bacterial polypeptide expressing nucleotide sequence isolated from the Sargasso Sea
atgagaaaaggacaaataacacagattattggggcggtagtcgacgtaaaatttgatggagaactaccagaaattttaacagcactagagtgtgataatggtggtaacagattagttttagaagttgcgcaacatctaggagagtcaagtgtaagaacgattgcaatggatgcaacagaaggacttaaaagaggagatgaggtaacagatacagcggctcctattaaagttcctgtaggaccagagactctaggaaggattataaacgtaataggtgaaccaattgatgaaaagggtgacgtaaaaagttcagacaactggccgatccatagagcggctccagaatttaatgatcaatctacagaaaccgaaatacttgtaacaggtataaaagttattgatcttttagctccatatgcaaaaggtggaaaaataggtctatttggtggtgctggtgttggtaaaacagttctcattatggaattaattaacaatgttgctaaagctcacggtggattttcagtttttgcaggtgtaggagaaagaactagggaaggcaacgatttatatcatgaaatgatagactcaggtgttattaaaccagatggagagggctctaaagcagctttagtatacggacaaatgaacgagcctccaggagcaagagctagggtagcattgactggcttgactgttgcagaatatttcagagatcaagaaggacaagatgttttattctttgttgataatatatttagatttacacaggccggatcagaagtatccgctttacttggtagaataccttctgcagtaggatatcaaccaactttagcaacggatatgggtaactacaggagag

SEQ ID NO: 273571 - DNA, 703 bp, Unknown
  Bacterial polypeptide expressing nucleotide sequence isolated from the Sargasso Sea
aatgcctagtctagacgatctaaaaaaaagaattaaaagtgtaaaatctacgcaaaaaattactaaggcaatgaagatggttgctgcagcaaaacttaggaaagctcaagaaagcgcagagaaaggcagaccttacagtcaaaaaatgcaaaatataatattgaatttaaccaaatccattaacgatcctcaaaatgcaccaaaactgcttgtaggaacaggagaagataaaaagtatttatgtgtagtattgaccgctgatagagggctttgtggaggatttaattcaaatatttgtaagttggctaagactaattttaaaaaaattttaggtgaaggaaaagaacttaatattattacagttggatcgaaaggacatgatcaaattaaaagggaatacggtaaatatgttattaaaaaattcagttttaaagataaaaaaaatataagctttaatgaagcagatgaggtaggaaaagaaataatatccttattcaatcaaaataaattcgataaatgtattatattttacaataattttaaaaatgtaattacacagataccgcaagctcaacaaataattccagcagagtcaaaagatttaaaagaaaccaatgacaaaaacttttcatatgaatttgaaccagaagaagatgaaattctagaagacttgttgccaaaaaatatttcaactcaagtttaa

SEQ ID NO: 273572 - DNA, 643 bp, Unknown
  Bacterial polypeptide expressing nucleotide sequence isolated from the Sargasso Sea
tttagagataatgggatgcatgccttgattatatatgatgatttatcaaaacaagctgttgcatatagacaaatgtcacttcttttaagaagacctcccggaagagaagcgtaccctggagatgtattttatttacatagtagattactagaaagagctgcaaaactaggtgatgagcatggtggaggttcactgacagctcttccaattattgaaactcaaggtggagatgtctctgcattcataccaacaaatgttatttcaattactgatggtcaaatatttcttgaaacagaactttttaaccaaggtataagacctgccataaatgtcggattatctgtatcaagagttggatcatctgctcaaactaaagcgatgaagaaagtgtcaggttccatgaaattagaacttgcacaatatcgagaaatggcagcgtttgcacaatttggctcagacctcgatgcatccactcagaaattacttaatagaggatcaaaattaactgaacttctaaagcaaaaccaatattcccccatgacagttgcagaacaagtcatttctgtattttgtggagttagaggacatcttgatgatattgaacaaaaggatattgcaagtttcgagaataaaattattgaaa

SEQ ID NO: 273573 - DNA, 919 bp, Unknown
  Bacterial polypeptide expressing nucleotide sequence isolated from the Sargasso Sea
ttaggagaaacttctgtaagaacaatagctatggacagtaccgaaggacttaaaagaggagacaaggtgactgatactggatctccaattaaagtaccagtaggaccagaaactttgggaagaattattaatgttattggtgaaccaattgatcaaaagggcaaagtatcaacaaaagaaagttggccaattcatagagaggcaccaaaatttacagaccaatcaacagaaactgaaatattagtaaccggtataaaagttgtagatcttttagctccatattcaaagggaggaaaaataggattatttggaggagcaggagttggcaaaacggtaattattatggaactaataaataatattgcgaaagctcatggtggtttttccgtttttgctggtgtgggagaaagaactagagaaggaaatgatttatatcatgaaatgatagaatctggtgttataaagccggaaggcaaaggctctaaagcagctttggtttatgggcaaatgaatgaaccaccaggagctagagctagggttgggttaactggtttaacagttgcagaatattttagggataaagaaggccaagatgttttattttttgtagataatatatttagatttactcaagctggttctgaagtatcggctcttttaggaagaataccttcagctgttggatatcagccaacgctagcaacagacatgggaaatttacaggaaagaatcacaactacaaacaaaggttctattacttcggttcaagccatatatgttcccgcagatgatttaactgatcctgcgccagccacatcttttgcacatttagatgctactacagtgctatcgagacaaattgctgaattaggaatatatccagcagtcgatcctttagattccacatcaagaattttag

SEQ ID NO: 273574 - DNA, 389 bp, Unknown
  Bacterial polypeptide expressing nucleotide sequence isolated from the Sargasso Sea
tatggcaagtttagacgacctaaaaaaaagaatagctagtgtaaagtctacacaaaaaattactaaagctatgaaaatggttgcagcagctaaattaagaagagctcaagaaagtgctgaaaagggaaggccttattctgaaaaaatgaataatgttattttgaatttatcaaatggtatatctgataaagaaaatgcaccaaagttattgtcaggtactggtcaagaaaaaactcacctttgtgtggtgatgacttctgatagaggtttatgtggtggatttaattctaatattattaaaaaagctaaaagttattttgcaaaaattttagatgaaggtaaagaacttaaaattattacagtaggctcaaagggaaatgatcaactaa

SEQ ID NO: 273575 - DNA, 235 bp, Unknown
  Bacterial polypeptide expressing nucleotide sequence isolated from the Sargasso Sea
catggccaccgcacccaagcttaatcagagccccaatggcgtaatcagccaggtcatcggcgccgtcgtcgacgttgcgttcgaaggcgacctgccgccgatcctgaccgcgctggaaaccaagaacggcgacaacacgctggttctcgaagtcgcgcagcacctcggcgaaaacaccgtccgcaccatcgcgatggacggcacggacggtctcgtccgcggccaggaagtcgtg

SEQ ID NO: 273576 - DNA, 622 bp, Unknown
  Bacterial polypeptide expressing nucleotide sequence isolated from the Sargasso Sea
attattgttgatagacaaacagtaaaaacggcagttgcagtagatgcaattattaatcaaaagaaaatcaatgaaactggtgatgaaaaacaaaaactgtattgtatatacgttgcagttggacaaaaaagatcaacagtaagacaaattcaaaaaacattagaagaagctggagctatggagtacacaacaatcgttgctgctactgcatctgactctgctcctttacaattcttagcaccatacacaggttgtgctatgggtgagtattttagagataatggaatgcatgcgttaataatttatgatgatttgtctaaacaagcagttgcttatagacaaatgtcattgctattaagaagacccccaggacgtgaggcttatcctggagatgtattttatcttcatagtagattgcttgaaagagcagcaaaactaagcgatgaacatggtggtgggtcacttactgcacttccaattattgaaacacaaggtggagacgtatctgcgtttattccaaccaatgttatttcaattacagatggacaaattttccttgaaacagaactatttaaccaaggtataagacctgcaatcaacgtaggtttatcagtatctaggg

SEQ ID NO: 273577 - DNA, 604 bp, Unknown
  Bacterial polypeptide expressing nucleotide sequence isolated from the Sargasso Sea
aatgagcaatggtctagtaacacaaattataggagcggttattgatgttgaatttgaaaaaaataatatccctcaggtatacgaagctattaaaattaaagatacaggcacagtccttgaagttcagcagcagcttggcgatggaattgtcagagcaattgccatgggaacaaccgaggggttaaaaagaggtttaacagctgaacgaaccaatgctcctatttctgtcccagtgggtgaaaaaacattaggtcgaattatggatgtgttgggcaaccctatcgatgaatgcggccctattggtgcagaagagcaaatgcctattcacagaaaaccaccaagctacatggatcaatctttatcagacgacttgcttgagacaggcattaaagttattgatttgatatgtccatttgctaaagggggaaaaattggtctatttgggggtgctggcgttggcaagaccgttaatatgatggagcttattaacaacatagcaaccgaacactctggactttcagtttttgctggagttggcgagagaactcgagaaggaaatgacttctattatgaaatgcaagaatcaggcgtcgtcaatgtttga

SEQ ID NO: 273578 - DNA, 454 bp, Unknown
  Bacterial polypeptide expressing nucleotide sequence isolated from the Sargasso Sea
tatggctgaaaaaggaaaaatttcgcaggtaatgggtgcggttgttgatgttgtttttgagcaaggtcatttgccagatatttataatgctctaacagttgatcgaggtgaggaaggacaattagtcctggaagttgcacagcatttaggtgattcagctgtacgcacagttgcaatggactctacagatggacttgttagaggcattgatgtagtggacagcggtattccaatttcagtgccagttgggcctgagactctaggtaggctttttgatgtattggggaataccattgataacaaaggtgacgccaaaacggaaaaagtaaatcctattcaccgtccagctccgaggcatgaagatctcgccacttctactgaaattctcgttactggaataaaagttgtagacctaatggagccatatactaaaggtggtaaaaccggtttattt

SEQ ID NO: 273579 - DNA, 499 bp, Unknown
  Bacterial polypeptide expressing nucleotide sequence isolated from the Sargasso Sea
gatgatttaaccgatcctgctcctgcaacctcctttgcacaccttgatgcaacaaccgtgctttcaagacagattgcagagcttggtatctatcctgccgttgatccgttagatagtacttcgagaatattagaccctcgcgttgttggagatgaacattatcgagttgcaagaaatgtacaagctgtactgcagacttataagtctctacaagacatcattgcaattttaggcatggatgagttatctgaagaagataagttaacagtggcgagagcacgtaagattcaaagatttatgtcccaaccgttctttgttgccgaagtctttacgggaactcccggaaaatatgttgaattagaggatacgatcaaaggatttgatgcgatctgtaagggtgaatatgatcatctacctgaggcagctttttatatggttggtacaatagaagaagctattcaaaaagcagaaaaaatggccgaagaagccgctgcgtaac

SEQ ID NO: 273580 - DNA, 292 bp, Unknown
  Bacterial polypeptide expressing nucleotide sequence isolated from the Sargasso Sea
ttacaagacattattgccattttgggtatggatgaactatctgaggatgacaaattaactgttgcaagagcaagaaaaattcaaagatttttatcacagcctttttttgttgctgaagtttttaccggatcagctggaaaactagttgatttagaagcaaccattaagggatttgatgctatctgcaaaggagaatatgatcatttgccagaagcagctttttatatggtaggtactattgaggaagctattgaaaaagcagaaaaaatggccaaagaagctgcagcttaaa

SEQ ID NO: 273581 - DNA, 724 bp, Unknown
  Bacterial polypeptide expressing nucleotide sequence isolated from the Sargasso Sea
attaggaagagtagtagatgctttaggtaacccaattgacggcaaagaagttctcaaaaaaggaattaaaagaaaaagagttgaagttaaagcaccaggtataattccaagaaaatcagttaacgaaccaatgcaaacaggtttaaaggcaattgacagtttaataccaattggaagaggtcaaagagaattaataattggtgatagacaaactggaaaaacagcagttgcaatagatacaataataaatcaaaaaaaaataaacgagtcatctgatgagaaaaaaaagctatattgtatttatgttgcaattggccaaaaaagatcaactgtagctcaaattcttaaaacacttcaagacgctggagcaatggattatacaataattgtatctgcaacagcatcagaccccgcgcctttgcagtttttggcaccatatacaggttgtacttttggagaattttttagagataatgggatgcacgctttaattatatatgatgatttatcaaaacaagctgttgcatatagacaaatgtcactattattgcgaagacctccaggacgagaagcatatcctggtgatgtattctacctgcatagtagattattagaaagagcagctaaactaaacgacgataatggaggcggttcacttacagcattaccaattattgaaacccaagcaggaaatgtttcagcatatattcctacaaatgtaatt

SEQ ID NO: 273582 - DNA, 481 bp, Unknown
  Bacterial polypeptide expressing nucleotide sequence isolated from the Sargasso Sea
tatggatataaacccttcagagataacaaaaattttaaaagagcaaattaaaaatcttggagacaaaaccgaggtttctgaaattggaaaagtactttcagttggtgatggtatcgctagagtgtatggtcttgacaatgtacaagccggtgaaatggtcgaatttaatgatggttcaaaaggaatggcattaaacttagaaagcgacaatgttggaattgtaatttttggagacgataggacaatcaaagagggagatactgttaaaagaacaggagcaatagttgatgttcctgtaggtaaggaattgctcggaagagtagttgatgccttaggaaacccaattgacggcaaagagtcactgaaaaaaggaataaaaagaaaaagagttgaggttaaagcccctggaattattccgagaaaatcagttaatgagccaatgcaaacaggactaaaagcaattgatagcttaattccaatc

SEQ ID NO: 273583 - DNA, 798 bp, Unknown
  Bacterial polypeptide expressing nucleotide sequence isolated from the Sargasso Sea
tcagagacaggggagaggatgctctgattatttacgatgacctttccaaacaagccgttgcttatagacaaatgtctcttttgctaagaagaccgccaggaagggaggcttatcctggtgacgttttctaccttcactcaagattactcgaaagagccgcaagggtgaatgaggaatatgtagagaactatacaaatggcgaagtgaagggaaaaaccggttcgttgactgctttaccaatcatcgaaactcaggctggagacgtttcagcgtttgttcctacgaatgtaatttctataaccgatggacaaattttcctcgagtcgtctttattcagttcaggattaaagccagccatggatcctggtatttctgtttctagggtaggtggtgctgctcaggttccaataattaaaaagcttggcggaggaattaaaacggctctcgctcaatatagagagttagaggcttttgcccaatttgcttcagatcttgatgaggcatccaaagagcaattagagcatggtgtaagggttacagagctgacgaaacaagatcagttttcaccaatgtctgtagctgaaatgggtctaatgctttacaccgctaatgaagggtatctaaggcaggttgaggtcgaaaaaatcaaagactttgaaaagagcttgatagcctatatgaattccgagcataaagatcttatggacaaggtatcagagaccggagaatacggagatgatatccaaaatgccttcaaagaagccttagacaaattcatggaaacacaaacctggtaag

SEQ ID NO: 273584 - DNA, 127 bp, Unknown
  Bacterial polypeptide expressing nucleotide sequence isolated from the Sargasso Sea
gatttatctaaacaagcagttgcctatagacaaatgtctttacttttaagaagaccgccagggcgggaagcatatccaggtgacgtattttatttacatagcagactgttagaacgagcatcaaagt

SEQ ID NO: 273585 - DNA, 352 bp, Unknown
  Bacterial polypeptide expressing nucleotide sequence isolated from the Sargasso Sea
atggctaatgcaaaaggtaaaatcacccaagtgatcggcgccgttgtcgatgtgcaatttgaagatcatcttcccgaaattttaaacgccttgaatactgataacaatggtaaaaagttagttttggaagttgctcaacacttaggggaaaatacagttagaacaattgctatggatgcttccgagggcttggttagaggccaagaggtagttgatactgatggtccaatatctgttccagtaggaaacgctactctcggcagaattcttaacgtcgtgggtgagcccgttgatgagcagggaccagtaaaggctaaggagtcaagagccattcatcaaccagcgccagaat

SEQ ID NO: 273586 - DNA, 577 bp, Unknown
  Bacterial polypeptide expressing nucleotide sequence isolated from the Sargasso Sea
aatggcaagtttagacgatttaaaaaaaagaatatcaagtgttaaatctactcaaaagattaccaaagcaatgaaaatggtggctgcctctaaattaagaagagctcaagagaatgcagaaaaaggaagaccatattcagataaaatgaataatattattcttaatctttcaaccaatattactgataaagaaaattctccaaagttgcttgtaggatcaggagaagataaagttcatttatgtatagtcatgacatctgatagaggactttgtggaggatttaatacaaatataattaaaaaggcaaagttatactttcaaaaaattttagatgaaggaaaaattttaaaaattattactgtaggttcaaaaggttatgatcaactaaaaagagtatacaaagaaaatataattgaaaaaatttctttcaaagaatctaaatatgtaaattattttgatgcagataaagttgggaaaataattattgataaatttgaaaaaaaagaatttgatgtatgtacaattttttataatcaatttagaaatgtaataagtcaaataccacaagaacagcaa

SEQ ID NO: 273587 - DNA, 775 bp, Unknown
  Bacterial polypeptide expressing nucleotide sequence isolated from the Sargasso Sea
aatattgctaagggccatggtggcttttccgtgtttgccggggtcggggagaggactcgtgaaggcaacgatctttatcacgagatgctcgaatcgggcgtaatcaatccgggtggtgagggctccaaggctgctctggtgtatgggcagatgaacgaaccacctggcgcccgagctcgtgtgggcctaaccggtctgacgctcgctgagtatttccgtgatgaggagggacaggacgtacttctcttcatcgacaatattttccgcttcacgcaggctggttccgaagtatctgcattgttagggcgtattccctcggcggttggctatcagcccacgctcggaaccgatatgggccagttacaggagcgtatcacttcgaccaacaagggctcgatcacttcggtgcaggcgatttacgtgccagctgatgatttgactgacccggcgccggcaactgcgttctcgcaccttgatgcgacgactgttcttaaccggcagatcgcagagctcggtatttacccggctgtggatcctcttgactccacatcccgcatgctggacccgcggatcatcggtgacgaacactacgaagtggctcgagaggttcagcgtgtccttcaaacatataaatcgcttcaggacatcattgcgattctcggtatggacgaactgtctgaagacgacaagcttactgtgactcgtgcgcgcaagctccagcgtttcctcagccagccgttccatgttgcagaagtcttcactgggcatgcaggcg

SEQ ID NO: 273588 - DNA, 855 bp, Unknown
  Bacterial polypeptide expressing nucleotide sequence isolated from the Sargasso Sea
aggtgagcctattgatggtaaaggcgcaatcgacgcagctagtttcgagccagttgaaaaaattgcacctggcgtaatcgaacgtcaatcggtagaccagccagtacaaactggttataagtcagttgatgccatgatcccagtaggtcgtggtcagcgtgagcttatcatcggtgaccgtcagtgtggtaaaacagcaatggctgttgacgctatcatcaaccaaaaaggcacaggcattaagtgtgtgtacgtagcggttggtcagaaagcgtctactatcgctaacgtagtacgtaaactagaagagcacggtgcacttgaccacactatcgtggttgcagcatctgcgtctgagtctgcagcgcttcaataccttgcgccttactctggttgtactatgggtgaatacttccgtgaccgcggtgaagatgcgctaatcgtatatgatgatttgtctaagcaagctgttgcttaccgtcaaatctcactactacttaagcgtccaccaggccgtgaagcctacccaggtgacgtattctaccttcactcgcgtctactagagcgtgctgcacgtgtaaacgagcaatacgttgaaaactacacgaacggtgaagtgaaaggtaaaacgggttcactaactgcgcttccaattatcgaaacgcaagcaggtgacgtatcggcattcgtaccgactaacgtaatctcaattaccgatggtcagatcttcttagaaactgacttgttcaacgcaggtatccgtccagcggttaacgctggtatctcggtatcacgtgttggtggtgctgcacagactaaaatcatcaagaaattgggtggcggtatccggctagc

SEQ ID NO: 273589 - DNA, 463 bp, Unknown
  Bacterial polypeptide expressing nucleotide sequence isolated from the Sargasso Sea
atttgctcacttagatgcaacaactgtgttatcaagacaaattgcagaacttggaatatatccagctgttgatcctttagactcaacttctagaattttagatccaagaattgtcggtgatgaacattatagagttgcaagagaagttcagaaaattcttcaaacatataaatctttacaagatattattgcaattttagggatggatgaattatctgaagaggataaactaattgttgcgagagcaagaaaaattcaaagattcttatcccaaccattttttgtagctgaagtttttacaggctctgcaggaaagctagttgatttagaatctacaatcaaaggatttgatgctatttgtaagggtgagtatgatcacttgccagaagcagctttctatatggttggtacaatcgaagaagctgttgaaaaagctgagaagatggcaaaagaagttgcataa

SEQ ID NO: 273590 - DNA, 751 bp, Unknown
  Bacterial polypeptide expressing nucleotide sequence isolated from the Sargasso Sea
aatgcatgctctaattatttatgacgatttatcaaaacaagctgtagcttacagacaaatgtctttattattaagaagacctcccggaagagaagcatatcctggtgatgtattttatttacatagtagattgttagaaagagctgctaaacttagcgatgaacatggaggaggatctttaacagcccttccaataatagaaacacaaggtggagacgtatctgcatttattccaacaaatgttatttcaattactgatggacaaatatttcttgaaacgaatttatttaaccaaggtattaggcccgcaataaacgtaggactatctgtgtcaagagttggttcttcagctcaaactaaagcgatgaaaaaagtttctggatcaatgaagcttgagcttgctcaatatagagaaatggcagcttttgctcaatttggttctgatttagatgcatctacacaaaaattattaaatagaggttcaaaattaactgaacttttaaaacaaaaacaatatactccgatgactgttgctgaacaggtaatatctgtattttgtggagttagaggttatttggacgatgtagaacaaaagaatatagcagatttcgaaactaaaattttacaaaaatgtaaaaccgaaaaacctgaaattattgagtcgatttctagctcaggaaaactagaagaaaacaccgagaaattattagtagaagtaataacaaatttgaaaaaaaaccttagttcatag

SEQ ID NO: 273591 - DNA, 793 bp, Unknown
  Bacterial polypeptide expressing nucleotide sequence isolated from the Sargasso Sea
gaaataaacccatcagaaattacaaaattactaaaagagcagataaaaagcttaggtgatcaaaccgaagtatcagaagttggaaaagttttaacggttggtgacggtatagcgagagtttatggccttgataatgttcaagctggagaaatggttgagtttaacgatggatccaaaggaatggcattaaatttagaaagcgacaatgttggagtagtaatttttggagatgatagacaaattaaagagggagatattgtaaaaagaacaaagtctatagtagatgttccagtgggaaaggagttacttgggagagttgtagatggacttggaaatcctatagatggaaaaggaacattatctgaaaaaattttaagaaaaagggtcgaagttaaagctccaggaatcattccgagacagtcagtgaacgagcccatgcaaacaggtttaaaagctatcgatagtttaattccgatcggtagaggccaaagagaattaattattggagacagacaaactggcaaaacagcagtcgctattgatactataattaaccaaaaagctattaatgaaacaaaagacgagagtaaaaaattatattgtgtttatgttgcaattgggcaaaaaagatcaaccgttgctcaaattgttaaaactttggaagatgctggcgctatgaagtatacaacagttgtttcagctactgcttccgactccgctcctcttcaatttttagcaccttacactggatgtactattggagaatattttagagataatggaatgcatgctt

SEQ ID NO: 273592 - DNA, 184 bp, Unknown
  Bacterial polypeptide expressing nucleotide sequence isolated from the Sargasso Sea
gcgccgctacagtttttagctccttatacaggttgcacaataggagaatattttagagataatggtatgcatgctttaataatttatgacgatctttcaaagcaagcagttgcctatagacaaatgtccctgctattaagaagacctccaggaagagaggcatatcctggagatgtattttatc

SEQ ID NO: 273593 - DNA, 778 bp, Unknown
  Bacterial polypeptide expressing nucleotide sequence isolated from the Sargasso Sea
agagctcaagaaagtgctgagaaaggaagaccatattcaaaaaaaatgaacaacataatcttaaatttatctagtggtatatctgataaagaaagtgcacctaaattattatctggttcaggaaaagagaagatacatctttgtgttgttatgacttcagatagaggtttatgtggtggatttaatgcaaatataattaaaaaagccaaaagttattttgctaaattggttaatgaaggaaaagaattaaagataattacagttggttctaaaggaaatgatcaattgaaaagagtttatggtgataaaattattgaaagtatttcttttaaaaattcaaaaaatctaaattactttgatgctgaaaaagttagtaagactattattgaaagatttgaaaaagaagaatttgatgtttgtgcaattttttataatcaatttaaaaatgtaataactcaaattcctcaagcacaacaaataattccattaaacacggaaaatactgatgacagtaaatcggaagatagttatgagtttgagccagatgaagatgaaattttaagtaatttattacctaaaaatatctcaacacaaatatttaaggcaatgttagagaattcagctagcgaacagggagcaagaatgagtgcaatggataatgcaactcgaaacgcgggtgaaatggttgacaaacttactattgaatataatagaagtcgtcaggcagcaattactaaagaactaatagaaataatatcaggagcagaaagtttataat

SEQ ID NO: 273594 - DNA, 625 bp, Unknown
  Bacterial polypeptide expressing nucleotide sequence isolated from the Sargasso Sea
tctgcccttctgggtcgtatgccgtccagcggttggatatcaaccaacccttgctgaagagatgggtgttttacaagaaagaattgcctctacaaaaacaggatctatcacttctgtacaggctgtctatgtaccagcagatgacttaaccgacccttctcctgctactacttttgcccacttagatgctaacgttgttctttcaagacaaatagcttcattgggtatttatccggcagttgatcctttagactctaacagcagacagcttgagccggcaattgttggtcaagagcactacgacgtagctaatgccgtcaaacagcaactcaaccgttataaggaacttaaagacattattgctatcttgggaatggacgaactctcagaagaagataagcttgttgttgctagagcaagaaagattgaaagatttctgtctcagcctttcttcgtagcagaagtatttacaaatgcaccaggtaaatatgtgccattaagtgaaaccatcagaggctttaagggtattgtgaacggagagtatgacgatatcccagagcaggcattttatatggccgggaacattgacgaagtaattgaaaaggctaaaacagaggcagcgtaa

SEQ ID NO: 273595 - DNA, 822 bp, Unknown
  Bacterial polypeptide expressing nucleotide sequence isolated from the Sargasso Sea
tatgagaaaaggacaaataacacagattattggggcggtagtagacgtaaaatttgatggagaactaccagaaattttaactgcactagagtgcgacaatggtggaaatagattagttttggaggttgcacaacacttaggggagtcaagtgttagaactattgcaatggatgcaacagaaggtcttaaaagaggagatgaggtaacagacacagctgctccaattaaagttccagtggggccggagactctcggaagaattataaatgtgattggtgagcctattgatgaaagaggcgaagttaaaagttcagataattggccaattcacagagctgcaccagaatttaatgatcaatcaactgaaactgaaatacttgtcacaggaataaaggttattgatcttttagcaccctatgcaaaaggtggtaaaattggtttatttggtggagctggagttggtaaaactgttctaattatggaattgattaataacgtagcaaaagctcatggtggattttcagtttttgcaggagtaggagaaagaactagagagggaaacgacctctaccacgaaatgatagattcaggtgttattaaaactgatggggaaggttcaaaagcagcattagtttatggtcaaatgaatgagcctccaggtgcaagagcgcgagttgctttaactggattaactgttgctgagtattttagagatcaagaaggtcaagatgtgctattcttcgttgataatatatttaggtttacacaagcaggatctgaggtctcagcattgcttggtagaataccttcagctgtaggata

SEQ ID NO: 273596 - DNA, 817 bp, Unknown
  Bacterial polypeptide expressing nucleotide sequence isolated from the Sargasso Sea
atgagtattgatgcatcagaaatatctgaaatcttaaaaacagaaatcaatgaacttaatgattcagcaaaagtaactgaagtcggaactgtactaacagttggagatggtatagcaagggtatacggtttagacaatgtccaagctggcgagatggttgaattcccaggaaaaataatgggaatggcattaaatcttgaagatgacaatgttggtattgttatttttggtagtgacaagtcaattaaagagggagatattgtaaaaaggactaaatcaattgttgaagttccaaccggtgaatcccttcttggtagagttgtggacggacttggaaacccaattgatggaaaaggtcctcttaaaaatatagtaaaccaaagagtggaacttaaagctcctggaattatcccgagaaaatctgtacatgaacctatgcagactggtataaaagctattgatagcttaattccgatcggcagaggacaaagagaattaataattggagacagacaaaccggaaaaacatcagttattattgatacaattcttaatcaaaaggaaattaataaaggaagtgatgaatcaaaaaaattgtattgtatttatgtttctatcggccaaaaaagatcaacagttgctcaaatagttaagactttagaagatcatgacgccttaaaatattcaattgtggtagctgcaactgcttccgatccagctccattacaatttctagcaccatatactggatgtgcaatgggagaatattttagagataatggaaaacatgcagtaatattttatgacgatttatcaa

SEQ ID NO: 273597 - DNA, 949 bp, Unknown
  Bacterial polypeptide expressing nucleotide sequence isolated from the Sargasso Sea
ggggaccatagagtaagagcagttgcaatgagtggcacagacggccttgtaagaggcatggaggcaatcgacacaggagcaccaatatctgtacctgtaggagaagcaactttaggaagaatatttaacgttttaggagagccagtagatgaacaaggtccagtcaatacaaaagatactgctccaattcatagatctgcgccaaagttaactgacctagaaactaagccaaaagtttttgaaactgggattaaagttatagaccttttggctccttacagacaaggaggaaaagttggattattcggaggtgctggtgttgggaagacagttcttattcaagaattaattaataacatcgcaaaggagcatggtggagtttctgtttttggcggtgtaggagaaagaactagagaaggtaacgatttatatgaagaatttaaagaatctggagttatcaatgcagatgatttaactcaatcaaaagttgccttgtgttttggacagatgaatgagccacctggagcaaggatgagagtgggcttatcagcacttacaatggccgaacattttagagatgtgaataaacaagacgtcctactttttgttgataacatttttaggttcgttcaagctggttctgaagtatctgcattacttggaagaatgccttcagctgttggataccagcccactctgggaactgatgttggtgaattgcaagaaagaattacatctacattagaaggatcaataacatctatccaggctgtttacgtacctgctgatgatctaacagaccctgctccagctacaacctttgcccatttagatgctactaccgtgctcgctagggctcttgcagctaaggggatttatccagcagttgatccattagactcaacgagcactatgctacaaccatcagttgtggcgatgagcatacaaa

SEQ ID NO: 273598 - DNA, 750 bp, Unknown
  Bacterial polypeptide expressing nucleotide sequence isolated from the Sargasso Sea
aatggaaataaatccttcagaagtaacaaaaatattaaaagaacaaataaaaaaatttggtgataaagcagaaataacagaggttggtcaagttttgtcagtaggagatggtattgctagaatatatggactagataatgttcaggctggtgaaatggtagaatttgcagatggttctaaaggtatggctttaaatttagaaagagaaaatgttggtgttgtaatttttggagatgatagagctgttaaagaaggtgatacagtaaaaagaacgggagctattgttgacacgccagttggaaaagagttacttggaagagttgtagatggattaggaagtccaatagatggaaaaggtgcgcttgataaaggagttaaaagatctagggttgaagtaaaagcgcctggaataattccacgaaaatcagttaatgaaccaatgcaaacaggtcttaaatcagttgatagtttagtaccaattggccgaggacagagagaattaattattggtgatagacaaacaggaaaaacagctgttgcaatagatacaataataaatcaaaaaaaaataaacgaatctaatgatgaaaaattaaaattatattgtgtttatgtagcgattggccaaaaaaggtctaccgttagacaaattgaaaaaactttagaagaagctggcgcaatggagtatacgacaatagttgctgctacagcttcagacgctgctccactgcaatttttggcaccatatac

SEQ ID NO: 273599 - DNA, 650 bp, Unknown
  Bacterial polypeptide expressing nucleotide sequence isolated from the Sargasso Sea
ttccgaggtttctgcattacttggaagaattccgtcagcagtaggttatcagcctacacttgcaacggatatgggaaatttacaagaaagaattacctcaacaggaaaaggatcaatcacttctgttcaagcaatttatgttcctgctgacgatttaacagatcctgctccagcaacttctttttctcacttagatgccactacagttctttctagacaaattgctgagcttggtatttatccagcagtagatccattagattctacatcgagaattttagatccaagagttgttggagacgaacattatagagtagcacgagaggttcagagaattttacaagcttacaagtcattacaagatataatagctattttaggaatggatgagctatcagaagaggataaacttactgttgcaagagcaagaagaatacaaagattcttgtcacaaccattctttgttgcagaagtatttactggatcaccaggaaaacttgtcgatttagaatcgacaattaaaggatttgatgcaatttgcaaaggagagtatgatcatcttccagaggcagctttttatatggttggatcaatagaggaagcaattgaaaaagctgataaaatagcaaaagatactaaagcagcataat

SEQ ID NO: 273600 - DNA, 802 bp, Unknown
  Bacterial polypeptide expressing nucleotide sequence isolated from the Sargasso Sea
atgagtaaaaatggaaaaattacacaggttattggagctgtagtagatgtccaattcgaaggagaactacctgaaatattaacggctttagaagtcgataatggtggaaacaaactaattttggaaattgctcagcatttaggagaaaacagtgtgagaactatagctatggatagtactgagggtttaaaaagaggagacactgttcaaaacactggagcacctattagtgttcctgtcggaccagaaactttaggaagaataataaatgttataggtcagccaatcgatcaaaaaggggaagttaaaacaaaagaaaaatggccaatacatagagaagctcctaaatttacagatcagtcaacagagacagaaattttagagaccggaattaaagttatcgatcttttagctccatactcaaaaggtggaaagataggtttatttggtggagcaggagtaggtaaaacagtaattattatggagttgatcaataatatagcaaaagcgcatggtggattttcagtgtttgctggagtaggtgaaagaactagagaaggtaatgacttgtatcacgaaatgatagaatcaggagttattaaacctgaaggaaaaggatcaaaagctgcacttgtgtatggacaaatgaatgagcccccaggtgcacgagcaagagtaggattaaccggattaactgtagcagaatattttagagacaaagaaggtcaagacgttttattttttgtagataatatttttagatttactcaagcaggctcagaagtttcagctctattgggaa

SEQ ID NO: 273601 - DNA, 373 bp, Unknown
  Bacterial polypeptide expressing nucleotide sequence isolated from the Sargasso Sea
atgaatcaaaacggaaaaattattcaagtaatcggagctgttgtagatgttcaattcgaaggagatctaccagaaattttaacagctttagtcgtagataactcaggcaataaactgattttagaagtagctcaacatttgggagaaaatagtgttaggacaatagctatggatagcactgaaggtctaaagaggggagaccaagtaaaaaatacaggctctccgataagtgtgcccgttggaccagagactctcggacgtattattaatgttattggagaaccaatagatcaaaaaggcgaagttaaaacaaaggagagatggcctatacatagagaggccccaaaatttacagatcagtccacagaaactg

SEQ ID NO: 273602 - DNA, 627 bp, Unknown
  Bacterial polypeptide expressing nucleotide sequence isolated from the Sargasso Sea
aatgaacaagagtggaaaaattattcaagtgataggagcagtcgtcgatgtacaattcgaaggtgacttgcctgaaattttaacagcattagaagtaaataacggtggaaataaattaatattagaagttgctcaacacttaggagaaaatagcgtcagaaccattgcgatggatagtacagaaggtttaaagagaggtgatattgttcaaaatacagggtcacctataagtgttccagttggcccagaaactttaggaagaataataaatgttattggccaaccaattgatcaaaaaggtgaagttaaaacaaaagagagatggccgatacatagggaagcaccaaaattcacagaacagtcaacagagactgaaattctggaaacaggaataaaggttattgatcttttggccccttattcaaaaggagggaaaattggtttgtttggtggagccggagttggaaaaacagttattataatggagctaatcaataatatagcaaaagcccacggaggtttttcagtttttgctggagttggagaaagaactagagagggcaatgatctttaccacgaaatgatcgagtcaggagtcatcaaacctgacggcaaaggatcaaaagc

SEQ ID NO: 273603 - DNA, 520 bp, Unknown
  Bacterial polypeptide expressing nucleotide sequence isolated from the Sargasso Sea
aatggctaataaaattggaaaaatcacacaaataattggagcagtagtcgatgttcaatttgaagggcaattaccggaaatattaacagcattagaatgtgataattctggaaatagacttgtgctagaagtagctcaacatttaggagaaactgctgttagaactattgcaatggatagtactgaaggtcttaaaagaggagataaagtaactgatacaggttctccaataaaagtgccagtaggtccggaaactttgggcagaataataaatgttataggagagccaattgatcaaaaaggaaaagtttctactaaagaaaattggccaatacataggccagctccaaaatttacagatcaatctacagaaacagaaattttagcaacaggaataaaagtcgtcgatttacttgcaccatattctaagggtgggaaaataggactttttggtggagcaggtgttggtaaaactgtaattataatggaattaataaataatatgcaaaagcacacggtg

SEQ ID NO: 273604 - DNA, 478 bp, Unknown
  Bacterial polypeptide expressing nucleotide sequence isolated from the Sargasso Sea
atgattaagaaaggtagaataactcagattattggagctgtagtcgatgttaattttgggggtgatctacctgaaatttatactgcattagaggcaaacaattctggtaataaactaatattagaagttgctcaacacttaggcgaaaatgacgtcagaacaattgcaatggacgctactgaaggattgaaaaggggtgacgaagtaatcaacactggttctcctataagtgttccagttggaccagaaactcttggaagaataattaatgttgtaggtgagtcaatagatgaaaaaggcgatgtaaaaactaaagagaaatggcctatacacaggcctgcgccaaaatttacagatcaagctactgaaactgaacaattagttacaggtattaaggtaattgatttattagcgccatatgcgaaaggtggaaaaattggattattcggaggtgcaggtgtggaaaaacagttacaat

SEQ ID NO: 273605 - DNA, 698 bp, Unknown
  Bacterial polypeptide expressing nucleotide sequence isolated from the Sargasso Sea
catggtttccatccgtcccgacgagatcagcgccatcctcaagcagcaaattgaggactacgacaagtcggtttccgtcagcaatgtcggcaccgttcttaccgtgggcgacggcatcgcccgcgtttacggcctgcagcaagccatggccggtgagctcctcgaattcgaggacggcaccgaaggcatcgccctgaacctcgaagacgacaacgtcggcgcggtgctcatgggtgagggatacggcatccaggaaggcagcacggtgaaggccaccggcaagattgctgctgtgcccgtgggtgaagccatgctgggccgggtggtgaactccctgggccgtgccatcgacggcaagggtgaaatcgccaccagcgagacgcgcctgatcgaatccatggcgcccggcatcattcagcgcaagtcggtgcatgagccgatgcagaccggcatcaccgccatcgacgcgatgatccccgtcggccgtggccagcgcgagctgatcattggtgaccgccagaccggcaagaccgccatcgcgatcgacacgatcctgaaccaggcggatcaggacatgatctgcgtctacgtcgccgtgggtcagaaggctgcttccgtggccaacgtcgttgaagtgctgcgtgagcggggcgccctcgattacaccgtgatcgtggcggccaacgcttccgagcccg

SEQ ID NO: 273606 - DNA, 466 bp, Unknown
  Bacterial polypeptide expressing nucleotide sequence isolated from the Sargasso Sea
ttttaaccagggtataagaccagcaattaacgttggtctatctgtatcaagagtaggatcctctgcgcagacaaaggccatgaaaaaagtctcaggatcaatgaaattagaacttgctcagtatcgtgaaatggctgcgtttgcacaatttggttcagatcttgacgcgtctactcagaaattacttaacagaggatcaaaattaactgaactattaaagcaagaccaatattccccaatgacagttgcagaacaagtcatttctgtattttgtggtgttagaggacatcttgatgatatagaacaaaaaaatatttcaaattttgagaataaaattattgaaaaatgtaaatctgaaaagccagatataattgagtcaatcacggcttcaggaaaacttgaagatgacaaagagaaagaattgaatgaaattattttacaacttaagaaagattttaactcataa

SEQ ID NO: 273607 - DNA, 1103 bp, Unknown
  Bacterial polypeptide expressing nucleotide sequence isolated from the Sargasso Sea
agaaaagtggcctatccatagaccatcacccaaatttacagaccaatccacagagactgaaattcttgtaacagggataaaggttatcgatttattagctccttatgctaaaggtggaaaaattggtttattcggtggggcaggagttggaaaaacagttactataatggaattaattaacaatattgcaaaagctcacggaggattttcagtttttgctggcgtaggtgaaagaactagagaaggtaatgatctttatcatgaaatgattgagtcaggagttattaaaaaagagggtaaaggttcaaaagctgcgttggtttatggtcaaatgaatgaaccacctggtgctagagctagagtagctttaactgggttgactgttgcagaatattttagagatcaagagggtcaagacgttttattttttgttgataatatttttagatttactcaagcaggctcagaagtatctgctttgttaggaagaattccctctgcagtaggttatcaaccaactttggctacagatatgggaaatttacaagagagaattacttcaacagggaaaggatcaattacatctgtacaggcaatttatgttccagctgacgaccttactgatccagcgcctgctacttctttttcacacttagatgcaacaacagttctctcaagacagattgcagagctaggtatttatcctgctgttgacccattagactcaacttctaggatattagatccaagagtagttggagatgagcattatagggttgctagagaagttcagagaatactccaggcgtataaatctttacaagatatcattgctattcttggaatggacgaattgtcagaggaagataagcttactgtagcaagagcaagaaaaatacaaagatttctatctcagccattttttgttgctgaagtatttacgggatctccaggtaaattagttgatttagagtccacaataaaaggttttgatgcaatatgtaaaggtgaatacgatcatttacctgaagcagctttttatatggtgggatcaattgaagaagtaattgaaaaggcagaaaaacttgaaaaaaattcttaga

SEQ ID NO: 273608 - DNA, 469 bp, Unknown
  Bacterial polypeptide expressing nucleotide sequence isolated from the Sargasso Sea
atggatataaatccttcagaagtaacaaaaatattaaaagaacaaatcaaaaaatttggagacaaatctgaggttactgaaattggacaagttttatctgttggtgatggtatagccagaatatatggtctagataatgttcaagcaggagagatggttgaattctctgatggttcaaagggaatggccttaaaccttgaaagtgataacgttggcgtagttatttttggtgacgacagagctattaaagaaggagatacggtaaaaagaactggatcaattgttgatgttccagtcggtaaacaattattaggaagagtagttgatgggttaggaaacccaatagatggtaaagctaatctcgaaaaaaatctagaaagaagaagagtggaagtaaaagcaccaggtattataccgagacaatcggtaggtgaaccaatgcaaactggtttaaaatcgatagatagtt

SEQ ID NO: 273609 - DNA, 1262 bp, Unknown
  Bacterial polypeptide expressing nucleotide sequence isolated from the Sargasso Sea
tatggtcgcttctgctcctgcatccgctggcaccaagggcgtgatccgccaggtgatcggcccggttctggacgtggaatttcccgccgggaaactgcccaagatctacaacgccctccgcgtcgagacgaagaacaccgctggccaggacgtcgctctgacggccgaggtgcagcagctgctgggcgaccaccgcgtccgtgctgtcgccatgagcggcaccgatggcctggttcgcggcatggaaattgctgacaccggtgctccgatctccgtccccgttggtgaagccaccctcggccgcatcttcaacgtgctcggtgagcccgttgacgagcaaggtcccgtcaatgcgtccgccacggcaccgatccaccgcgacgctcccaacctcaccgagctcgagaccaaacccaaggtgttcgagaccggtatcaaggtgatcgacctcctcgctccctaccgtcagggcggcaaggtcggcctgttcggcggcgccggcgtcggcaagaccgttctgattcaggagctgatcaacaacatcgctaaagagcacggcggcgtctccgtgttcggtggtgttggtgagcgcacccgcgaaggcaacgacctttacgaggaattcaaggagtccggcgtgatcaacgccgacgacctgtccaagtcgaaggtggccctctgctacggccagatgaacgagccccccggcgcccgcatgcgcgtgggtctctccgctctgaccatggctgagcacttccgtgatgtgaacaagcaggacgtgctgctgttcgtagacaacatcttccgcttcgtgcaggccggttctgaagtgtctgctctgctgggccggatgccttcggctgtgggctatcagcccaccctcggcaccgacgtgggtgctctgcaggagcgtgttgcttccactgtggaaggttcgatcacctcgatccaggccgtctacgtgcctgcggacgacctgaccgaccccgctccggccaccaccttcgctcacctggacgccaccacggtgttgaaccgtgccctggcctccaagggcatttaccccgctgtggatcccctggattccaccagcaccatgctccagccaaccgttgtgggcgatgagcactaccgcaccgcccgcctcgtgcagtccaccctgcagcgctacaaggaactgcaagacatcatcgcgattctgggtctggacgaactgtccgaagacgaccgtcagaccgtggaccgtgcccgcaaggggagaa

SEQ ID NO: 273610 - DNA, 1549 bp, Unknown
  Bacterial polypeptide expressing nucleotide sequence isolated from the Sargasso Sea
atgagtactaaaattaacccatcagaaatctcaagcatcataaaaaagaaaattgaagattacaagggtgcaagttctgaatcaaatgtaggagaagttctttctacagcagacggcattgttcaaatttttggacttgaggatgcaatgtatggtgagctattagattttggagagggcacctatggattggcgcttaatcttgaaaatgattctgttggggcagtagttttaggtgacgctggacatatcaaagaaggtcaaaaagtaaaaacaactggaagaattttagaggttcctgttggggaagcgttaaaaggccgtgttattgatgcactgggcagaccaattgatggaaaaggggaagttaagtcagaaacaaatgcacctattgaagttgtagcgccaggagttattgacaggcaaggtgttgatcagccagtacaaacaggaatcaaatctatagatgtaatggtaccaattggccgtggtcaaagagaacttattatcggagatcgccaaacagggaaaactgctattgctgtagatgcaattattaaacagaaagattcagacataacatgcgtatatgtcgcaataggccaaaaacagtcaactgtggcaacagttgtaagacaacttgaggaagctgatgcactcaaaaatacaattgttgtttcagcaagtgcagcagaaagtgcttcattgcagtttttagctccttactcaggttgcactatgggtgagtattttagagatagaggcgaagatgcattaattatttatgatgacctatcaaagcatgctgttgcttacagacaaatatcactacttttaaaaagacctccaggaagagaagcatttcctggtgacattttttatttacattcaagactattggagcgtgcagcaagagttaatccagattatgttgaaagacttactaatgggaaagtaaaaggaaaaactggttcactcacagcgctaccaattattgaaacacaagcaagtgatgtttcagcatttattcctacaaatgttatatcaatcaccgatggacaaattttcttagaaacagatttatttaattcaggaataaggccagctattaatgttgggatttctgtatcaagggttggtggtgcagctcaaacaaaaattatcaaaaaattagggggcggcgtgaagcttgcacttgctcagtttagagagctagagtcattttctcaatttgcatcagatcttgatgatgctaccaaagaacagctcgaagatggccaaagaattactgagctcttcaaacaaacacagttttcaccaagatctgtagcatgcatatcaattatcttgtatgccattgaatacaaatatttaaaagatattgaaaaagataaaatgcaatcttttgaagaaaatttaagagactacttcaaaacaaaacatttaaaagtttgggaagaagttaacaaaacaggtgactggaacgatgacattgaaaaaaaatataagaaagttttagatactttcatgaaagaaggctcgtggtaaa

SEQ ID NO: 273611 - DNA, 1537 bp, Unknown
  Bacterial polypeptide expressing nucleotide sequence isolated from the Sargasso Sea
atggaaataaatccttcagaagtaacaaaaatactaaaagagcaaataaaacaatttggagacaaagcagaagtttctgaagtaggtcaggttttatcagttggagatggaattgctagaatctatggcttggataatgttcaagctggagaaatggtagaattttcagatggatcaaaaggaatggctttaaatctagaaagtgaaaatgtaggtgttgtaatttttggagatgatagagctgttaaagaaggtgatacagttaagagaacaggtgcaattgttgacacaccagtaggaaaagaattattaggtagagttgtagatggtttaggaaatccaatagatggcaaaggagctttagataaaggaattaaaaaaagtagagtagaagttaaggcaccaggaattattccacgtaaatctgtaagtgagcctatgcaaacaggattaaaatcaattgatagtttggttccaattggaagaggacaaagggaattaatcattggtgatagacaaactggtaaaactgctgttgctattgatgcaattataaatcaaaagaaaataaatgaatctggagatgaaaagcaaaaattatattgtgtttatgtagcagttggacaaaagagatcaacagttagacaaattgaaaaaacgctagaagaagctggagcaatggaatatacaactattgttgctgcaactgcttcagacgcagccccgcttcaattcctagcaccatatactggatgtgctatgggagaatattttagagataatggtatgcacgctttaattatttatgatgatctttcaaaacaagctgtagcatatagacaaatgtcattacttttaagaagacctccgggaagagaagcgtatccaggggatgtattttatttacatagtagattgcttgaaagagcagcaaaattaagtgatgaacatggcggaggatctttaacagcacttccaattattgagactcaaggaggcgatgtatctgcgtttatcccaactaacgttatatcaattactgatggacaaattttccttgaaacagagctatttaatcaaggaattagacctgcaattaacgttggattgtcagtatctagagtaggatcgtcagctcaaaccaaagctatgaagaaggtttcaggatcaatgaagctagaattagcgcagtatagagaaatggcagcatttgctcagtttggatcagacttagatgcttcaacacagaaactattaaatagaggagcaaaactaactgaactattaaaacaaaaacaatattcacctatgactgtagcagaacaagtaatatctgtattctgtggtgtaaaaggtcatttagatgatgttgagcaaaaagatatagcaagttttgaggcaaaaataattgagaaatgtagatcagaaaaaccagaaataatcgattcgattatttcctctggaaagctagaggatgatgttgaaaaattattaaatgaactaattctagatcttaaaaaaaactttaattcttaga

SEQ ID NO: 273612 - DNA, 760 bp, Unknown
  Bacterial polypeptide expressing nucleotide sequence isolated from the Sargasso Sea
tatgacaacaaataataaaggtaccatatcacaagttatcggagctgtagttgatgtacgctttgaagaaaacttgccgccaattcttgcggcattagaatgtaaggttggtgataaaactgtgatccttgaggttgcacagcatttaggtgagtccacagttagaactattgctatggagtcgactgatggaatgactagaggtggcgatgttgttgacaccggtaatcagatacaggttccagtaggccctgagactttaggtagaattatgaatgttgttggcgagcctgttgatgaaaggggtgaaattaaatctacagatagatggtcaattcatagagacgcccctgactttgttgatcaagctacagaaacagaaattcttgttacaggtattaaagttgtagatttactagcaccttattctaggggaggaaaaatcggtctctttggaggagcaggggttggtaaaacagttattattatggaactaataaataacattgcaaaagctcatggtggttattcagtattttctggtgttggagaaagaactagagaaggtaatgacctttatcatgaaatgattgaatctggcgttattgatttagaaggtaaagagtcaaaatgtgcattagtttatggacaaatgaacgaacctccaggagcaagagctcgtgtagctttaacaggcttgacagttgctgagtattttagggacatggaaggcccaagatgttttattttttgtagataa

SEQ ID NO: 273613 - DNA, 1579 bp, Unknown
  Bacterial polypeptide expressing nucleotide sequence isolated from the Sargasso Sea
gctggcacgcaacagaattgactatcaggagcgaataatgcaactcaatccctctgagatcagcgagctgatcaagagccggatccagggccttgaagcgagcgcagacgttcgcaaccaaggcaccgtgatctccgtgaccgacggtatcgtgcgcatccacggcctgtcggaagtgatgcagggcgaaatgctcgaattcccgggcaacaccttcggtctcgcactgaacctcgagcgcgactcggtcggcgccgtgattctgggtgagtacgagcacatttcggaaggcgacatcgtcaagacgacgggccgcattctcgaagtgccggtaggtccggaactgctcggccgcgtggtcgacgcactcggcaacccgatcgacggcaagggcccgatcaacgcgaagaaaaccgacgcaatcgaaaagattgctccgggcgtgatctggcgtaagtcggtttcggaaccggttcaaaccggtctgaagtcgatcgacgcgatggtgccggttggccgtggccagcgcgagctgatcattggcgaccgccagtgcggcaagaccgcagtcgcagtcgacgcgatcatcaaccagaagggcaagaacctcttctgtatctacgtcgcgatcggtcagaaggcttcgtcgatcatgaacgtggtgcgcaagctggaagaaaccggcgcgctggaatacacgatcgtcgtggccgcttcggcttcggaatcggctgcgatgcaatacctcgcaccgtacgctggctgcacgatgggcgaatacttccgcgaccgcggtcaagacgcgctgatcgtttatgacgatttgaccaagcaagcctgggcataccgccagatctcgctgttgctgcgccgcccgccgggccgcgaagcttatccgggtgacgtgttctatctgcactcgcgtctgctggaacgtgctgctcgcgtctcggaagagtacgttgagaagttcacgaacggcgaagtgaagggcaagagcggttcgctgacggcactgccggtcatcgaaacgcaagccggcgacgtgaccgcattcgttccgacgaacgtgatctcgattaccgacggccagatcttcctggaaaccgacctcttcaacgcaggtatccgcccggcaattaacgccggcgtgtcggtatcgcgcgttggtggtgcggcacaaaccaaggtcgtgaagaagctgtcgggcggtatccgtaccgacctcgcacagtatcgtgaactggctgcattcgcgcagttcgcgtcggacctcgacgaagcaacccgcaagcaactggagcgcggccgccgcgtcacggaactgctgaagcagccgcaatatcagccgttgcaagtgtgggaactggctgtctcgctgttcgcagcgaacaacggctacctcgacgatctggaagttgcgcaagtgctgccgttcgaaaagggcctgcgcgactatctgaagtcgagccacgctgacctggtcaagcgcatcgaagataccaaggaactctcgaaggacgacgaagccctgctgcatacggctctcaaagacttcaagaagtccggcgcttattga

SEQ ID NO: 273614 - DNA, 1381 bp, Unknown
  Bacterial polypeptide expressing nucleotide sequence isolated from the Sargasso Sea
ttggtagaaggcaagatcgtacagtgcatcggcgcggtgatcgacgtggaatttccgcgtgaccacatgccgaagatttacgacgcgctcattctcgaaggttcggaactgaccctcgaagtccagcagcagctgggcgacggcgttgtccgtaccatttgtctgggtgcatcggacggcctgcgccgcggtacgacggtgaagaacaccggcaacccgatcagcgtgccggtcggcaagccgaccctcggccggatcatggacgtgctgggtcgcccgatcgacgaagccggcccgatcaactcggacgtggttcgcggtattcaccagaaggctccggcgttcgacgaactgtcgccgtcgacggaactgctcgaaaccggcatcaaggttatcgatctgatctgcccgttcgcgaagggcggtaaggttggcctgttcggtggcgcaggcgtgggcaagaccgtgaacatgatggaactgatcaacaacatcgctaaagaacacggtggttactccgtgttcgccggtgttggcgagcgtacccgtgaagggaacgacttctatcacgaaatgaaggactcgaacgttctcgacaaggtcgcgctggtgtacggccagatgaacgagccgccgggcaaccgtctgcgcgttgcgctgaccggtctgacgatggctgagcacttccgtgacgaaggtctggacgtgctgttcttcgtcgacaacatctaccgtttcacgctggcaggcacggaagtgtcggcactgctcggccgtatgccgtcggcagtgggctatcagccgacgctggctgaagaaatgggcaagctgcaagagcgtattacgtcgaccaagactggctcgattacgtcggtgcaggccgtgtacgtccctgcggatgacttgaccgacccgtcgccggctacgaccttcggccacctggacgcaaccgtcgtgttgtcgcgtgacatcgcttcgctgggtatctacccggcagtggacccgctcgattcgacctcacgtcagatcgacccgaacgtgatcggtgaagagcactactcgatcacgcgcggcgtgcagcaaacgctgcagcgctacaaggaactgcgcgacattatcgcgattctgggtatggacgaactggcgccggaagacaagctcgccgtcgcgcgcgctcgtaagatccagcgtttcctatcgcagccgttccacgtcgctgaagtgttcacgggctcgccgggcaagtacgtgccgctgaaagaaacgatccgtggcttcaagatgatcgttgaaggcgaatgcgaccacctgccggagcaagcgttctacatggtcggcacgatcgacgaagccttcgaaaaggccaagaagatccagtaaa

SEQ ID NO: 273615 - DNA, 427 bp, Unknown
  Bacterial polypeptide expressing nucleotide sequence isolated from the Sargasso Sea
tatggcaaccattaaagtagacgtcgtcagcgcggaagagcagatcttctcgggccaggcgaagttcgtcgcgctgccgggcgaagcaggtgaactcggcattctgccgggccacacgccgctcatcacgcggattcgtccgggtgcggtgcgcattgaagctgaaaacggcgaagaagagtttgtgttcgtcgccggcggcatcctcgaaatccagccgggcgctgtgacggttcttgccgacaccgcgattcggggcaaggatctcgacgaagccaaagccgaagatgcacgcaagcgcgcagaagaagcgctgcaaaacacgggttcgaacctcgaatacgcgaccgcgcaagcggaactggcgtacgcgacggctcagctcgctgcgattcagcgtctgcgcaagctgcgcggtcagagctaa

SEQ ID NO: 273616 - DNA, 1186 bp, Unknown
  Bacterial polypeptide expressing nucleotide sequence isolated from the Sargasso Sea
aatggtagcaactccatcaacttcttcacaaacaaaaggcgtagtacgtcaggtaattggccctgttctagatgtagaattcccagccgggaaattacccaaaatattaaatgctttaagaattgaagctaaaaatcctgctgggcaagacatagcgcttactgcagaggtccaacagctcctaggtgaccatagagtaagagcagtggcaatgagtggcacagatgggcttgtaagaggtatggaagcaattgacacaggtgcacctatatctgtacccgttggagaagcaactttagggagaatatttaatgtcttaggagaaccagtagatgaacaagggccagttaataccaaagatactgctccaattcatagagctgctccaaagttaactgacctagaaactaagccaaaagtttttgaaactggtattaaagttatcgaccttttggctccctatagacaaggtggaaaagttggattattcggaggtgctggtgttggcaagaccgttcttattcaagaattaattaataacatcgcaaaagaacatggtggagtttctgtttttggcggtgtaggggaaaggacgagagaagggaatgacttatatgaagaatttaaagaatcaggagttatcaatgcagatgacttaacgcaatcaaaagtagccttgtgttttggacaaatgaatgagccaccaggtgcaagaatgagagtaggcttatcagcacttacaatggccgaacattttagagatgtaaataaacaagacgtcctactttttgttgataacatttttagattcgttcaagctggctctgaagtatctgcattacttggaagaatgccttcagctgttggataccaaccgactcttggaactgatgttggtgaattacaagaaagaattacatctactttagaaggttcaataacatctatccaagctgtttacgtacctgcagatgaccttacagaccctgcaccagccacaacctttgcacatttagacgctactaccgtgcttgctagagctcttgcagctaagggaatttatccagcagttgatccattagactcaacaagtactatgttacagccatcagttgttggcgatgagcattacaaaacagcaagagctgttcaatcaactttaccaagatacaaagagcttcaagat

SEQ ID NO: 273617 - DNA, 412 bp, Unknown
  Bacterial polypeptide expressing nucleotide sequence isolated from the Sargasso Sea
catgtccctcaccctccgcgtgctggcacctgaccagaacgtctttgatggcagcgccgatgaggtgatcctgcccagcaccaccggtcagctcggcatcctgcctggccacatctctttgctcaccgccatcgatgtcggtgtgctgcgcgttcgcgccaatggcggttggaactccatcgccttgatgggcggttttgctgaagtggatgccgatgaagtcaccgtgctggtgaatcaggctgaactgggcagcaccatcgacggcaacgccgccgaggccgacttccagaaagccaccaccgtggtggatggcatggaaggccagccggcgtcccctgaaaaggtcaaagctcagcaacagctgaacatggcccgtgcacgcatgcaggccagcaagtctgcagattga

SEQ ID NO: 273618 - DNA, 682 bp, Unknown
  Bacterial polypeptide expressing nucleotide sequence isolated from the Sargasso Sea
tatggctagtttagacgatctaaaaaaaagaattaccagtgtaaaatctacacaaaagattaccaaagctatgaaaatggttgcagctgccaaacttaaaagagctcaagatagtgcagaaaaaggcagaccatattctcaaaaaatgaataatattattctaaatttatctaatggtatttctgataagagtaatgctcctaaacttttatctggcacaggaaatgagagaattcatctttgtgtagtaatgacttcagatagaggtttatgcggtgggtttaatgccaatataattaaaaaagctaaaagttattttttgaaattaaaagaagaaggcaaagaattaaaaattattacagttgggtccaaaggcaatgatcaacttaagagagtttatggagataaaataatcgaaaatatttcttttaaagactcaaaaaatgcaaattattttgatgctgaaaaagtaggaaaaactattattgaaagatttcaaaaagaggaatttgacatttgtacaattttttataatcaatttaaaaatgtaataactcaaatacctcaagcccagcaaatcattccgttgaacactgagaacaatgatgaaaataaatcagaagaaagctatgaatttgaaccagatgaagatgaaattttgagcaatttattacctaaaaat

SEQ ID NO: 273619 - DNA, 910 bp, Unknown
  Bacterial polypeptide expressing nucleotide sequence isolated from the Sargasso Sea
aaaagatcaacagtaagacaaattcaaaaaactttagaagaggctggtgcaatggaatatacaactattgttgctgcaacagcatcagactctgcaccattgcaatttttagctccctatacaggttgcgctatgggagaattttttagagacaatggaatgcatgcattaattatatatgatgatttgtcgaaacaagcagtggcatatagacaaatgtcacttatattaaggagacctccagggagagaggcttatccaggagatgtattctacttacacagtcgattattagaaagagcagcaaagttaagtgacgaacacggtggaggatctttgacagctcttccaataattgaaactcaaggtggtgatgtgtctgcatatattccaactaatgtaatttctattactgatggacaaatatttttagaaacagaattatttaatcaaggtattagacctgccattaacgttggattgtcagtttctagggttggatctgcagctcaaacaaaagctatgaaaaaagtttcaggttcaatgaaacttgagttagctcaatatagagaaatggctgcatttgcacaatttggctctgacttagatgcttcaactcaacagcttttaaatagaggctcaaaattaactgaacttttaaaacaaaaacaatactcaccaatgacagttgcagaacaagtaatttcagtcttttgtggagttaagggctttctagacgatatagatttaaaagatatttcagaatttgaaaataagataatcgatagatgtaaatctgataaacccgagattattgattcaattttaagttcaggaaaattagaggaaggctctgaaaaagatttaatcgaaatcataaccaatttaaagaaaaattttaaatcttaat

SEQ ID NO: 273620 - DNA, 874 bp, Unknown
  Bacterial polypeptide expressing nucleotide sequence isolated from the Sargasso Sea
tatggcaagtttagacgacttaaaaaaaagaatagctagtgtaaagtctacacagaaaattacaaaagctatgaaaatggttgctgcagctaagttaagaagagctcaagaaagtgctgagaagggaaggccatattctgaaaaaatgaataacattattttaaatttatcaaatggtatatctgataaagaaaatgcaccaaagttattgtcaggcactggtcaggaaaaaactcacctttgcgtggtaatgacctctgatagaggtttatgtggcggatttaattctaatattattaaaaaagctaaaagtcattttgcaaaaattttagatgaaggtaaagaacttaaaattatcacagtgggctcaaagggaaatgatcaattaaaaagagtttatggtgacaaaataattgaaaatatttctttcaaagaatctaaaaatgcaaattatttcgatgctgataaagttggaaaaatggtaattgaaaaatttgaagcaggtgaatttgacatttgtacaatattttataaccaatttaaaaatgtaattactcaaattcctcaagcacagcaaattatccctttaaataatgaaggtgatgaaactagttcagatgaaagttacgaatttgaaccagacgaagatgaaattttaagtaatttattgccaaagaatatttctacacaaatatttaaagcaatgttagaaaattcagctagcgagcaagggtctagaatgagcgcaatggataatgcaacccgaaacgcaggtgaaatggttgacaaacttactatcgagtataatagaagtcgtcaggcagcaattacaaaagaactaatagaaattatatcaggagcagaaagtttataa

SEQ ID NO: 273621 - DNA, 819 bp, Unknown
  Bacterial polypeptide expressing nucleotide sequence isolated from the Sargasso Sea
aatggaaataaatccttcagaagttacaaagatattaaaagaacaaataaaaaattttggtgataaagctgaagtcacagaagttgggcaggttttgtctgtaggagacggtattgctagaatttatggtctagataatgtacaggctggagaaatggtagagtttgcagatggatcaaaaggaatggcacttaatttagaaagtgaaaatgttggtgttgtaatttttggtgatgatagaaatataaaagagggtgatgtagtaaaaagaactggtagtattgttgatactcctgttggcaaagaattattaggaagagtagttgatggtttaggtaatccgattgatggtaaaggaccattaagcaaaaatgttaaaaaaactagagtagaagtaaaagcacctggaattattcctcgacaatcagttagcgaaccaatgcaaactggattgaaatcaattgatagtttggtcccaattggaagaggtcaaagggaattaattattggtgataggcaaactggaaaaactgcagttgctgtggacgcaattatcaaccaaaaaaagataaatgagtctggtgacgaaaaacaaaaattatattgtatatatgtagccgttggtcaaaaaagatcgacagttagacaaattcaaaaaacactagaggaagcaggcgcaatggagtacacaactattgttgctgctacagcatctgactcagcgccattacaatttttagcaccatatacaggatgtgctatgggtgaatattttagagataatggaatgcatgcattgattatctacgatgatttatc

SEQ ID NO: 273622 - DNA, 1420 bp, Unknown
  Bacterial polypeptide expressing nucleotide sequence isolated from the Sargasso Sea
tatgaacaaaggaattatcacacaagttataggagcagtggtagatgtaaaatttgagggagatttacccgaaattctgacagcattagagtgtaagaatggagataatagattagttttagaagttgcacagcatttaggtgagtcaactgctaggacaatcgctatggatgcaacagagggactaaaaaggggtgatgaggttgtaaacacaaatgctccgatcaaagttccagttggaccagaaacattaggtagaattatcaatgttgttggtgaacctattgacgaaagaggaaaagttgagactaaagagagttggcctattcatagaccagccccagaatttaatgatcagtctactgaaactgaaattcttgtgactggtattaaagtaattgatttattggcgccttatgcaaaaggtgggaaaattggattatttggaggtgctggtgttggtaaaacagttttaattatggagttaataaataacgtagcaaaagcacacggaggattttctgtttttgcaggagttggagaaagaacaagagaaggaaatgatctttaccacgaaatgatggaatcaggagtaattaaatctgaaggccctggttcaaaagcagccttagtttatggtcaaatgaatgaaccaccaggtgcaagagcaagagtagcgctgacaggtctaacagtagctgagtattttagagatcaagaaggacaagacgtgttattttttgtagataacatttttagatttacacaagctggatcagaagtttcagctttgttgggtcgtattccatcagcagttgggtatcaaccaacacttgcaactgatatgggaaatttacaggagagaattacaactactaacaaaggatcaatcacatccgtgcaggcaatatatgtgccagccgacgatttgactgatccagcaccagcaacttcatttgcccatttagatgcaacaactgtactttctagacaaattgctgaaatcggaatttatccagcagttgatccacttgactcaacttcaagaattcttgatccaagaatagttggagatgaacactatagagtagcacgtgaggttcaaaaaattttacaaacctataaatcattacaagatattattgctattttaggtatggatgagttatctgaagatgataaattgattgttgctagagctagaaaaattcaaagattcctttctcaacctttttttgttgctgaggtatttacaggttctcctggaaaattagttgatctagagtcgactataaaaggttttgatgcaatttgtaaaggagagtatgatcatcttcccgaagcagcattctacatggttggaacgatagaagaagcaattgaaaaagctgaaaaaatgaagaaagatgctgcagcctga

SEQ ID NO: 273623 - DNA, 527 bp, Unknown
  Bacterial polypeptide expressing nucleotide sequence isolated from the Sargasso Sea
tacgtcagtgcaagccatttacgtgccggccgatgacttgactgacccagcgccagctacttcgttttcgcaccttgatgccacaaccgttcttagccgacagatagcagaactaggaatttatccagcggtcgaccccctggactctacttctagaatgctagaccctcgtatcctaggcgaagaacactactctgttgcacggcaggtgcaggaagttcttcaaacctataagtcgttgcaggacatcatagctattctgggtatggatgagctttcagaagaagataggttggtggtggatagagctagaaaaattcagcgttttctatcacaaccattctttgtagcagagatttttacggggactccaggcgttttagttccattggaagagaccatcagagggtttaaggaaattgtggaaggaaagcatgacgacctacccgaagctgctttttatatggttggtacgatagacgaagctattgaaaaggccaagcagatggaacaggaagcggcttaga

SEQ ID NO: 273624 - DNA, 916 bp, Unknown
  Bacterial polypeptide expressing nucleotide sequence isolated from the Sargasso Sea
aatggaaattaatccttcagaagtaacaaaaatattaaaagagcaaataaaaaaatttggtgataaaactgaagtatctgaagttggtcaagttttatcagtaggtgatggtatagcaagaatttatggcctagataatgttcaagctggagaaatggtagaattttctgatggctctaaaggtatggctcttaatttggagagtgataatgttggtgtggttatatttggggaagatagagctataaaagaaggggatactgttaaaagaacaggagccatagttgatacacctgtaggaaaagaattacttggtagagtagttgatggacttggaaacccaattgatggaaaaggtgctttagataaaggagttaaaaggaatagagttgagataaaagctcctggaattattccaagaaaatcggttagcgaaccaatgcaaacaggacttaagtcggttgatagtcttgtaccaattggaagaggtcaacgagaattaattattggcgatagacagacgggaaaaacagcagtcgcaattgatacaataataaatcaaaaaaaaatcaacgaatctaatgatgaaaagcagaaattatattgtgtttatgtagcaataggccaaaaaagatcaacagttagacaaattgaaaaaactttagaggaagctggagcaatggaatatacaacaatagttgcggctacagcttcagatgctgccccattacaatttttagctccttatactgggtgtgctatgggtgagtattttagagataatggcatgcatgccttaattatatatgatgatctatccaagcaagctgtagcttatagacaaatgtcattattattaagaagacctccaggaagagaagcttatcctggtgacgtattttatttacatagtagg

SEQ ID NO: 273625 - DNA, 1111 bp, Unknown
  Bacterial polypeptide expressing nucleotide sequence isolated from the Sargasso Sea
cctgttcaaacaggactaaaggccattgatgctatggtgcctattggtaggggtcaaagggagctcatcattggtgataggcaaacaggtaaaacggctgttgctattgataccatcatcaaccaaaaagatactggtattaaatgtatttacgttgcaataggtcaaaaacaatcaactattgctaatgttgtaagaaaattagaagagtacggcgccatggatcacaccatcgttgtttcagctgcagcagcagatccagcagcgatgcaatatctttctgcttattctggatgcgcaatgggtgaatactttagggatagaggagaggacgcattaattgtttatgatgacttatcaaagcaagctgtagcttacagacaaatatcacttcttctaagaagacctccaggtcgtgaagctttcccgggtgatgttttctatctgcattctcgtcttttagaaagagcagcaagagtaaatgctgaccatgttgaaaaaattaccaatggtgaagtgaagggaaaaacaggatccttaacagcacttccaatcattgaaacacaggctggtgatgtttcggcgttcgtcccaaccaacgtcatttccattactgacggtcagatatttttagaaactgacttatttaattcaggagtaaggcctgcaattaacccaggtatttctgtatctagggttggtggtgcggcgcaaaccaaaattattaaaaaacttggtggtggggttaggttagcactagctcagtttagagagcttgcttcgtttgctcaatttgcatctgatttagatgatgcaaccaaagaacaattggctcacggccaaagaattaccgagctgcttaaacaaaaacaatattcacctttaagcgtggctcaacaagccgtaactctttttgctgctgatcgaggatttttaaaagacgttgaggttgaaaagcttggctcttttgaggacgcactgcattcgtactttcatgcagaagcaggcgagcttgaaaatagaatcaatgagacgggcgactgggatgatgacatcgagaagcagtttgagtctttgttagaaaactttaagaaaacacaaacttactaga

SEQ ID NO: 273626 - DNA, 1150 bp, Unknown
  Bacterial polypeptide expressing nucleotide sequence isolated from the Sargasso Sea
agaattaaaagctccaggaattattccccgacaaagtgtttctgagccaatgcaaacaggaattaaagctcttgatgctttagtgcccattggaagaggccaaagagaattaattattggtgatagacaaactggtaaaactgctgttgctattgatactattcttaatcaaaaaacggttaatcaatccggtaatgaaaaagaaaaactttattgtatatatgttgctataggtcaaaaaagatcaacagtagctcaaattgtaaaaactttagaagataatggtgcaatggaatacacaattgttgtttctgctacagcatctgaaccagcacctcttcaattcttatcggcttacactggatgcacaatgggtgaatattttagagataatggaatgcatgctttaatagtttatgatgatttatcaaaacaagctgttgcttatagacaaatgtcattacttttaagacgaccaccaggtcgtgaagcatatccaggtgatgtattttacatacatagtcgtcttttagagagagcagctaaaatgagtgatgaacatggcagtggaagtttaactgctttgcctattattgaaacacaagcgggtgatttgtcagcatatattccgacaaatgttatttcaataactgatggacagatttttttagaaactaatttattctttgctggtatacgtcctgcaattaatgttggcttatccgttagtcgtgttggctcagcagctcaaacaaaggctatgaaaaaaattgctggccctgttaaattagagttagcacaatatcgagaaatggcagcttttgctcagtttgcatctgatttagatgcatccactaagcaattattagaacgtggcgcaagacttgttgaaattcttaagcaaggacagtactccccactaactgtatctgaacaggttgtgtctatttatgcaggtgtgagaggttatcttgataaagtagcagttaatgatgttgttcgttttgaaacggaagttttgaatgaagtgagatctagtcacgctgatttattaaatgcagttgctaatgaaaaagagttatcaaaagagaatgatgaaaaattaaaatcaatcttagataatattgttgaaaaatttacgagtaactaa

SEQ ID NO: 273627 - DNA, 613 bp, Unknown
  Bacterial polypeptide expressing nucleotide sequence isolated from the Sargasso Sea
tatgagtgctggaactactgtgcaagtcattggagctgttgtagatgtcgaatttccaagtgatgctataccaaatatttacgatgcattaacaatcgaagatgcagatcttacgcttgaagttcagcaacaattgggtgacggtgtagttaggacaattgcaatggggtccagtgaaggcttaaaaagaggcatgagtgtaaacaacacaggccaaccaatttctgttccagttggagagaaaacattaggaagaattatggatgtattggggactccaattgacaataaaggcgatattggtgctgaaatgaacatgccaattcacagaaccccaccgacctatgaagagcaagcttcatcaactgaaatgctggaaacaggaatcaaggtaattgatctcattatgcctatcgcaaaaggaggaaaagtaggtttattcggcggtgcgggcgtcggaaaaacagtgaccctaatggaattgattcgtaacatcgccgcggagcattctgggtattcagttttcgctggtgttggtgaaagaacacgagagggaaatgatttctatcatgaaatgacagaatccaatgtaattgataaagtctcttttggt

SEQ ID NO: 273628 - DNA, 1522 bp, Unknown
  Bacterial polypeptide expressing nucleotide sequence isolated from the Sargasso Sea
aatggaaataaatccttcagaagtaacaaaaatattaaaagaacagataaaaaaacttggcgatagagctgaggtttcagaggtcggacaagtattgtctgttggagatggaattgcaagaatttatggcttggataatgttcaagcaggagaaatggttgagttttctgatggctctaaaggaatggcattaaacttagagagtgacaacgttggtgttgttatatttggcgatgatagagaaattaaagagggtgatactgtaaaaagaactggtgcgattgttgatgtaccagttggaaaacaacttttaggaagagttgttgatggattaggaaatccaattgatggaaaaggagctttagataaaagtttagaaagaaaaagagttgaagttaaagctccgggtattattccacgacaatcagttggagaaccaatgcaaacaggtttaaaagcaattgatagcttaattcctgttggaagagggcaaagagaacttataattggagatcgtcaaacaggtaaaactgcagtagctatcgatacaattataaatcaaaagaaaattaatgagtcagacgatgaaagtaaaaaactttattgtatatatgttgcaattggacaaaaaagatcaacggttgctcagattgtaaaaactttagaggatgctggtgcaatggaatatacgactatagtttccgcaacagcctcagactctgcgcctcttcagtttttagctccttatacaggatgtactatgggagaatattttagagataatggaatgcatgctttaattatttacgatgatttatctaagcaagcagttgcatatagacaaatgtcattattattaagaagaccaccggggcgtgaagcataccctggggatgtgttctatttacatagtagattattagaaagagctgctaaattaagtgatgaaaatggcggaggttctttaactgcgctaccaattattgaaacacaagcaggtgatgtttctgcatatattccaacaaatgtaatatctattacagatgggcaaatatttttagaaactgaactattcaatcaaggaataagaccagcagtaaacgttggattatccgtatctagagtaggatcagctgcacaaactaaagctatgaaatctgtggctggatcaattaaattagagttagctcaatacagagaaatggcagcttttgctcaatttggatctgatttagatgcatctacacaaaaacttttaaatagaggttcgaagttaactgaacttttaaaacaaggacaatattctcccatgacagttgcagaacaagttatatcaattttctgtggtgtaaaaggttatttggatgatattgaacttaaagatgtagccgactttgaaaataaagttctacaaaagtgtaaatctgataagcctgagattatggagtctattgccaaaactggaaagattgaggaagacattgaaaaacaattagtagaattaattaaaggaattaaataa

SEQ ID NO: 273629 - DNA, 1231 bp, Unknown
  Bacterial polypeptide expressing nucleotide sequence isolated from the Sargasso Sea
tatgagcaaaaaaggaaacataacacaagtaattggtgcagtcgttgacgtaaaatttgatggagaactgccagaaatattaacagccttagagtgtgataatggaggtaatagattagttttagaagttgcgcagcaccttggagagtcaagtgttagaaccattgctatggatagtacagagggactcaaaaggggtgatgaagtaaaagatacaggtgctccaattcaagttccagtaggtccagaaacattaggacgaattgtaaacgttataggtgaaccaatcgatgagaaaggacaaatttctactaaagaaaattggcctatacaccgacaagctccttcttttaatgatcagtctacagaaacagaaattttagtaactggaataaaggtaatcgacttattagcaccttatgccaaaggtggaaaaattggattgttcggtggagcaggagttggaaaaactgtaattataatggaacttataaataatatagctaaggcccacggtggattttcagtatttgctggagtgggagagagaactagagaagggaacgatttatatcacgaaatgatcgagtcaggagtgatcaagccagagggaactggatctaaagcagcattagtttacggacaaatgaatgagcctcctggagctagagctagagtagctttaactggtcttactgtggcagagtatttcagggatcaagagggtcaagatgttttgttctttgttgataacatttttagatttactcaggcaggttcagaagtatcagctcttctaggaagaattccttcagcggttggttatcagcctactcttgcaacagatatgggaaacctgcaagaaagaattacaacaactaataaaggatcaattacatctgttcaggcaatttatgtacctgcagatgatttaacagatccagctccagcaacttctttttcacacttagacgcaacgactgtactctcaagacaaattgctgaattaggtatttacccagctgttgaccctttggattctacttctagaattttagatccgagagttgttggtgatgaacactatcgagtagcaagatctgttcagaaaattttacaaacatacaaatctttgcaagatattattgcaattctaggaatggatgagctatcagaggatgataaacttaccgttgctagagctagaaaaattcaaagatttttatcacac

SEQ ID NO: 273630 - DNA, 1429 bp, Unknown
  Bacterial polypeptide expressing nucleotide sequence isolated from the Sargasso Sea
atggcaagtaataaggcaggaaaagtcacacaggtattaggggctgtagttgacgtcgcctttgaaggagaattacccccaattttaaatgcattatctacgaaagtaggtgatcaagatttaattttagaagtagcgcagcacctcggtgaaaatactgttcgaactattgctatggacgcaacggagggtctccaaagaggccaagaagttcaagacaatggtgatcctatttctgtgccagtcggaccagaaacattaggtcgaattatgaacatcatcggtgaacccattgacgagcgaggtccaattgaatcaaaaaaatctcttcctattcatagagcagctcctgattttgttgatcaatcaaccgaaaccgaagttcttgttacgggtattaaagttatagatcttttagcaccttactcaaagggtggaaaaattggtcttttcggtggtgctggtgttggaaaaactgttttaattatggaattaattaacaacgtagctaaagcccatggtggatactctgtttttgccggagtgggagaaagaactcgtgaagggaacgatctttatcatgaaatgattgagtcaggtgttatcaaccttgagggtgatacttctaaagtgtctctagtttatggtcaaatgaatgaacctccaggagctagagcaagagttgctttatcaggtttaacacaagctgaatattttagagatgaagaaaatcaagacgtcttattctttgtagacaacatcttccgatttacacaagctggatcagaggtttcggctttactaggacgtattccatcagctgtgggatatcaacctactttggctacagatatgggtgcacttcaggaaagaattacgactactaacaaaggatcaataacatctgtacaagcaatttatgttcctgctgatgatttaactgaccctgcacctgcaacatcattttctcacttagacgcaactactgtgttaaacagatcaattgcagaacttggtatttatcctgcagtggatcctttagactccacttctagaattttagaaccaagaactttgggtgagaagcattatcaagttgcaagagatgttcaaaaaactcttcaaacctacaaaagtttacaagatattattgcaatcctaggcatggatgaattatctgaagaagataagctggttgtatcaagagctagaaaaatacaacgtttcttaagtcaacctttccatgttgcagaggtgtttactggctcaccaggtaagtttgtttctttagaggataccatcaaaggttttgatggattggtcaaaggtgactacgatcatattcctgaagcagctttctatttggttggaacaattgaagaagcattagaaaaagctaaaaaaatggctgaggaagcaacgaaatagt

SEQ ID NO: 273631 - DNA, 868 bp, Unknown
  Bacterial polypeptide expressing nucleotide sequence isolated from the Sargasso Sea
ttcattaaaagaccttaaaaatagaattggttcagtcaagtctacacaaaaaattacatcagcaatgaagatggttgcggctgctaaactacgtaaagctcaagagcaagctttagcctcaagaccatacacatctcttatggacagtgttgtatcaaaaatttcttctaaaacaattggaagctctatagatctactaagtggtaaagaagaaattaaaactcaattattagttgttttttctgcagatagaggattatgcggtggtttcaatggatcaattacaagagcagttaggtctgaaattaaaaaactaaaagacgatggtataaatgttaaattacttatggtaggaaaaaaatctgctgatgcactcaatagagagtttagtgacttttttgttgaaaaaatagatgggaattcagcaaaacctaattacacagatgccgaagttttagcaaaaaaaataattgatttgtttgaaaataatgaatttggtgtatgcagagtaatatttaataaatttgtttctgcaattactcaagaagttacttttaaatctcttatcccagtagaagttaaaaatgatgagattgatgaaaatgactccagttcactatatgaatttgaacctagcgaagaagaaatattgaatgacctattacctcgcaatttagctacacaattatatagttctcaaattgaaagtacagcaagtgagctagctgctagaatgactgcaatggacaatgctactaggaatgctggggagatgatagataatttaactcttcaatataatagaacaagacaagctgtcattacaaaagaattaattgaaattatatcaggtgcagaagccttataa

SEQ ID NO: 273632 - DNA, 611 bp, Unknown
  Bacterial polypeptide expressing nucleotide sequence isolated from the Sargasso Sea
tatggcgaaaaaaccgtccactaaacaaaatggcaaaatatctcaagttattggagctgttgttgatgttgagtttgatgcagatcttcctcaaatattagatgctcttcaagttgataataatggacaaaaactaattttagaagtagcgcagcatctaggtgaaaacgaagtaagaaccatagctatggacagtactgatggtctagttcgaggtatggacgttgttcaaacaggtgcaccaattacagttcctgttggaccagaaacattaggacgaattcttaatgttattggtgatccggtagatgatggtaagccggttaagtccaagtcaactttacctattcatagagatgctccagaatatgttgatcaatccacttctgctgacattttagtaacaggaataaaagtggttgatcttttagcaccttatgcaaaaggaggtaaaatcggactttttggtggtgctggtgttggcaagacagttttaattatggagcttataaataacgtagctaaagcacatggtggatattctgtttttgcaggtgttggcgaaagaactagagaaggtaatgatcttttccatgaaatggtagaatctg

SEQ ID NO: 273633 - DNA, 781 bp, Unknown
  Bacterial polypeptide expressing nucleotide sequence isolated from the Sargasso Sea
tatgagcaaaggtataattacacaagttattggagcggtagtagacgtgaagtttgatggagaacttccagaaattttaactgcgttagaatgtaaaaatggagataacagattagttttagaagttgctcaacatttaggagagtccaacgttcgaactattgctatggatgctactgagggactaaaaagaggtgacgaggtaattaacactaaatcacctattcaagttcctgttggacctgaaacattaggaagaattattaacgttattggagagccaattgatgaaagaggtcaagttaaaacgaaagaaagttggcctatacatagagccgcccctgaatttaatgaacaatcaactgaaactgaaatattagtcacaggtataaaagtaatcgatttattagcaccatatgcaaaaggtggaaaaattggactttttggtggagctggagttggaaaaacagttttaattatggaattgattaacaacgttgccaaagcacatggtggattttctgtatttgcaggagttggagaaagaacaagagaaggaaatgatctttatcatgaaatgatagactcaggagttattaaaaaagatggagaaggatctaaagctgctttagtttatggtcaaatgaatgagcctccaggagctagagctagagttgcgctaacaggattaactgtagccgagtattttagagatcaagaaggtcaagacgttctttttttcgtagataatatttttagatttactcaaggcaggctctga

SEQ ID NO: 273634 - DNA, 1429 bp, Unknown
  Bacterial polypeptide expressing nucleotide sequence isolated from the Sargasso Sea
atggcaagtaataaggcaggaaaagtcacacaggtattaggggctgtagttgatgtcgcctttgaaggagaattacccccaattttaaatgcattatctacaaaagtaggtgatcaagatttaattttagaagtagcgcagcaccttggtgaaaatactgttcgaactattgctatggacgcaacggagggtcttcaaagaggccaagaagttcaagacaatggtgatcctatttctgtgccagtcggaccggaaacgttaggtcgaattatgaacatcatcggtgaacctattgacgagcgaggtccaattgaatcaaaaaaatctcttcctattcacagagcagctcctgattttgttgatcaatcaaccgaaaccgaagttcttgttacaggtattaaagttatcgatcttttagcaccttactctaagggtggaaaaattggtctttttggtggtgctggcgttggaaaaactgttttaatcatggaattaattaacaacgtagctaaagcccatggtggatactctgtttttgctggagtgggagaaagaactcgtgaagggaacgatctttaccatgaaatgattgagtcaggtgttatcaaccttgagggcgatacttcaaaagtgtctctagtttacggtcaaatgaatgaacctccaggagctagagcaagagttgctttatcaggtttaacacaagctgaatattttagagatgaagaaaatcaagacgtcttattctttgttgacaacatcttccggtttacacaagctggatcagaggtttcggctttactaggacgtattccatcagctgtgggatatcaacctaccttggctacagatatgggcgcacttcaggaaagaattacgactactaacaaaggatcaataacatctgtacaagcgatttatgttcctgctgatgatttaactgaccctgcacctgcaacatcattttctcacttagacgcaactactgtgttaaacagatcaattgcagaacttggtatttatcctgcagtggatcctttagactccacttctagaatcttggagccaagaactctgggtgagaagcattatcaagttgcaagagatgttcaaaaaactcttcaaacctacaaaagtttacaagatattattgcaatcttaggtatggatgaattatctgaagaagataagctcgttgtatcaagagctagaaaaattcaacgtttcttgagtcaacctttccatgttgcagaggtgtttactggctcaccaggtaagtttgtttctttagaggataccatcaaaggttttgatggattggtcaaaggtgactacgatcatattcctgaagcagctttctatttggttggaacaattgaagaagcattagaaaaagctaaaaaaatggctgaggaagcaacgaagtagt

SEQ ID NO: 273635 - DNA, 1166 bp, Unknown
  Bacterial polypeptide expressing nucleotide sequence isolated from the Sargasso Sea
cgttaaaagaagcagagttgaagtaaaagcaccaggaattattcctcgtaaatcagtaagtgaacccatgcaaactggattgaaatctattgatagtttagttccaattggcagaggacagagggaattaattatcggagatagacaaacaggaaaaactgctgtagccattgatgcaataattaatcaaaaaaaaataaacgagtctggagatgagaagcaaaaattatactgtatatatgtagctataggacaaaaaagatctacagttagacaaatcgaaaaaaccttagaagaggctggagccatggaatatacaactattgttgctgctacagcttcagatgcagcgcctcttcaatttttagctccttatactggttgtacaatgggagaatattttagagataatggtatgcattcattgataatttatgatgatctttcaaaacaagcagttgcctacagacaaatgtcgcttttattaagaagacctccaggaagagaagcttatcctggtgatgtattttatttacacagtagattgcttgaaagagcagctaaattaagtgatgatcatggaggaggttctttaacagctcttccaataattgaaacacaaggaggtgatgtttcagcatttatacctaccaatgttatttcaattactgatggacaaatttttttagaaacagaattatttaatcaaggtataagacctgcaattaatgtaggattatctgtatccagagttggatcatctgcgcaaacaaaagcaatgaaaaaagtatcaggatctatgaagcttgaacttgcccaatatagagaaatggcagcttttgcacaatttggatcagatttggatgcctctacccaaaaacttttaaatagaggctctaaattaaccgaactacttaaacaaaagcaatactctcctatgactgtatcagaacaagtaatttcaatattttgtggtgttaaaggatatttagatgatattgagcaaaaaaatattgctgattttgaaaataaaatcatagaaaaatgtaaatctgaaaaacaagaaattttagattcaataaaaagttcaggaaaactagaggaagatgcagaaaaatctttaactgaagttattactgagcttaagaaaaattttaaatcataga

SEQ ID NO: 273636 - DNA, 857 bp, Unknown
  Bacterial polypeptide expressing nucleotide sequence isolated from the Sargasso Sea
tgatttgtatcatgaaatgattgagtcaggagtaattaaaacctatggtaaaggatcaaaagcagcacttgtttatggacagatgaatgaacctccaggagcaagagcaagagttgctttaaccggtctgacagttgccgaatattttagagataaagaaggtcaggacgtattattctttgtcgacaatatatttagattcactcaagccggttcagaagtatcagctcttttaggaagaattccttcagccgttggatatcaaccaactcttgctacagatatgggtaacttgcaagaaagaattacttctacggacaaaggttctattacttcagtgcaggctatttatgtacctgctgatgacttaaccgatccagcacctgccacatctttctctcacttagacgcaacaacagtattatcaagacaaatcgcagaaataggaatttatcctgctgtagatcccttagactcaacttcaagaattttagatccaagggtagtaggtgaagagcattatagagtagctagagatgtacaaaaaattttacaagcgtataaatctcttcaagacattattgctatcttaggaatggatgaactctccgaggaagataaattaactgttgctagagcgagaaaaatacaaagatttctatctcaaccattttttgttgctgaagtatttacaggttctcctggaaaactagtagacctaaatgatacgataaaaggttttgacgctatatgtaagggagaatacgatcatttacctgaagcagcattttatatggtgggtggtatagaggaagtaattgagaaagcagaaaaattatctaaagacagcaaataat

SEQ ID NO: 273637 - DNA, 748 bp, Unknown
  Bacterial polypeptide expressing nucleotide sequence isolated from the Sargasso Sea
gtggcacttacaggattaactgtagcagaatattttagagatcaagaaggacacgatgttttatttttcgttgataatatatttaggtttactcaagcaggttctgaggtatcagcattattaggaagaataccttctgctgtaggatatcagccaacattagcaactgatatgggaaatttacaagagagaatcactacaaccaataaaggctctattacatcagtacaggcaatttatgtgcctgctgatgacttaacggatcctgcaccagcaacctcatttgctcatttagatgcaacaactgtactctcaagacaaatagctgaaataggtatttatcctgcagttgacccattagactcaacttcaagaattcttgatcctagaattgttggtgatgagcattatcgagtagctcgtgaagtacaaaaaatattacaaacatataaatcgttgcaagatattatagctattttaggtatggatgaattatcagaggaagataaactagtcgtagcaagagctagaaaaattcaaaggtttttatctcaacctttctttgtggctgaggtgtttacaggatcaccaggaaaacttgttgatttagagtcaacaattaagggcttcgatgcaatttgcaaaggtgaatatgatcatcttccagaagcggcattttatatggttggaaccattgaagaagctatcgaaaaagctgaaaaaatgtctaaagatgctgcagcttaat

SEQ ID NO: 273638 - DNA, 1255 bp, Unknown
  Bacterial polypeptide expressing nucleotide sequence isolated from the Sargasso Sea
tatggacataaatccttctgaaataactaaaattttaaaagagcaaataaaaaacttgggtgaaaaaactgaagtttctgaaattggaaaagttttatcagtgggtgacggtatagctagagtttatggtcttgacaacgtacaggcaggtgaaatggttgaatttaaagatggatcaaaaggaatggctttaaatttagaaagtgacaatgttggaatagttatttttggagatgataaagctattaaagagggcgatacggttaaaagaaccggagcaatagttgatgttcctgtagggaaagatttactcggaagggtagttgatgcattaggaaatcctattgatggcaaagataatcttaaaaaagggattaaaagacaaagagtagaagtaaaagctcccgggataatacctagaaaatcagttaatgaaccaatgcaaacagggttaaaagcaatcgatagtttaattccaattggaagaggtcaacgagaattgattattggtgatagacaaactggtaaaacagcagtagctatcgatactataattaatcaaaaaaagattaatgagtcatcagatgagaagaaaaaactttactgtatttatgttgcaataggccaaaaaagatccacagtcgcacaaattctaaaaacattacaagatgctggtgcaatggattataccattatagtatctgcaacggcatcagatcctgcgccattgcaattcttagcaccttataccggttgtacttttggtgaatttttcagagacaacggtatgcatgcattaattatttatgatgatttatctaaacaagcagttgcgtatagacaaatgtcgctcttattacgaagacctccaggcagagaggcatatccaggagatgttttttatttacacagtagattattagagagagcagcaaaacttaatgacgaaaacggaggaggctctcttacagcattaccaataatagagacccaagcgggagatgtgtctgcatatatccctactaatgttatatcaattacagatggccagatatttttaggtacagagttatttaaccaaggaataagaccagctgtaaatgttggtctttctgtttcaagagttggttctgcagctcaaacaaaggctatgaaaaaagttgcaggttcaataaaacttgagctcgcgcagtaccgagagatggctgcatttgctcagtttggatctgatttagatgcctcaactcaaaacttt

SEQ ID NO: 273639 - DNA, 463 bp, Unknown
  Bacterial polypeptide expressing nucleotide sequence isolated from the Sargasso Sea
aatgagcaatggtttagtaacacaaattatcggagcagttatcgatgttgagtttgaaaaaaacaacattcctcaagtatacgaagctatcaaaattacagatacaggtacagtgcttgaagttcaacaacaacttggtgatggaattgtcagagcaattgcgatgggaactactgaaggactaaaaagaggtttaaccgctgaacgaaccaatgctcctatttctgtcccggtgggtgaaaaaacgcttggtcgaattatggatgtattaggcaatcctattgatgagtgtggtccaattggtgaggatgagcaaatgcctattcacagaaaaccaccaagctatatggaccaatctttatcagatgatcttttagagacaggtattaaggttattgatttaatatgtccgtttgcaaaaggtggaaaaattggtttatttggaggagccgggtgttggtaa

SEQ ID NO: 273640 - DNA, 988 bp, Unknown
  Bacterial polypeptide expressing nucleotide sequence isolated from the Sargasso Sea
aatagggttgtttggtggtgcaggggttggaaaaactgttttaattatggaattgattaataacgttgctaaagcacatggtggattttctgttttcgcaggtgttggagaaagaactagagagggaaacgatctttaccatgagatgatggagtcaggtgtgattaaacctgaaggacctggttctaaggcagcattagtatatggacaaatgaatgaacctcccggtgcaagagctagagttgcgttaacaggattaacagttgcagaatattttagagatcaagagggacaggatgttcttttttttgttgataatatatttagatttactcaagcaggatcagaggtttcggctcttttaggaaggattccttcagcagttggatatcagccaactttagctactgatatgggaaatttacaagagagaattactacaacgaataaaggttcaataacatctgtacaagcaatttatgttccagctgatgatttaacagatccagcacctgcaacttcatttgctcacttagatgcaacgaccgtgctttcaagacaaatagctgaaataggcatttatcctgcagtagatccacttgattcaacatcaagaattcttgatccaagaattgttggagatgagcattatagagtagctcgtgaggttcaaaaaattctacaaacatataaatcacttcaagatattattgcaattttaggtatggatgagttatctgaagaggacaaattagttgttgcaagagcaagaaaaatccaaagatttttatcccaacctttttttgtagcagaagtatttacaggatcaccaggaaaactcgttgatttagaatcaacaatcaaaggatttgatgcaatttgtaaaggagaatatgatcatttacctgaggcagcattttatatggttgggacaattgaagaagcgatagaaaaagctgaaaaaatgaaaaaagatgctgctgcttaa

SEQ ID NO: 273641 - DNA, 808 bp, Unknown
  Bacterial polypeptide expressing nucleotide sequence isolated from the Sargasso Sea
cgaggtgcagcagctcctcggtgaccaccgcatccgtgctgtggcgatgagcaccaccgacggtctggtgcgcggcatggaagccctcgacaccggtgctccgatttctgttcccgtcggcgagggcaccctcggacgcatcatgaatgtgctcggcgatcccgttgacgagcagggtcctgtcaaggccgacaccacctcccccatccaccgcggtgctcccaagctgactgagctggagaccaagccgaaggtgtttgagaccggcatcaaggtgattgacctgctggccccttatcgccaaggcggcaaggtgggcctcttcggtggcgccggtgtgggcaagaccgtgctgatccaggagctcatcaacaacatcgccaaggaacacggaggtgtgtccgttttcggcggcgtgggtgagcgcacccgtgaaggcaatgacctctacgaggaattcaaggattccggcgtgatcaacgccgaagacctgtccaagtccaaggtggccctctgctacggccagatgaatgagccccccggcgcccgtatgcgcgtgggtctctcagccttgaccatggccgagcacttccgtgatgtgaacaagcaggacgtgctcctgttcgtcgacaacatcttccgctttgtgcaggctggctctgaagtgtccgcactgctgggccgcatgccttctgcagtgggttatcaacccaccctgggcaccgacgttggtgagctgcaggagcgcatcacctcaacccctggaaggttccatcacctcgattcaggccgtctacgtccctgctga

SEQ ID NO: 273642 - DNA, 745 bp, Unknown
  Bacterial polypeptide expressing nucleotide sequence isolated from the Sargasso Sea
atgttaaatattcgtcctgatgaaattagtagtattattaaacagcaaattgaaaactataaacaagagaaaccttcaacaacggtaggaactgtgttacaagttggagatggtattgctcgtatttatggtttaaataaagttatggcaggtgagctgttagactttgaagatggtactattggaattgctctaaatttagaagtagataatgttggtgctgtattaatgggtgatggtttgtctattcaagaaggcagtaaagtaacagctactggaaaaattgctcagattcctgtaggtgaaaattatcttggtcgcgttgtggatgctttagcacgtccaatcgatggaaaaggtgaaattagtactacagaatctcgtttaattgagtcaccagctcctggtattatttctcgccgatctgtttatgaaccaatgcaaacaggtttaattgccattgatgcaatgattccaattgggcgagggcagcgagaattaattattggtgatcgtcaaacaggtaaaacagctgtagctattgatactattttaaaccaaaagacaacaggtgtaatttgtatttatgttgccatcggacaaaaggcatcatcagttgctcaaattgttactaatttagaggaacgtggtgcaatggattatacaattattgtttccgaaactgcaaattctccagctcctcttcagtatttagcaccaatatactggagctacattagctgaa

SEQ ID NO: 273643 - DNA, 841 bp, Unknown
  Bacterial polypeptide expressing nucleotide sequence isolated from the Sargasso Sea
gtttccgcaaccgcctcagaacctgctcccctgcaattcctggcaccctattccggtgtcagtatgggtgaatatttccgggataaagggaaacatgttctttgtatctatgacgacctttccaaacaggccgtggcatatcgacagctttctctgttgctgagacgaccccctggacgtgaagctttccccggtgatgttttctacctccacagcaggcttctggaaagggcctgtaaactcaatgaagaaaatggttccggatctcttaccgcactgcctattattgaaacccaggccggtgatgtttccgcttatatcccaacgaacgttatttcaatcactgatggacaaatattcctcagtaccgatcttttcaactccggaatccggcctgccatcaacgtcgggctttcggtttccagggtaggcggcgctgctcaagtcaaagccatgaaacaagtcgcaggcaccttgcgactggacctggcccagtttcgtgaaaaagaagccttcgcccagttcggcagtgatctcgacaaagctacccaacagcaactcgcgagaggagttcggcttgttgaaaccctgaagcaacccgaatacaatcccatgccttgggaagagcaggtgatcactatttttgcggcaaccaaaggatatctggatggatttcccctgagcgaaattcagcgctttgaagagggattcttatccctaatgaaatccaagcactctgaactgatgaagcagatttcagatgatctttcgatcagtgatgactcttcttctaaattggtgtcggttcttgacgaatatgtgaaatcatttgccgcatgat

SEQ ID NO: 273644 - DNA, 853 bp, Unknown
  Bacterial polypeptide expressing nucleotide sequence isolated from the Sargasso Sea
gatggcctccctgaaggacattcgtaaaagaatagatagcgtcaaaaaaacccagaagacgaccagcgccatgaatatggtgtcggccgccaagttgaaaagggctgagaataatatccgaagcgccatcccttattcagacaaactgaaagaagtagtttcttccctgagaagtcgattatccgacgaggaaaatccgttgtttcaggaaaaggacggtgaaaagactgcggtcattctcatcaccagcgacagaggactttgcgggggattcaataccaacctctgcaaaagggtgctggaacaatttggagatattccgactgatcgtctgaccatgaccatgatcggccgcaaggggtttgattacttcaaacgacgttcctatgaaattttgggcaattttcaggaaacacgtccagaagaccaaatcaatgtggtacgtgaggtcatcagccagtgcatcaggcgctatgaaaatgatgaattggataaagtatacctagcctacaaccattaccgcagtgtcatcagccagaaaccggttatcgaacagttgattcccattccaaaaattgaaacggaaagtccggatgaaagggaagtttcctttgaaccctcacctgaagcgatccttgatcgtttgctggataaatttctagaaaaccgtgtctatgtaagttggcttgacagcaatgcaggagaacacgcagcaaggatgacagctatggactcagcgaccaaaaatgccggggatatgatcgataaactgcaactgaaatacaaccgaacacgtcaggctgcaatcactactgaattgattgaaatcatcagtggtgcagaaagtatgtaa

SEQ ID NO: 273645 - DNA, 1110 bp, Unknown
  Bacterial polypeptide expressing nucleotide sequence isolated from the Sargasso Sea
catgaatacagggaaggtggtacaggtgttgggtccggtcgtggacgttatttttgaagatggggagttgcccgaaatattcacggcccttgaaatcaacactgagtctacaggaaaactgatttgtgaagttcaacagcatcttggtgaaaacaccgtgagaacggtttccatgggagccactgaagggctatcccgtggtattgatgtcaaagatcttggatctcccattaccacccctgttggaaaagcatctcttggaaggatcattaacgtcacaggagatccggtagatgaagcaggtccaatcgaggccgatcaacgctggcccatccaccgtgagcctccgacttttgaggagcaggaaacggatgcagacatcctggttaccggaatcaaggttctggacctgctctgtcccttcctgaaaggagggaaaattggcctcttcggaggggcgggggttggcaagacggtggtgatcatggaattgatccgaaacattgctgcagagcacggaggattttcagtatttgccggagtcggtgaaaggacccgtgaaggaaacgatctttggaacgagatgaaggagtccggagttctggataaaaccagtttggtttatggtcaaatgaatgaacctcccggagcacgagcaagggtcgcattgaccggtttgactgtggcagaatattttcgtgatgaagagggagcggacgtattaatgttcatcgacaacattttccgtttcacccaggctggctctgaagtttctgcattgcttggaagaattccagcagcagtagggtatcagccaaccctttccacagaaatgggtaacctgcaggaacgcatcacttcgacgaaaaaaggttccattacttcggtacaggccatttacgtccccgcagatgatctgacagaccctgctccggcaaccacgttttctcaccttgacgcaacagtggttttaaaccgttcaattgctgaacttggcatttaccctgccgtcgatccgcttgattccacttcccggattcttaccgcggacattctaggagaagagcattattcagtcgccaatgaggtccagcaacttctccaacgata

SEQ ID NO: 273646 - DNA, 1540 bp, Unknown
  Bacterial polypeptide expressing nucleotide sequence isolated from the Sargasso Sea
aatggatattcgtgcagcagaaatatcaacaatattaaaagatcaaattgaaaactttggagcagaagccgaagtgacagaggtaggtaaagttttatctgttggtgacggaatagctagagttcatggtttagaccaagttcaagcaggtgaaatggtggagtttcctggtggcattgctggcatggctttgaacttagaaagagataacgtgggtgtcgttatctttggaagtgataagactattaaagaaggtgatgttgtaaagcgaacgggttctatagttgatgttcctattggcaaaggacttcttgggagagtagttgatgcattaggtaatcccattgatggaaaaggtacattaaaaaatgttaaaaggacaagagttgagtcaaaggcccctggtattatgccaagagaatcagtaagtgaaccaatgcaaactggacttaaggccatcgattcattaatccctgttggtagaggacaaagagaacttattattggtgacagacaaaccggcaagacagctatagctatagataccttcttaaatcagaaaagtactaatgataaggcaggcaaagacgatactaaaaaattattttgtatatatgtagctgttggccaaaagagatcaactgtagcccaaattgttaaaactttagaagaaagaggagccctagaatattcaattgtggtagcagctactgcttcagaccctgcaccaatgcaatttctagcaccttattcagcagctgctatgggtgagttttttagagataatggaatgcatgcagtcgttgtatatgacgatttatctaaacaagccgttgcatatagacaaatgtcacttcttttaaggagacctccaggaagagaagcttatcctggtgacgtattttatttacattctcgtttattagaaagggctgctaaattaaatggagataatgggtctggtagtttaacagcactcccaataatagaaacgcagggaggagatgtttctgcctttataccaactaatgttatctcaattacagatggtcaaatatttttagaaactgaattgttttataaaggtattagaccggctgtgaatgtaggtttatcagtttctagagttggatctgctgcacaaataaaagctatgaaacaagtagcaggaacgattaagttagatcttgctcaatacagagaaatggctgcatttgctcaatttgcttctgatatggacgcttctactagacaacttttatctagaggtgaaagattaactgaattattaaagcaatcacaatattcaccaatggaggttgaagagcaagtagctgtgatatttgcgggtgttaagggttatttagatcaaattcctacacaaaagataggtgagttcgaacaagctcttctacaaaaattaaataccaaaggttctaaggttttagattcaattagaaaagataaagcaatttcagatgataccgaaaaatctcttaaagatactttagatcagttagtaaagaattttcttaattat

SEQ ID NO: 273647 - DNA, 1489 bp, Unknown
  Bacterial polypeptide expressing nucleotide sequence isolated from the Sargasso Sea
catggtatctatacgccctgatgaaatcagttcaatcttaaaacaacaaataactgattatgaccaatctgtaagtgttagcaatgtaggaactgttctgcaaatcggtgatggcattgcaagaatatatggcttagatcaggtcatggcaggtgagttattggaatttgaggatggtaccgaaggtatagctttaaatcttgaagatgataatgttggagccgttttaatgggagaggcacttggtgtccaagaaggaagtaacgttaagtccacaggtaaaatcgcatctgtaccagttggtgaagcgatgcaagggagagttgttaaccctcttggacaaccaatagatgggaaaggtgaaatcccaacaagtgatactaggttgattgaagaaatggctcctggaataatcaagagaagatcagttcatgaaccaatgcaaacaggtatcacatctattgatgcaatgattcctgttggaagaggtcaaagagaattgattattggtgatagacaaactggaaaatctgctattgctattgacacaataatcaaccaaaaaggtcaagacgtagtttgtgtttacgtagctattggtcagaagtcagcatccgtagcaaacatcgtagaggtcttaagagagagaggagccctagattatacagtcgtagttagtgcaggagcttcagaaccagctgctttacagtacttagcaccttataccggtgcagcaattgctgaacattttatgtaccaaggtaaagcaacacttgttatttatgatgatctaacaaaacaagctcaggcttataggcaaatgtctcttcttttaaaaagaccaccaggaagagaggcttaccctggagatgtgttttacttacacagtagattactagaaagagcagcaaaactttctgatgcaatgggagggggttctatgacagctctaccaattattgaaactcaggcaggggacgtttcggcttacattcctactaatgttatttcaattacggatggacaaatattcttgagtgctgatttatttaactcaggattaagaccagctattaatgttggtatttctgttagccgcgttggaggagccgctcagacaaaagcaattaaaaaaattgcaggaactttaaaattagaactcgcacagtttgatgaactagctgccttttctcaatttgcatctgatcttgatgaagcaactcagcaacaacttgaaagaggtaaaagactaagagagttgttaaagcaacctcaattctctccgctaaaccttgcagaacaagttgcagttgtttatgcaggagttaaaggtcttatcgatgaggttcccgttgaagatgttactaaatttgcaactgaacttagggaatatctaaagttaaataaagcagaatttatagaagagattcttaaagaaaagaaattaaatgatgggattagaagcgacactcaaagaggtgataaatga

SEQ ID NO: 273648 - DNA, 999 bp, Unknown
  Bacterial polypeptide expressing nucleotide sequence isolated from the Sargasso Sea
gcaaaggtggtaaaataggcttatttggtggcgcaggagttggaaaaacagtaattattatggaattaattaataacatcgcaaaagcacatggtggcttttcagtttttgcaggagttggagaaagaactagagaaggaaatgatctttatcacgaaatgatagagtcgggtgtaattaaacccgaaggaccaggatcaaaagcagcattagtttatgggcaaatgaatgaaccgcctggcgcaaggtcaagagttgcacttacaggattaacagttgcggaatattttagagatcaagaagggcaagatgtacttttttttgtagataatatttttagattcactcaagctggttctgaagtatcagctttattaggaagaatcccttcagcagttggataccagcctaccctggcaactgacatgggaaacctacaagaaagaattactacaactaataaaggctctattacctctgtacaagcgatatatgtacctgcagatgacttaactgatccagcacccgcaacttcttttgcacacttagacgcgacaaccgtgctatctagacaaattgcagaacttggaatttacccagctgtagatcctttagattcaacttctagaattttagatccaagaattgttggagatgaacattatagagttgcaagagaagttcaaaaaattcttcaaacatataaatctttgcaagacattattgctattttaggtatggatgaattgtcagaagaggataaattaattgttgctagagctagaaaaattcaaagatttttatcacagccattttttgttgcagaagtttttactggttctcctggaaaattagttgatttagagtctacaatcaaaggatttgatgcaatttgtaaaggagaatatgatcatttaccagaggcagcattttatatggttggtacaattgaagaagcaatagaaaaagctgaaaagatggctaaagatgttgcctaat

SEQ ID NO: 273649 - DNA, 1084 bp, Unknown
  Bacterial polypeptide expressing nucleotide sequence isolated from the Sargasso Sea
atggctaacaatttaactggaaaaatatcacaagttctcggagctgttgttgatgtagagttcgatggtgaacttcctgcaatcatgaacgctctagaagttgacaacaacggaacaagattaatgctagaggttgctcagcatttaggagaaaatgctgttcgtacaattgctatggatacaacagatggactagttagaggtcaaacagctactgatacaggcgcccctatttcaatgcctgtaggcccggaaactctaggtagaattatgaatgttgtaggagagccagttgacgaaagaggcgacattggaacaagtaaatcttatcctattcatagaccagcgccagagtttgttgatcaatctacagaaactgaagttctggtaacaggaattaaagtggttgatctactagcaccttatgcaagaggtggtaaaatcggattatttggcggagccggagttggtaagacagttttaattatggaattaattaacaacattgccaaggctcatggaggatattcggtatttgctggtgtgggagaaagaacgcgtgagggtaatgacttgtaccacgaaatgattgaatcaggaattattgacttaaaaggaaaagattcaaaagttgcacttgtttatggtcagatgaatgaaccaccaggagcaagagctagagttgctctttcaggattaactcaagcagaatactttagagatgaagaaggtcaggatgtgttattttttgtagataacatatttagatttacccaggcaggctctgaagtgtcagctcttctaggacgtatcccatctgcagttggatatcagccaacacttgcaacagatatgggtgctttacaagaacgaatcacaactacaaaaaaaggatctattacatcagtacaggcaatatatgttcctgcagatgacttaactgatcctgcacctgcaacatccttttcacatttggatgcaacaacagttctaaatagagctatctctgaaaaaggaatatatccagcagttgatccattagactctacttctagaattttagatccacaagttgttggtgatg

SEQ ID NO: 273650 - DNA, 1270 bp, Unknown
  Bacterial polypeptide expressing nucleotide sequence isolated from the Sargasso Sea
agaactgggaagtattgtagatacaccagtaggaaaagaattactaggaagagtagttgatggtttaggaaatccgattgatggtaaaggatctttagacaaaggagtcaaaaaaagtagggttgaagttaaagctccaggaattattcctagacaatcagtaagtgagccaatgcaaactggattaaaatcaattgatagcctcgttccaattggaagaggtcaacgtgagttaataattggtgatagacaaacagggaaaactgcagttgctatagatactattattaatcaaaaaaaaatcaatgagtctggtgatgaaaaacaaaaactgtattgtatatatgttgctgttggacaaaaaagatcaacagtaagacaaattcaaaaaactttagaagaagctggtgcaatggaatatactacaattgttgcagcaacagcatctgactcagccccattacagtttttagctccttacacaggttgtgctatgggagaatattttagagataatggaatgcatgcattaattatttatgatgatctatcgaaacaagcagttgcatatagacaaatgtcattaattttaagaagacctcctggaagagaagcatatcctggagatgttttttaccttcatagcagattacttgaaagagctgcaaagttgggcgatgatcatggtggaggttcgttaacagcactaccaattatcgaaactcaaggaggtgatgtatctgcatatattccaactaatgttatttcaattactgatggacaaatttttttagagacagaactttttaaccaaggaattagaccagcaattaatgttggattatcagtttctagagttggatctgcagctcaaacaaaagcaatgaaaaaagtatcaggttcaatgaagcttgaattagcccaatatagagaaatggccgcatttgctcaatttggttctgacttagatgcatcaacccaacaacttttgaatagagggtctaaattaactgagctattaaaacaaaaacaatacacccctatgaccgtagcagaacaggtaatatcagtattctgtggagtaaaaggttatcttgatgatattgatttaaaagatattgctgagtttgaaatcaagataatagagagatgcaaatcagataaacctgatattattgactcaattttaacttcaggaaaattagaggaaaatccagaaaaaagtttaattgaagtaatcactaatcttaaaaaaacatttaaatcttaa

SEQ ID NO: 273651 - DNA, 661 bp, Unknown
  Bacterial polypeptide expressing nucleotide sequence isolated from the Sargasso Sea
atgaaaattcgagcagaagaaatcagtaacatcatccagcagcaaatcgaaaatttcgagaagcagaccaccaaaaccgaagtaggaaccgtcttggaagtcggtgatggaatcgcacgagtctatggacttgacaatattgttgccggcgaacttgtggaattccccaataaccttcaaggcatggccctcaatctggaagaggataatgtcggtgtcgtgctttttggtgatgaccgaaacatcaaggaaggtgacgaagctcgacgaaccgagcgtattgccgaagttcctgtcggcgatgccatgctcggtcgggttgtggaccctcttggacaaccgattgatggcaagggccccattgagacctcagaaagccgaagagttgaagtcattgctccgggtattgtcacacggaagtcggtgcatgaacctcttcagacaggtctcaaggcaatcgactcgatggtcccgattggacgcgggcagcgggagttgatcattggcgaccgccaaacagggaagaccgccatcgcgatggataccatcatcaaccaaaaagggggtgatgtggtctgcatctacgtaggaatcggtcagaagcgttcaactatggcgaagattgtctcaaaactccaggagtatggcgcaaggaatacac

SEQ ID NO: 273652 - DNA, 1105 bp, Unknown
  Bacterial polypeptide expressing nucleotide sequence isolated from the Sargasso Sea
aaatcttatcctattcatagaccagcaccagagtttgttgatcaatcaacagaaaccgaagttctagtaacaggaattaaagtggttgatctactagcaccttatgcaagaggtggtaaaattggactatttggtggtgctggagttggcaagactgttttaattatggaattaattaataacattgcaaaagctcatggaggatattctgtatttgcaggtgtaggtgaaagaactcgcgagggtaatgatttgtaccacgaaatgattgagtcaggaattattgacctaaaaggtaaggactcaaaagttgcacttgtttatggacagatgaacgaaccaccaggagcaagagctagagttgctttatcaggattaactcaagcagaatactttagagatgaagaaggtcaggatgtgttattctttgtagataatatctttagatttactcaagcaggatctgaagtgtcggccctcttaggtcgtattccatctgcagttggatatcaaccaacacttgcaacagatatgggtgcattgcaagagcgaattacaacaacaaaaaaaggatcaatcacatcagtgcaggcaatatatgttcctgcggacgacttaacagatcctgcacctgctacatccttctcacacttagatgctacaacagttctaaatagagctatttctgaaaaaggaatatatccagcagttgatccgttagattctacttcaagaattttggatccacaagttgttggtgatgatcactacagagtagccagagaagtgcagagagttttacaaacttataaaagtcttcaagatattattgctattttaggaatggatgaactctcagaagaagataagctaacagttgcgagagctagaaaaatagaaaagtttttgagccagccatttttcgtagcagaggttttcactggttctccaggtaaatatgttgatctcgaagatactattaagagttttgatggactggtaaaaggagaatacgatcacatgccggaagcagcattttatatggtaggcggcatagatgaagcaattgaaaaagctaaaaaattagaagctgaagctgcataat

SEQ ID NO: 273653 - DNA, 1222 bp, Unknown
  Bacterial polypeptide expressing nucleotide sequence isolated from the Sargasso Sea
aaatttgatggggaattaccagaaattttaactgcactagaatgtaataatgctggcaacagacttgttttagaagttgctcagcatttaggagagtcaagtgtaagaacaattgctatggacgcgacagaaggtttaaaaagaggtgatgaagtgacagatactggttcaccaataaaagttccagttggacctgaaacacttggaagaattgttaatgtaataggtgaacccatagatgaaaaaggtgaggtaaaaacaaaagagagctggcctattcatagagcagcacctgagtttaatgatcagtcaacagaaacagaaattttagtaactggaattaaagtagtagacttattagcaccatatgcaaaaggtggtaaaataggtttatttggtggagctggtgtaggaaaaacagtaataattatggaattaattaacaatattgcaaaagcacatggtggtttttcagtttttgcaggagttggagaaagaactagagagggaaacgatctttatcatgaaatgatagaatcaggagtaattaaacccgaggggcctggatctaaagccgcattagtatatgggcaaatgaatgagcctcctggagcaaggtctagagttgcacttacaggacttacagttgcagaatactttagagatcaagaaggccaagatgttttattttttgttgataatatatttagatttactcaagcaggttctgaggtttctgcactattaggaagaattccatctgcagtaggttaccaaccaactttggcaaccgatatgggaaatttacaagaaagaattactacaactaataaaggctcgattacatctgtgcaagcaatatatgtcccggctgatgatttaactgatccagcaccagccacatcttttgctcacttagatgctacaactgtactatcaagacaaattgctgaacttggaatttatccagctgttgatccattagactctacttctaggattcttgatccaagaattgttggtgatgaacattacagagttgcaagagaggttcaaaaaattcttcaaacatataaatctttacaagatattattgcaattttaggcatggatgaattgtcggaggaagataaattaattgttgcacgagcaagaaaaattcaaagatttttatctcagccattttttgtggcagaaagtatttacaggttctccaggtaaa

SEQ ID NO: 273654 - DNA, 976 bp, Unknown
  Bacterial polypeptide expressing nucleotide sequence isolated from the Sargasso Sea
atggaaataaatccttcagaagttacaaaaatattaaaagaacaaattaaaaattttggtgataaagcagaagttacagaagtcggtcaagttttatcagttggagatggtattgctaggatttatggattggataatgttcaagctggtgaaatggtagagtttgcggatggctctaaaggtatggctcttaacctagaaagtgaaaacgttggtgttgtaatttttggtgatgatagaaatgttaaagaaggtgatgtagtaaaaagaactggtaatattgttgatactccagttggaaaagaattattaggcagagtagttgatggtttaggaaatcctattgatggtaaaggaccattagacaaaggtattaaaaaaagcagggtagaagtaaaagctcctggtattattcctcgacaatcagttagtgaaccaatgcaaacaggtcttaaatcaattgatagtttagttccaattggaagaggacaaagggaattaatcattggcgacagacaaactggaaaaacagctgttgcagtagatgcaattattaatcaaaaaaaaatcaatgagtctggtgacgaaaaacaaaaactttattgtatatatgttgcggttggacaaaaaagatcaactgtaagacaaattcaaaaaactttagaagaggcgggcgcaatggagtacacaacaatcgttgctgctacagcatccgactcagctcctttacagtttttagcgccatatacagggtgcactatgggtgaatattttagagataatggaatgcatgcattaataatttatgatgatttgtcgaaacaagcggttgcttatagacaaatgtctttattattaagaagacctccgggacgtgaagcttatccaggagatgtattttacctacatagcagattgctagaaagagcagcaaaattaagtgacgaacatggcggtggttcacttacagcacttc

SEQ ID NO: 273655 - DNA, 717 bp, Unknown
  Bacterial polypeptide expressing nucleotide sequence isolated from the Sargasso Sea
tatgagcaagggaattattacacaagttataggagcagtagtagatgttaagttcgaaggagaacttccagaaattttaacagcgttggagtgtaaaaatggtgacaatagattagttctagaagttgcacaacatttgggtgagtctacagcaagaactattgcaatggatgctacagaaggtttaaaaagaggtgatgaagtaataaatactaaagcacctataaaagttccggtcggaccagaaactttaggaagaattattaatgttgttggagaaccaattgatgaaagaggtgatgtaaagactaaagaaagttggcctatccatcgacctgcacctgaatttaatgatcaatcaactgaaacagaaattttggttacaggtataaaagtaatagatttgttggctccatatgcaaaaggtggaaaaattggattattcggaggcgcaggagttggaaagacagttttaattatggaattgattaacaatgttgcaaaggcccatggaggattttctgtttttgctggtgttggggaaagaactagagaaggaaatgatctttatcatgaaatgatagagtctggagtaattaaaaaagaaggttctggatcaaaagctgcattagtttatggtcagatgaatgaacctccaggagcaagagctagagttgcacttactggacttacagttgcagaatatttagagatcaa

SEQ ID NO: 273656 - DNA, 1546 bp, Unknown
  Bacterial polypeptide expressing nucleotide sequence isolated from the Sargasso Sea
atggaagaattaaacccctcagaaataagtcaggttataaaacaaaagatagatgcactcgatacgtcggccaagccaagcaacgaaggcaccgtagtatttctggcagacggaatagcaagaatccatggcttaggagaggtcatgaatggagagctgatagagtttgatcatggggtgatgggcatggctcttaacctagaaagagactctgttggagcggtgattttaggagattataagcttttggctgaaggaagctccgcaaagtgcacaagtagaatattggaagtgccagttggagaggcccttcttggcagagttgtagattctctcggagctccaattgacggcaagggagagattaagaccacagaaactgcaccagtagaaaaggtggcgcctggagttatctcaagaaaatcggttgaccagcctgtgcaattagggatcaaggcggttgacagcatggtgcccataggtaggggccaaagagagttgattatcggtgataggcaaactgggaaaacggccatagcaatagatgcgataatcaaccaaaaagatacaggcgttaaatgtatttacgtggccgtgggacagaaacagtcctctattgcacaagtggtgaggactttggaagaatatggagccatggaaaatactattgtggtggcagctgctgcggctgacccagctcccatgcaatacatagcacccttttccgcctgctctatgggcgaatattttagagacaggggtgaagacgcccttattatttatgatgacctatcaaagcaggcggttgcttatagacaaatgtccttgttattaagaaggccgccaggaagagaggcttatcctggagatgttttttaccttcattcaaggttgctagaaagagcggccagagtaagtgaagagtatgttgaaagctttaccgaaggaaaggttaagggtaaaacaggctctttaacagccctgccaattattgaaacgcaagcgggcgatgtttctgcctttgtccccactaacgttatatctattacggatggtcaaatatttttagaatcttcactttttagctctggacttaagcctgctatggatccaggaatctccgtatcaagagtaggaggagccgcacaggttcctattataaaaaaattgggaggtggtataaaaacagcattagctcaatacagagagcttgaagcttttgctcaattcgcttcagatttagatgaggcctctaaagaacagctagaacatggagtaagggttacagagctaacaaagcaagaccaattttcgccaatgtctgttgcagagatggggttgatgcttttcactgccaacgaaggctttttaagagaagtagaggtagagaagattaaagactttgaaaaggccttaatttcttatatgaatgcggagcataaagacttgatggatcgtgtttctgagaccggcgaatacaatgatgaagtcgaaggcgcctttagagaggctttagataaatttatgtcaactcaaacttggtaat

SEQ ID NO: 273657 - DNA, 1005 bp, Unknown
  Bacterial polypeptide expressing nucleotide sequence isolated from the Sargasso Sea
cggtcgcaattgacactataattaatcagaaaaaaataaatgaatctaatgatgaaaaacaaaaattatattgtatttatgtagcaattggccaaaaaagatcaactgtcagacaaatagaaaaatctttagaagaggctggggctatggagtatacaacaatagttgctgcaacagcatcagatgctgcaccgcttcagtttttagctccttacactggatgtgcaatgggagaatattttagagacaatggaatgcacgctttaattatttatgatgatttatctaagcaagctgtcgcgtatagacaaatgtcattgttattaagaagaccaccaggaagagaagcttatcctggagatgttttttatttacatagtagacttttagaaagagcagctaaacttagtgatgaacatggaggaggatctctaacagcgctaccaattattgaaacgcaaggtggtgatgtatcagcatttattccaactaatgttatttcaattactgatggacaaatatttcttgagacaaatttgttcaaccaaggaataagaccagcaattaacgttggtttatctgtatctagagttggttcttcagcccaaacaaaagctatgaaaaaagtttctggttcaatgaaattagaattagcgcagtatagagaaatggctgcatttgctcaatttggatcagatttagatgcctcaactcaaaaattgttaaatagaggctctaagctaactgaacttttaaaacaaaagcaatattcaccaatgactgttgcagaacaagtcatttcagttttttgtggtgttaaagggtatttggatgacttagatcttaaagatatctcatcatttgaaacaaaaataattgaaaaatgtaaatctgaaaaaccagaaattttggaaggaatttcaaaatctggaaaattagaagaagatactgaaaatttattagtggaaactattaaagaattgaaacaaaactttaactcttaat

SEQ ID NO: 273658 - DNA, 529 bp, Unknown
  Bacterial polypeptide expressing nucleotide sequence isolated from the Sargasso Sea
atgagaaaaggaaaaattacacaggttattggagcagtagtagatgttaaatttgatggagagttacctgagattttaactgccttagaatgcaacaacagtggcaacagacttgttttagaagtcgcacagcacttaggagagtcaagtgctcgaacgattgcaatggatgcaactgaaggactaaaaagaggagacgaagttactgatactggttctccaattaaagttccagtcgggcccgaaacattaggaagaattgtcaatgttataggtgaacctattgatgaaaagggtgaagttaaaactaaagaaagctggcctattcatagagctgcaccagagtttaatgatcaatcaactgaaacagaaattttagtaactggaataaaagtagtagatctattagcaccctatgcaaagggaggtaaaattggtttgtttgggggtgcaggagttggaaaaacagtaattattatggaattaattaataatattgcaaaagcaccatggtggcttttgcaatatt

SEQ ID NO: 273659 - DNA, 1423 bp, Unknown
  Bacterial polypeptide expressing nucleotide sequence isolated from the Sargasso Sea
atgacagataatataggaaaagtaacacaagttattggaccagtagtagatatccagtttgagggggatctacctaatattttggatggtttagaaatcgataattctggtgaaaggctagtattagaagttgctcagcatttaggtgaaaaaactgttagagcaattgcaatgtctgcaactgatggcttagtaagaggaaaggaagttaaagctactggaaaacctatttcagttcctgtagggccagaaatgttgggaagaattgttaatgtaataggtgaaccagttgatgaaagaggtccagtaaaaacaaagtcttcttatcctattcataggtctgctccatcatatacagatcaatcaacagagtctgaagttttagtaactggtattaaagttgttgatttattagcaccatatgcaaaaggaggaaaaattggactttttggaggtgctggtgttggaaaaactgttttaattatggaattgataaataatattgctaaagggcatggaggatattcagtttttgctggtgtaggagaaagaactagagaaggtaatgatttatatcatgaaatgattgaatctggtgttatagatttaaagggtgatcaatcaaaagctgcattagtttatggtcaaatgaatgaacctcctggagcaagatctagagttgcattatctggtttaactatggctgaatactttagagatgaagaaggtcaagatgttttattttttgttgataatatttttagatttacgcaggcaggttctgaggtttctgctttgttaggtcgtatcccttctgctgtgggttatcagcctacattagcaactgatatgggtacccttcaagaaagaatcacatctacaaaaaaaggatctattacttctgtacaagctatatatgttccagcagacgatttaaccgatccagcacctgcaacttcatttgcccatttggatgcaacaactgttttatcaagacaaatagctgaattaggtatttatcctgcagtggatcctttagattccacttctaggattttggatcctagagttattggtgaagagcattacaatgtagctagagatgtacaaagtattttgcaatcatacaaatctttgcaagatattattgctattcttggtatggatgagttgtcagaggaagataaattagtagtgagtagagctagaaaaattcaaagattcttatctcaaccattccatgttgcagaagtattcactggctctccaggaaaatttgttgaactagaagatactattaaaggttttaaagctttgtgctctggtgaatatgatcatcttcctgaagcagctttttatatggtaggaactatggaagaggctgtagagaaagcaaaaacaatggaagaagaagctgcataaa

SEQ ID NO: 273660 - DNA, 593 bp, Unknown
  Bacterial polypeptide expressing nucleotide sequence isolated from the Sargasso Sea
aatggaaataaatccttcagaagttacaaagatacttaaagagcaaattaaaaactttggagataaggcagaaataacagaagttggtcaagtactatcagttggtgatggtattgctaggatttatggtcttgataatgttcaagctggtgaaatggttgagtttgctgatggttcgaaaggcatggctttaaatttagagagtgaaaatgttggggttgtaatttttggtgatgatagaaatattaaagaaggtgatattgtaaaaaggactggaaatattgtcgatactccagttggaaaagaattattaggaagagttgttgatggattaggaaaccctattgatggcaaaggtgcactagataaaagtgtgcaaaaaagtagagtagaagttaaagcaccaggtattattccaagacaatctgttagtgagccaatgcaaactggattaaaatcaattgatagtttagtacctattggaagaggtcaaagagaattaattattggtgatagacaaacaggtaaaactgcggttgcaattgatgcaattattaatcaaaaaaaaattaatgagtctgggagaaaaacaa

SEQ ID NO: 273661 - DNA, 1061 bp, Unknown
  Bacterial polypeptide expressing nucleotide sequence isolated from the Sargasso Sea
catgtatggtgagctgatagagtttgaaaacggtgttcttggattggcactaaatctagagcaagattctgtaggagcagtagttttaggagattatttgggactaatcgaaggccagaaagctgtttgtactggaagaattttagaggttccagtgggcgaagagttactaggtagagttgtagatgccctgggcagccccattgatggtaagggagaaattaaaacagagatgactgctccagtagaagttgtagcccccggtgtgattgccaggcagtcagttgatcaaccggttcaaattggtttaaaagcagttgatgcaatggtaccaattggtcgaggtcaaagagagcttattattggcgacagacaaaccggtaagaccgctgttgcggttgatgcaatcatcaatcagaaaggaacaggtatcaaatgtatatatgttgctattggccaaaaacaatcaaccgtcgttaatgttgttaaaaagcttgaagaacatggagctctagaacatacaattattgtctcagcatcagcatctgatcctgcgcctatgcaatatctttccgcatactcaggttgttcaatgggtgaatattttagggataaaggtgaagatgcattgattgtttatgatgacctctctaaacaagccgttgcatatagacaagtatctttacttttaaaaagacctccaggaagagaggcttaccctggagatgttttttatcttcattcaagattgctagaaagagccgccagggtgaatgctgattatgtagaaaaagctaccaacggaaaggtgaaaggaaaaactggatctttaaccgcacttccgattatcgaaacacaagcaggagatgtttcagctttcgttccaaccaacgttatatcaattaccgacggtcaaattttcttggaaactgacctttttaattcaggtattagacctgctattaatcctggtatttctgtttctagggtaggaggagcggctcaaactaagattatgaaaaaactaagtggaggcgtcagaaccgcattagctcaatata

SEQ ID NO: 273662 - DNA, 1399 bp, Unknown
  Bacterial polypeptide expressing nucleotide sequence isolated from the Sargasso Sea
aatgagcaatggtttagtaacacaaattatcggagcagttatcgatgttgagtttgaaaaaaacaacattcctcaagtatacgaagctatcaaaattacagatacaggtacagtgcttgaagttcagcaacaacttggtgatggaattgtcagagcaattgcgatgggaactactgaaggactaaaaagagggttaaccgctgaacgaaccaatgctcctatttctgtcccggtgggtgaaaaaacgcttggtcgaattatggatgtattaggcaatcctattgatgagtgtggtccaattggtgaggatgagcaaatgcctattcacagaaaaccacctagctatatggaccaatctttatcagatgatcttttagagacaggtattaaggttattgatttaatatgtccgttcgcaaaaggtggaaaaattggtttatttggaggagcgggtgttggtaagaccgtgaacatgatggagctaattaataacattgcaactgagcactctggactttcagtttttgctggagttggcgaaagaacccgagaaggcaatgacttttattatgaaatgcaagaatcgggcgtggttaatgttgagaagccgagcgaatctaaggttgccatggtttatggacagatgaacgagcctcctggaaacagacttagagtggctctaactggcttaacaatggctgaaaagtttagagacgaaggaagagacgtcctattatttatcgataatatttatagatatactttggctggagttgaagtttctgctctgttaggcagaatgccttcagctgttggataccagccaacattggctgaagaaatgggtgccttgcaagaaagaatcacctcaacaaaggatgggtccattacttcaattcaagctgtttatgttcctgctgatgacttaactgatccatctccagcaactacgtttgcacacttagacgcaaccgtcgttctttcaagacaaattgccgagcttggaatttatccagcggtagatccattagactcaacaagtaggcagttagatcctctagtggttggagaggagcattataatgttgcccaaggcgttcaaggtgttctccaaaaatataaagagctcaaagacatcattgctattttaggcatggatgaattatctgaagaagacaagcttgcggtggcaagagctagaaaggtcgaaagatttctttctcaaccatttaccgttgcagaagtttttactggttctcctggaaaatatgtcaagttagaagacaccatcaaatcatttaaaggcattctagctggagattatgatgatcttccagagcaagctttttatatggtaggaacaatcgaagaagcagtagaaaaggctaaaactttataa

SEQ ID NO: 273663 - DNA, 1166 bp, Unknown
  Bacterial polypeptide expressing nucleotide sequence isolated from the Sargasso Sea
tcatagggaagccccaccatttgaacaactttctacttcaacagaagttttatttactggaattaaagttattgatttgattgagccatatgcaaaaggtggaaaaattggtctttttggaggtgcaggtgttggtaaaactgttctgattcaggagcttatcaataatatagcaaaaggacatggtggattatctgtttttgctggtgtaggtgaaagaactagagaaggaaacgatttgcttcgtgaaatgttagaatcgggaattattgactatggtaaagaatttatggaatctatggaaaatggtggatgggatctaagtaaggttgataaaaaagcattagagaactcaaaggcaacatttgtttttggccaaatgaatgaacctccaggagctagagctagagtagctctttctggattgacagtagcagagtattttagagatggaagtggtgatggacaaggaaaggatgtattattctttgttgataatattttcagatttactcaagcaggttcagaggtttcagctctattaggtaggatgccctctgctgttgggtatcaaccaacattagctactgaaatgggtgcaatgcaggaaagaattacatctacaaaaaaaggatcaattacatcagtacaagcagtgtacgtcccagcagatgacttaacagatccagcgccagctactactttttctcacttagatgcaaccacagtattgtcaagaaaaattgcggaattaggtatttatccagctgtagatcctcttgattctacatctagaattttaacacctgaaattcttggtgatgatcattacaattgtgctcaaagagtaaaagaaatgcttcaaaaatataaagaacttcaagatataattgccattctcggtatggaagagctttctgaggaagataaattagttgtttctagagcaagaagagtgcaaagatttttatcacagccatttcatgttgctgaacaatttacaggaattcctggtgtattggttgatattaaagacacaattaaaggttttaatatgattatggatggagagcttgaccatctaccagaagcggcatttaatctaaaaggaactatagaggaggcaattgaagctggtgaaaaaatgattgccgaggctaagtaat

SEQ ID NO: 273664 - DNA, 597 bp, Unknown
  Bacterial polypeptide expressing nucleotide sequence isolated from the Sargasso Sea
ctgtggggtaccaacctactctttctacagaaatggggaatttacaagaacgtattacctcaaccaataaaggttcaatcacatctgttcaggcaatatacgttcctgctgatgatctaactgacccagccccagctactactttttctcatcttgacgcaacggtagtactaagcagagctataactgaactggggatctatcccgcagttgatccactcgattccacgtcacgcattctttctgctgatgttttaggcgaagaccactacaatgttgctcacgaagtacaaattcttcttcagagatacaaagacttacaggacattattgcaatactcggaatggatgaattatctgaagaagacaaagtagtagtaagccgtgctagaaaagtacagagattcctctcacaacctttctttgtagcagagacattcactggaacttcaggagagtatgttgatattaaagacaccattaaaggattcagggaaattcttgatgggaaacatgatgaccttcctgagcaggcgttctatatggtaggaacaattgatcaggtcatggaaaaagcaaaaaaattaagcaattgat

SEQ ID NO: 273665 - DNA, 1543 bp, Unknown
  Bacterial polypeptide expressing nucleotide sequence isolated from the Sargasso Sea
atgacaattaatccaacagaaatcagtgacataataaaagcaaagattaaagaatatgatattaaatcaacagcacataatgagggaacggttgtctctgtttctgatggtatagctataatatatggtataaccgaagcactacaaggcgagatgttagaatttccaaacaaaacttttggcatggctttaaacctagagcgtgattctgttggcgctgttattttaggtgattataaacatatatctgaaggtgataccgttaaatgcactggtagaattctagaagttcctgttggaaatgaattgttgggaagagtagttaattcattaggagaaccaattgataataatggcccgataaattctaaagatacatcaccaatcgaaaaaattgcgccgggtgttattgagcgtaaatctgttgatcaacctgttcaaacagggttaaaatctgttgatgcaatggtgccgataggtcgtggacagcgcgaactaattattggtgataggcaaactggaaaaacagcagtagctattgatgcaattattaaccaaaaagacactggcgttaaatgcatatatgttgctattggtcaaaaagcatcatctgttgcccaagtcgttagaaaactagaagaacatgatgctctaaaacatacaattatagttgcagcaactgcatcagattctgctgccatgcagtacattgctccatatgctggatgcgcaatgggagaatatttcagagacattggtgaagatgctctaattgtttatgatgacttgactaaacaagcatgggcatacagacaagtatcactacttttaaaaagaccacctggacgagaagcatatcctggtgatgtcttttacttacattcaaggttacttgagagatcagcaaggataaatgaggatgctgtgtccgatcttactaaagggaaagttacaggcaaaactggatcactaactgcgttaccagttatcgaaactcaagcaggcgacgtatccgcttttgtgccaactaatgtaatttctattacggatgggcaaatattcctagaatctgatttattcaatgctggcattaggccagctattaatgcaggactatctgtatcacgagtaggcggcgccgcacagacaaaaataattaaaaagctaggaggtggcgttagattagcacttgcacaatatagagaacttgctgctttctctcaatttgcatctgacctcgatgatgccacaaaaaaacaactggatagaggtcaaagagttactgaattaatgaaacaaaatcaatactcgccacttagcgtagcggagatggcactatctttatatgcagcaaatgaaggatattttgatgatgttgaaattaaaaaagtaatggcttttgagagagcgctccatgagtttgcacgatcaaaacataaggatcttctagatatgattaatggttcgttggattataatgatgatatcgcagctaaaatgaaatcaactatggatgattttaaagcaaatggagtttggtagt

SEQ ID NO: 273666 - DNA, 877 bp, Unknown
  Bacterial polypeptide expressing nucleotide sequence isolated from the Sargasso Sea
tatggctagtttagatgatctaaaaaaaagaatttctagtgttaaatctacacagaaaattactaaggctatgaaaatggttgctgcagcaaaattaagaagagcccaagaaaatgctgaaaaaggaagaccttattctgaaaaaatgaataatattattcttaatctatctagtggaatatcagacaaagaaaatgcaccaaaacttcttaccggaactggagaggaaaaaactcatttatgtgttgttatgacatctgatagaggtttatgtggaggttttaatacaaatattattaaaaaagcaaaaaattattttcaaaaaatattaaaagagaacaaaatattaaaaattataactgtcggatcaaaaggttatgatcaattaaaaagacattacaaagaaaatataattgaaaaaatttcatttaaagattctaagaatattaactattttgatgcagataaagtaggaaaaattataattgatagatttgaaaaaaaagaatttgatgtatgtgcaattttttataatcaatttaaaaatgttattactcaaataccacaagaacaacaaattattcctttaaaatctaatgaagaaaaagaaactagctctaataacagttatgagtttgaaccagaggaagatgaaattttaagtaatttattacctaaaaatatttctacacagatttttaaagcaatgttggagaattcagcgagtgaacaaggttcaagaatgagcgctatggataatgcaactagaaatgcaggagaaatggttgataagcttacaattcagtataatagaagtcgccaagctgcaatcaccaaagaactaatcgaaataatatcaggagcagaaagtttataa

SEQ ID NO: 273667 - DNA, 640 bp, Unknown
  Bacterial polypeptide expressing nucleotide sequence isolated from the Sargasso Sea
ttttatttacatagtagacttttagaaagagcagctaaacttagtgatgaacatggaggaggctctttaacagcacttccaattattgaaacacaaggtggcgacgtatctgcttttatcccaaccaatgttatttcaattacagatggacaaatatttcttgaaacaaacttgtttaatcaggggattagaccagcaattaatgttggtttatctgtatctagagttggatcttcagctcaaacaaaagctatgaaaaaggtttctggctcaatgaaattagaattggcgcaatatagagaaatggctgcatttgcccaattcggatcagatttagatgcctcaactcaaaaattattaaatagaggttcaaagttaactgagcttttgaaacaaaaacaatattcaccaatgactgttgcagaacaagtaatttcagttttttgtggtgttaaaggatatttagatgacttagatctaaaagatatatcttcgtttgaaagaaaaattattgaaaaatgcaaatctgaaaaaccagaaattttggaagcgatatctaaatctggaaaattagaagaagatactgaaaatttattagtagaaactattaaagaattaaaacaaaactttaactcttaaa

SEQ ID NO: 273668 - DNA, 892 bp, Unknown
  Bacterial polypeptide expressing nucleotide sequence isolated from the Sargasso Sea
ggagttggtgagcgtacgagagaaggtaatgatctttaccatgaaatgatagagtctggtgttattaaaaaagaaggaaaaggatccaaagcagctctggtatatggtcaaatgaacgagcctcctggagcaagggccagagtagctcttacaggtttaacggttgctgagtacttcagagacaaagagggacaagatgttctttttttcatagataatatttttagatttacccaagctggttcagaagtttctgctttgttaggaagaattccatctgccgttggctatcaaccaacactagcaactgacatgggaaacttacaagagagaattacttcaactggaaaaggatcgattacatcagtgcaagcaatttatgttccagcagatgatttgacagacccagctccggcaacttctttttctcacttggatgcaacaactgttctatctaggcaaatagctgaacttggaatttatcctgctgtagaccctctagattcaacctcaagaattttagatcctagagtagtaggcgatgaacattacagagttgctagagaggtgcaaaaaatactacaggcctataagtctctacaagacattatcgctatattaggcatggatgaactgtcagaggaagataaattgacagtagctagagctagaaaaatacaaagatttttatctcaacctttttttgttgctgaagtttttaccggttcaccaggtaaattagttgatctagagtcaacgataaagggctttgacgccatttgcaaaggagaatatgaccatcttccagaggcagctttttatatggttggatctatcgaagaagcaatagaaaaagctgataaaataaaaaaagagacaaaagttgcataat

SEQ ID NO: 273669 - DNA, 1417 bp, Unknown
  Bacterial polypeptide expressing nucleotide sequence isolated from the Sargasso Sea
tatgaaaaaaggaaaaatcacacaaattattggagcggtagtagatgtaaaatttgatggagaactacctgaaattttaactgcactagaatgtaataatgctggaaacaggctagttttggaagttgctcaacatttaggagagtcaagtgtaagaacaattgcgatggatgcaactgaaggcctaaaaagaggagacgaggttacagatactgcttcaccaattaaagttccagtaggccctgagacattaggaagaattattaatgttattggcgaacctattgatgaaaaaggtgaggttaaaactaaagaaagttggccaatacatagagcggcaccagaatttaatgatcaatcgactgaaactgaaattttagtaactggaattaaagtagttgatttattagcaccttatgcaaagggtggtaaaattggtttatttggaggtgcaggagttggaaaaacagtaattattatggaattaattaataatattgcaaaggcacatggtggcttttcggtttttgcaggagttggagaaagaactagggagggaaatgatctttatcatgaaatgatagagtcaggagtaattaaacctgagggccccggttctaaggctgcactagtttatggacaaatgaacgagcctcctggagccagatcaagagttgcacttacaggcttaactgttgcagaatattttagagaccaagaaggtcaagatgttctttttttcgtagataatatttttagatttactcaagcaggctctgaagtatctgcgttgctaggaagaattccatcagctgtgggatatcaacctacgctagcaactgatatgggaaatttacaggaaagaattaccacaaccaataaaggttcaattacatctgtacaagcaatttatgttcctgctgacgatttaactgaccctgcgcccgcaacatcttttgcccatttagatgcaacaacagtattgtctagacaaattgctgaacttgggatttatccagcagttgatcctttagattcaacttctaggattttagatcctagaattgttggtgatgaacactatagagttgcaagagaagttcaaaaagttcttcaaacatacaaatctttacaagatattattgcaattttaggtatggatgagttgtcagaggaggataagttaaccgtagcaagagcaagaaaaatccaaagatttttatctcaacccttttttgttgctgaagtatttactggatcgccaggtaaacttgtagatctagagtcaacaataaaaggttttgatgcaatctgcaaaggagaatacgaccatcttccagaggcagcattttatatggttggtacaattgaggaagcaatagaaaaagctgagaaaatgaaaaaagatgctgcttaa

SEQ ID NO: 273670 - DNA, 1531 bp, Unknown
  Bacterial polypeptide expressing nucleotide sequence isolated from the Sargasso Sea
tatgactattaatccttcagaagttacaaaactactaaaagatcaaataaaaaattttggtgagaaagcagaagtatcagagataggaaaagttttatcagttggggacgggattgcacgtgtttatggtttagataatgtgcaagctggtgagatggtagagtttgaagacggatcaaaaggaatggcattgaatttagaaaatgataacgttggtgttgtaatttttggtgatgatagaaatataaaagagggcgatactattaaacgaactaacgcgattgtagacgttccagttggcaaagagcttcttgggagagttgtggatggtctaggtgttccaatagatggcaaaggtccgctctcagcgaaaaccagaaaacgagttgaagttaaagctccaggcatcattcctcgacaatctgtaaatgaacctatgcagacaggattaaaatcaatagactcgttaattcctattggcaggggtcaaagagagttaataatcggtgacagacaaactggtaaaacagccgtggctattgatgcaattattaatcaaaaaaaaatcaacgagtcttcagatgaaaagaaaaaattatattgtgtttacgttgcaataggtcaaaaacgttctacagtcgctcaaattaccaaaacattagaagaagctggagcattgaaatatacaacaatagttgcagctacagcatcagactctgcaccactacaatttttggctccttatacaggttgtactataggggaattttttagagacaatggtatgcatgctttaattgtttacgatgatttatcgaaacaagccgttgcgtacagacagatgtctttattgctaagaagacctccaggtagagaagcgtatcctggtgacgtattttatctacacagtagactattagaacgtgctgcaaagttaaacgaaaagagtggcggaggatctttaacagctttacctattattgaaactcaagctggagatgtgtcagcatatatccctactaatgtgatatccattaccgatggacagatctttttagaaacagaactattcaatcaaggtatacgaccagctgttaacgtaggtttatctgtatctagggtagggtctgcagctcaaacaaaggcgatgaaaaaagtagcaggttcgataaaacttgaattagcacaatatagagaaatggctgcttttgctcagtttggttcagacttagatgcttcaacgcaacaattactcaacagaggtgcaaaattgaccgagcttttaaagcaagaccaatattcacccatgacagtagcagagcaagtcatatcagtattcactggagtgaaaggttatttagatgacgtagatttgagcaaaatcaaagattttgaaaaagctataattgaaaaaataaaatccagtaaacctgaaataattgatgcaattcaatcatctggaaaactagatgaagacaatgaaaaaattctttctcaagttatattagaacacaaaaaaagtaataactga

SEQ ID NO: 273671 - DNA, 940 bp, Unknown
  Bacterial polypeptide expressing nucleotide sequence isolated from the Sargasso Sea
tatggaattaatcaacaatattgctaaggctcatggtggtttctcagtttttgcaggtgttggagaaagaaccagagaaggaaatgatctttatcatgaaatgattgaatctggagtaattaaaacagatggcaaaggttcaaaagcagcattagtatatggccaaatgaatgagcctcctggcgctagagctcgtgtagctttaactggacttacagttgcagaatattttagagataaagaggggcaagacgttcttttttttgtcgataatatttttaggtttactcaagcaggatcagaagtttcagctttattaggtagaataccatcagctgtaggttatcaaccaacattagctacagatatgggaaacttacaagaaagaattacatcaactgataaaggttctataacatcggttcaagcaatatatgttcctgcagatgatttgaccgatcccgcgccagcaacttctttttcacacttagatgctaccacagtattatcaagacaaattgcagaaattggtatttatccagcagtagatcctttagattctacctccaggatattagatccaagagtagtcggggatgaacattatagagttgcgagagatgtccaaagaattttacaagcatacaaatcactccaagatataattgctattcttggaatggatgagctttctgaagaggataaattaacagtcgccagagcaagaaagatacaaagatttttatctcaaccttttttcgtagcagaagtgtttactggttctccaggaaaactagtcgaccttgagtccacaataaaaggatttgatgcaatctgtaaaggtgagtacgatcatcttcccgaagcagctttttatatggtaggtggaatagaggaagtaattgaaaaagcagagaaattagctaaagacaacaaataa

SEQ ID NO: 273672 - DNA, 1119 bp, Unknown
  Bacterial polypeptide expressing nucleotide sequence isolated from the Sargasso Sea
tatgagaaaaggacagataacacagattattggagcggtagttgatgtaaaatttgatggagaactaccagaaatattaaccgcattagaatgtgacaatggagggaatagactagttttagaggttgctcagcatttaggggaatcgagcgtaagaactattgctatggacgcaactgaaggtctaaaaagaggagatgaagtaactgatactgctgcaccaattaaagttccggttggtccagagactctaggaagaattataaatgtaattggagaacctatagatgaaaagggagaagttaaaacaaaagaaaattggcctattcatagatctgcaccagagtttaatgaccaatcaacagaaactgaaattttagtaaccggaattaaggtagttgatttattggctccatatgcaaaaggtggtaagattggtctatttggtggtgcaggcgtaggtaaaactgtacttattatggaattaattaataacgttgcaaaggcacatggtggattttcggtttttgcaggagttggtgaaagaactagagaaggaaacgatctttatcatgaaatgatagagtctggagtgattaaacctgagggcacaggatcaaaagctgcattagtttatggtcaaatgaatgaacctccaggagcaagagctagagttgcattatcaggcttaacagtcgcggaatattttagagatcaagaaggacaagatgtactatttttcgtagacaatatatttagatttacacaagcaggttcggaagtatctgcattattaggaaggataccttcagctgtaggataccaaccaactctagcgactgatatgggaaatcttcaggaaagaattactactacaaataaaggatcaattacttctgttcaagctatatatgtgccagcagatgatttaacagatcctgcgccagcaacatcattttcacacctagatgcaacaacggtactatctagacaaatagcagaaatcggaatttatcctgctgtggatccattagactcaacatctagaattttagatccaagaattgttggtgatgaacattatagagttgctagagaagttcaaaaaatatacaaaca

SEQ ID NO: 273673 - DNA, 712 bp, Unknown
  Bacterial polypeptide expressing nucleotide sequence isolated from the Sargasso Sea
aatggcaagtttagacgatttaaaaaaaagaatatcaagcgttaaatctacccaaaagattactaaggcaatgaaaatggttgctgcatcaaaattaagaagagctcaagaaaatgctgaaaaaggaagaccatattcagaaaaaatgaataatattattcttaacctttcaagtagtatttctgataaggaaaattcacccaagttactttcgggttcaggtgaagataaagttcatttatgtgttgtgatgacttcagatagaggattgtgtggaggatttaatactaatataattaaaaaagcaaaattttattttcagaaaattttagatgaaggaaaaattttaaaaattattactgttggttcaaaaggatacgatcaattaaaaagaacatataaagataatataattgaaaaaatttcatttaaggaatcaaagtatgttaattattttgatgctaataaggtgggcaatataattattgataaatttgaaaaaaaagaatttgatgtatgtacaattttttataatcaatttaaaaatgtgataactcaaataccacaagagcaacaaattattcctttaaaaacatctgagtctgaaggaaattcttctgaagataattatgaatttgaacctgaggaagatgaaattttaagtaatttattaccaaaaaacatatctactcagattttaaagcaatgttag

SEQ ID NO: 273674 - DNA, 772 bp, Unknown
  Bacterial polypeptide expressing nucleotide sequence isolated from the Sargasso Sea
catggtttacggacagatgaatgagcctcctggaaacaggctcagagttgcattaacaggcttaacaatggctgaaaagttcagggatgagggaagggatgttctattgtttattgataacatttatcgatacactttagctggagttgaggtttctgctttattaggaagaatgccatcagcggttggatatcagccaacactggctgaggaaatgggtgctttacaagaaagaatcacatcaaccaaagacggctctattacctccattcaagctgtgtatgtgcctgctgatgatttaacagatccatcaccagcaacaacctttgctcatttagatgcaacagttgtactttcaagacagatcgctgagcttggaatctacccggcggtagatccattagattcaaccagcagacagttagaccctctcgtggttggagaagagcattacaatgttgctcagggcgttcaaggcgttctgcagaaatacaaagaactcaaagacattattgctattttgggtatggatgaactatccgaagaagacaagttagcagtagcaagagctagaaaggttgaaagatttctttctcagcctttcacggttgcagaagttttcactggttcacctggaaaatacgtaaaactagaagacacaatcaaatcatttaaagggattttggctggagattatgatgatcttccagagcaagctttttacatggttggaacaatcgaagaagctgtagaaaaggcaaaaactctataa

SEQ ID NO: 273675 - DNA, 877 bp, Unknown
  Bacterial polypeptide expressing nucleotide sequence isolated from the Sargasso Sea
atggcaagtttagacgatctaaaaaaaagaatagctagtgttaaatctacacagaaaattacaaaagctatgaaaatggttgctgcggcaaagcttaagcgagctcaagaaagtgctgaaaaaggtcgaccttattccgaaaaaatgaataatataattttgaacttgtcaggtagtatttcagataaagagaatgctcctaagttattatcaggcacaggaaatgataaagttcatttatgtgtagtattgacctcagatagaggattatgcggaggatttaatgcaaatatcataaaaaaggctaaggcttattttacaaaaatatctgaagaaggaaaagagcttaaaattattacagtcggttccaaaggcaatgatcaattaaagagagtttatggtgataaaataatcgagcacatttcatttaaaacttcaaaaaatacaaactattttgatgcagaaaaagttggtaagctaattattaaaaaatttgaaaaagtggaatttgatatttgtacaattttttataatcagtttaaaaatgtcataacgcaaatacctcaagcacaacaaatcattcctttaaatactattaatgaaaatgataaaagatctgaagatagttatgaatttgaaccagatgaagatgagattttaagtaatttattacctaaaaatatttctacacaaatatttaaggcgatgttagagaattcagctagcgagcaaggtgcgagaatgagtgctatggataacgctacccgaaacgcaggtgaaatggttgataagcttactattgagtataatagaagtcgtcaagctgcaattacaaaagaattaattgaaattatatcaggagcagaaagtttataat

SEQ ID NO: 273676 - DNA, 601 bp, Unknown
  Bacterial polypeptide expressing nucleotide sequence isolated from the Sargasso Sea
atgagcaaaggaataataacacaagttattggagcggtagttgatgtaaaatttgatggagaactaccagaaattttaacagctttagaatgtaaaaatggaggcaatagattagttttagaagttgctcaacatttaggagagtcaactgcaagaactattgcgatggatgccactgaggggcttaaaagaggagatgaagttgaaaatacaaatgcaccaataaaagttccagttggaccagaaactctaggaagaattattaatgtagtcggagaaccaattgatgaaaggggtgaggtaaaaactaaggaaagttggccaatacataggtctgcacctgaatttaatgatcagtccactgaaactgaaattttggttacaggaataaaggttatcgatttattagctccatatgcaaaaggaggaaaaattggattatttggtggagcaggtgtaggtaaaactgttttaattatggaattaataaataatgtagcaaaagcacatggaggcttttctgtttttgctggtgtaggtgaaaggactagagaaggaaatgatttatatcatgaaatgattgagtcaggagtaatcaaaa

SEQ ID NO: 273677 - DNA, 1189 bp, Unknown
  Bacterial polypeptide expressing nucleotide sequence isolated from the Sargasso Sea
tcctgtaggtccaggaactttaggtcgaataatgaatgtagttggtgagccagttgatgagagaggtgaaatcaaatctgctgacaaatggtcaattcatagagaagcaccagattttgttgatcaagcaactgagacagaaattttagtaactggaattaaagtagttgatcttttagctccttactcaagaggaggtaaaattggtctgtttggtggagctggagttggaaaaacagttattattatggaattaatcaataatattgctaaggctcatggtggctactctgtttttgcaggtgtaggagaaagaacaagagagggaaatgatttatatcatgaaatgttggagtcaggtgttaatacagttgacggcgatgattcaaaatgtgcacttgtttttggacaaatgaatgagcctcccggagctcgagctcgagttgctttaactggattgacagttgcagaatatttcagagatatggaagggcaagatgtccttttctttgtagataatatatttagatttactcaagctggttcagaggtttctgctctattaggtcgtattccttcagctgttggataccagccaacattagctacagatatgggttcacttcaagagagaattacttctacaaataaaggctctattacttcggttcaggcgatctatgttcctgctgatgatttaactgaccctgcgccagctacatcttttgcacatttggatgcaactactgttttatctagacagattgcagagcttggaatttatccagcagtggatcctcttgatagtacttcaagaatattggatccaagaatagttggggatgaacattatgaagtagcaagaaatgttcaagctgtattacaaacttataaatctttacaagatatcattgctattttaggaatggacgaactatctgaagaagataagcttacagttgctcgagcaagaaagattcaaagatttatgtctcagccattttttgttgcggaagtatttactggaaccccaggtaagtacgtagatcttgaagatactattaagggctttgatgccatatgcaaaggggagtatgatcatcttcctgaagcagctttttatatggtgggcacaattgaggaagctattcaaaaagctgaaaaaatggccgaagacgctgctgcttaa

SEQ ID NO: 273678 - DNA, 1195 bp, Unknown
  Bacterial polypeptide expressing nucleotide sequence isolated from the Sargasso Sea
aataaagttccagttggtccagaaactttaggaagaattatcaatgtagttggtgaaccaatagatgaaagaggagacgttaaaacaaaagaaaattggccaatccatagagcagcgccagaatttaatgatcaatcaactgaaactgaaattcttgttactggtattaaagttatagacttgttagctccttatgcaaaaggtggaaaaattggattattcggaggagcaggtgttggaaaaactgttttaattatggaattaattaacaatgtcgctaaggctcatggaggtttttctgtttttgccggtgtgggtgaaagaacaagagagggaaatgatctatatcatgaaatgatagagtctggtgttattaaaaaagaaggagcaggatctaaagctgccttagtatatggtcaaatgaacgaacctccaggagcaagagcaagagttgccttaacaggtttgacggttgctgaatatttcagggatcaagaaggacaagatgttttattttttgttgataatatatttagatttacacaagcaggttcagaggtgtcagctcttttaggaagaattccttcagctgttggatatcaaccaactttagctacagatatgggtaacttacaagaaagaattacgaccactaacaaaggatctattacatcagtacaagcaatatatgtccctgctgatgatttaactgatccagcacctgctacatcgtttgctcacctggatgcaacaacagtactttcaagacaaattgctgaaattggaatttatcctgcagtggatcctcttgactctacctcaagaattcttgatcctagaatagttggagatgaacattatagggtcgcgagagaagttcaaaagatacttcaaacttataaatctttgcaagatataatagcaattttaggtatggacgaactatccgaggaagataaattgatagtcgccagagcaagaaagattcaaagatttttatcacaacccttctttgttgctgaggtttttacaggatctcccggaaaacttgttgatcttgagtccacaataaaaggttttgatgcgatctgtaaaggtgagtatgatcatcttccagaggctgcgttttatatggttggtacaattgaagaggctgtagaaaaagctgaaaaaatgaaaaaagatgctgcttaat

SEQ ID NO: 273679 - DNA, 1310 bp, Unknown
  Bacterial polypeptide expressing nucleotide sequence isolated from the Sargasso Sea
tatgagtaatggaacagtaatacaaataattggagcggtaattgacgtcgagtttccaaaggaaaacttacctaaaatttatgacgcactaactgttgatgaaaccggacttgttttagaggttcagcaacagcttggtgatggtgttgtaagaacaattgctatgggagcttcagaaggacttaaaagaggcgtatcggtgaccaatactgaaaaccctatatctgttcccgtaggagaagctacgcttggaaggattatgaatgttctgggtgagccaatagatgaaaagggtcctgtagaggcaaaagctgccatgccaatacacagaaatcctccttcatatgaagatcaggcagagacaactgaacttttagagacaggcatcaaggtaattgacctaatttgtccgtttgctaagggcggaaaggttggattatttggtggtgctggtgtaggtaaaacggtaaatattcaagaattaataagaaatattgcctatgagcatagcggatactcagtgttcgctggtgtaggtgagagaactcgtgaaggaaatgacatgtatcacgagatgatagagggcggagttttggataaagtagccttggtatatgggcagatgaatgagcctcctggaaatagactcagagtggcattgtctggtttaacaatggctgaaaactttagggacgaaggaagagatgttcttttgtttgtagacaacatctaccgttatacattggccggaacagaatgttcagctctattaggcagaatgccatcagccgtagggtatcaacctacacttgctgaagaaatgggagtcttacaagagagaatagcctccacaaaaacaggttcaattacttctgtgcaagcggtatacgttcctgctgacgatttaacagatccatctccagcaaccacattcgcccacttagacgcgaatgttgttctttctagacaaatcgcttcactgggaatttatcctgctgttgatcctctagactcaaacagcagacagcttgaaccaggtatagtagggcaagaacattatgatgttgccaacgcagtgaaacagcaacttaacagatacaaagaattaaaagatatcattgctattttaggaatggatgaattgtctgaagatgacaaattggtcgtagcaagggctagaaaaattgagagattcttatctcaacctttctttgtggctgaggtatttacaaatgctccgggtaaatacgttcctcttagtgaaactattagaggattcaagggcatgttaatgggattacgacgacata

SEQ ID NO: 273680 - DNA, 1033 bp, Unknown
  Bacterial polypeptide expressing nucleotide sequence isolated from the Sargasso Sea
atgagccaactaaatccatcagaaatttccagcgttttaaaggaaaaaatttcaggtcttgatctttccgcagaaagaaaaaatgaaggtattatcgtaagtgtttcagacgggattgtgagaattcatggtatgggcgacgttatgtatggtgagctgatagagtttgaaaacggtgttcttggattggcactaaatctcgagcaagattctgtaggagcagtagttttaggagattatttgggactaatcgaaggccagaaagctgtttgtactggaagaattttagaggttccagtgggcgaagagttactaggtagagttgtagatgcactgggcagccccattgatggtaagggggaaattaaaacagagatgactgctccagtagaagttgtagcccccggtgtgattgccaggcagtcagttgatcaaccggttcaaattggtttaaaagcagttgatgcaatggtaccaattggtagaggtcaaagagagcttattattggcgacagacaaacaggtaagaccgctgttgcggttgatgcgatcatcaatcagaaaggaactggcatcaaatgtatatatgttgctattggccaaaaacaatcaaccgtcgttaatgttgttaaaaagcttgaagaacatggagctctagaacatacaattattgtttcagcatcagcatctgatcctgcgcccatgcaatatctttctgcatactcaggttgttcaatgggtgaatattttagggataaaggtgaagacgctttgattgtgtatgatgacctctctaaacaagccgttgcatatagacaagtatctttacttttaaaaagaccgccaggaagagaggcctacccaggagatgttttttatcttcattcaagattgctagaaagagccgccagggtaaatgctgattatgtagaaaaagctacaaacggaaaggtgaaaggaaaaactggatctttaaccgcacttccgattatcgaaacacaagcaggagatgtttctgcttttgttccaacca

SEQ ID NO: 273681 - DNA, 1543 bp, Unknown
  Bacterial polypeptide expressing nucleotide sequence isolated from the Sargasso Sea
aatgacaattaatccaactgaaataagcgatatcataaaagataaaattaataagttagacactaaaacacagtcacataaccagggaaccgtaatttctttaacggatggtattgcaagaatctatggcataacagatgctctacaaggtgaaatgctagaattcccaaataatatttttggactcgcacttaaccttgaaagagactcagttggcgccgtgattctgggagattataaatctatttcagagggtgataccgttaaatgtacgggtaaaatattagaggtccctgtaggtgaagctctactagggcgcgttgttaattcacttggtgaaccaattgataacgctggtgagattaagtctgatttatcatcgcctattgaaaaaatagcgccaggagtgattgaacgaaaatcggtcgatcagccagtacagacgggtctaaaatctattgactcaatggttccaataggacgtggtcaacgtgagcttattattggtgatagacagacaggtaaaaccgctgttgctgtcgacgctataataaatcaaaaagatactggtgtgaaatgtatatatgttgcgataggacaaaaagcctcgtctattgcagctgtagttagaaaactcgaagagcatgacgctctaaaacatacaatcatagttgctgcttctgctgctgactctgcggcgatgcaatacattgcgccatactcgggttgtgcgatgggagagtattttagagataatggagaggatgccctaatcgtctacgatgacttaaccaaacaagcctgggcttacagacaggtatctttgcttttaaaaagacctccgggtcgtgaggcctatccgggagatgtattctatttacattcaagacttcttgagcgtgcagctcggatcaatgaggctgcagtttcagatctcacaaatggaaaagttaagaatcagaccggctctttgaccgcgctaccaattatcgaaacgcaagcgggggatgtgtcagcgtttgtacccactaacgttatctcaataactgacggacagatcttcttagagacagacttattcaacgctggcattagaccggctataaatgcagggttgtcagtatcaagggttggcggagcggcacagacaaaaattatcaaaaaacttggaggaggtgttcgactagcgcttgctcagtatcgagagcttgcggcgttctcccagtttgcttctgatctcgatgaagctacgagaaagcagcttgaaagaggtaagagagtaactgaattaatgaagcagtcgcagtatagtcctctaagtgtagccgaaatggcaatatcattatttgcagccaatgaaggatacttagataatatagatatttctaaaattatatcttatgaaaaatccttgcatgacttttctaagtctaaacacaaagcacttgtagacaagataaatagcaaactggattataatgatgatatcgaatctaaattgagaattctcctagatgaatttaaagaacaaggggtattttaa

SEQ ID NO: 273682 - DNA, 865 bp, Unknown
  Bacterial polypeptide expressing nucleotide sequence isolated from the Sargasso Sea
aatgtctggtagtcaagagataagaggccaaatcagcagtattaagaatactcagaaaattacaaaggcaatggagatggttgctgcaagcaagatgaaaaaagctcaagatcaaatgggcaaagcccgtccgtacgctgacaagatcatgaatgtgatgtctcatttagcacatgctcatccagagtatgagtctgattttcttaaagttagagaaattaaaaaaagaggatatattgttgtctcttctgatagagggttatgcggaggattgaacaacaatctgttcaaagtagtcttcgaatcggtgatggctgataaagaaaaaggtatagactcatctttctcgctcataggcactaaagcctcatcatttttccagcgtataggaggtgacgttatttcacaaacatcacaacttggcgataaaccgagagttgagcaagttctaggattaattaaaagtaccgtagataaatttctagcagctgatgttgatgaagtatatctagttttcaacaaattcaaaaatactgttagccaagaacctacaatgctgaaaatccttcctatatcaattgatgaaaaagataaggactatgatttctactgggattatctttacgagccagatgcaaaagatgtcctagaatctttatttacgcgatatctcgaatcgttagtatatagaggaattgttgaaaatttagcatgtgaacaagcatctagaatggttgcaatgaaggccgcatcagataatgcaacagatttaataggagaattacaacttatctacaacaagaatagacaagctgcaattacacaagaaatatcagaaataatatccggagcggcagctctgtaa

SEQ ID NO: 273683 - DNA, 1381 bp, Unknown
  Bacterial polypeptide expressing nucleotide sequence isolated from the Sargasso Sea
atgagccaaggcacagtagtacaagtaatcggagccgtaatcgatgtggaattctctagacaggagcttcctaaaatatacgatgctcttgaggttgaaggagagggtttagttttggaggtccagcagcagcttggagatggaattgttagaaccattgcgatgggtcaaacagagggtcttcaaaggggcgcaaaagtctcaaatacaggagacgcggtcaaagtgcccgttggagaaaaaaccttaggaaggattttgaatgtcttgggtgaacccattgacggaaaaggcgatgtcggagctgaagaacaaatgcctattcacagggctccgccaagctatgaagatcaggcagaatcatctgagattttagaaacaggaatcaaagttattgatctaatgtgtccgtttgctaaaggaggtaaagtcggattgttcgggggtgctggagtaggaaaaacagtcaacatgatggagctaatcagaaacatcgcttacgaaacaagcggttattctgtttttgccggtgtcggcgagaggacaagagaaggaaatgatttttatctagaaatgaccgaatcacaagtattggataaagttgctttggtttatggacaaatgaacgaacctcctggatgcagaatgagggtagcattatcaggattaaccattgctgagaaattcagggatgaaggtaaagatgtactcttatttgttgataacatttacagatacacattggctggcgtggaatgttcttcgcttcttggaagaatgccatccgcagtgggttatcagccaacgcttgctgaagaaatgggtgttcttcaagaaagaattacgtcaaccaagacgggttcaatcacctcggtgcaggcaatatatgttcctgcagatgatctaacagatccatcgccggcaacaacattcgctcaccttgatgcaaccgtagtactttcaagacaaattgcgtctttaggtatctacccggcagttgatccgcttgactctaccagcagacagcttgatccagccattgttggtcaagaacactacgatgttgcaaaaggagttcaacaagttcttcaaagatatttagagctaaaagatatcatcgccattttgggtatggacgagctttcagatgaagacaagcagacagttaacagagcaagaagaattgagaaatatttatctcaacctttctttgtagcagaagtatttaccaactcgcccgggaaattcgtctccatcaaagacaccgtgagaggctttaaaggaatcttggaaggagagtacgatgatcttcctgagcaagcatttttgatggctggaaaaatcgaagaagtagtagagaacgcagaaaaacttaaatgag

SEQ ID NO: 273684 - DNA, 664 bp, Unknown
  Bacterial polypeptide expressing nucleotide sequence isolated from the Sargasso Sea
tatgagtaatggaacagtaatacaaataattggagccgtaattgatgtcgagtttccaaaagaaaacttgcctaagatttatgacgcattaacggtggatgagactggccttgttctagaggttcagcaacagcttggcgatggtgtggtaagaactattgctatgggtgcttcagaaggtctaaaaagaggagtatcagtcactaatacagagaatccaatatctgttcctgttggcgaagcaactctcggcagaattatgaatgttctcggagagccaatcgatgagaaaggtgccgttgaagccaagacaaccatgccaattcatagaaaccctccctcttatgaagatcaagccgagacggctgaacttttagagactgggattaaggtgattgacttaatctgcccttttgcaaaaggtggaaaggtaggtttatttggtggtgccggcgtaggaaaaacagtaaatattcaagagctcataagaaatattgcatacgagcatagcggttattcagtttttgcaggtgttggagaaagaacacgtgaaggaaacgacatgtaccatgaaatgattgagggtggcgttttggataaagttgctctcgtgtacggacaaatgaatgagcctcctggaaacagacttaggggtgctctttct

SEQ ID NO: 273685 - DNA, 1393 bp, Unknown
  Bacterial polypeptide expressing nucleotide sequence isolated from the Sargasso Sea
gagcttatcgagtttgagcacggagttatgggtatgccccttaaccttgaagttgattctgtaggagctgttattttgggagactacaaacttcttgaagagggcggatcagcgaaatgtaccggtagaattttagaggtgccagtaggcgaagcccttatgggaagggttgtagattctttgggagaaccaattgatggtaagggtgaggttcaaaccgacatgaccgccccggttgaaaaggttgctccgggtgtgatctctagaaaatcagttgatcagcctgtccagcttggaatcaaggctgttgatagcatggttcccattggtagaggtcagcgtgaattaattattggtgataggcaaactggcaagacggcaattgccatcgacgcaatcattaatcaaaaagatactggcgtaaaatgtatttacgtagccattggacaaaaacaatcctcaattgcacaagtggtcagaacgcttgagcagtacggagcaatggaaaacactattgttgttgtggctggtgcagcggacccagctcccatgcaatacattgcaccttttgctgcctgctctatgggtgagtattttagagacaaaggtgaggatgccttaataatttacgatgacctgtctaaacaagctgttgcttatagacaaatgtccttactgctcagaagacctccaggcagggaagcttatccgggtgatgttttctatttacactcaaggcttctagaaagagcagcacgagtaagcgaagaatatgtagaaaaacataccaacggtgaagttaaaggcaaaacaggctctttaacagctcttccaataattgaaacacaagccggcgacgtatctgcatttgtgccaaccaatgtaatttctattaccgatggtcaaattttcttagagtcttctttgtttagttcgggattaaaaccagccatggatccaggtatttctgtttctagagttggcggtgcagctcaggtacccatcattaaaaaacttggtggtggtattaaaactgccctagctcagtacagagagctagaagcgtttgctcagtttgcctcagatctagacgaggcttccaaagagcagctcgagcacggagtgagggttactgaactcacaaaacaagaccaattttcacctatgtctgtagctgaaatgggcttgatgctttacacagctaacgaaggctacctcatgaaggtagaagttgaaaaaatcagggactttgaaaaaagtttactggcttacatgaactctgaacataaagagcttatggacaaagtgtcccagactggagagtacggcgatgatatccaaagtgcctttaaagaagctttagataagtttatggagactcaaacctggtaat

SEQ ID NO: 273686 - DNA, 1420 bp, Unknown
  Bacterial polypeptide expressing nucleotide sequence isolated from the Sargasso Sea
atgagcaaaggaataatcacacaagttattggagcggtagtagacgtaaaatttgaaggagaattaccagaaattttaacagcattagaatgtaaaaatggtgacaatagattggttttagaggttgctcagcacttaggagaaactactgtaagaactattgcaatggatgctactgaaggattaaaaagaggagatgaagttgtaaatacgaatgctcctatccaggtacctgttggaccagaaacactaggtagaattattaatgtaattggtgagccaattgacgaaagaggtgaggttaaaactaaagaaagctggcctattcacagagctgcgcctgaatttaatgatcaatcaactgaaactgaaatattagttactggtattaaagttatcgacttattagcaccatatgccaaaggaggaaaaattggactatttggaggtgctggtgttggtaagacagttttaattatggaattgattaacaacgttgcgaaagcacatggtggattttcagtttttgctggagttggagaaagaactagagaaggaaatgatctttaccatgagatgatggaatctggagtaatcaagcaagatggccctggttctaaagctgcattagtttatggacaaatgaacgaacctccaggagcaagagcaagagttgctttaactggattaacagtagcagaatattttagagatcaagaaggacaagacgtgttattcttcgttgataatatcttcagatttactcaagctggttcagaggtatctgctctattaggtagaattccttcagcagtaggatatcagccaacattagctactgatatgggtaatcttcaagaaagaattacaacaacaaacaaaggatcaattacttctgtacaagcaatttatgttcctgccgatgacttaactgatccagctccagcaacatcatttgctcacttggatgctactactgtactttcaagacaaatagcggaaattggtatctatcctgcagtagacccattagattctacttcaagaattttggacccaagagtagttggtgacgaacattatagagttgcgagagatgttcaaagaattttacaatcttataaatcacttcaggatattattgctatccttggtatggatgaattatctgaggaagataaattagttgtagcaagagcaagaaagattcaaagatttttatctcaaccattctttgttgcggaagtatttacaggttcaccaggaaaattagttgaccttgagtctacaatcaaaggatttgatgcaatctgtaaaggtgaatatgatcacttgccagaagcagctttttacatggtcggaacaattgaagaggctattgaaaaagctcaaaaaatggaaaaagaagctgcagcttaat

SEQ ID NO: 273687 - DNA, 1108 bp, Unknown
  Bacterial polypeptide expressing nucleotide sequence isolated from the Sargasso Sea
aaaaaatggccaatacaccgtcaagctccaaaatttacagatcaatcaactgagactgaaatattagtaactggaataaaagtaattgatttactcgcaccttacgccaaaggaggaaaaataggtttattcgggggtgctggagtaggaaaaacagtgacaataatggaactaataaataacattgcaaaagctcatggaggtttttcggtttttgcgggtgtaggtgagagaacaagagaaggtaacgatctttaccacgaaatgattgagtcaggagttataaaaactgaaggtaaaggctctaaagctgctttagtgtacggtcaaatgaatgagcctccaggagcaagagcgcgagtagctctaactgggcttacagtagctgaatattttagagacaaagaaggtcaagacgttttgttttttgtagataatattttccgtttcactcaggctggatcagaggtttcagcacttcttggaagaataccgtctgctgttggttatcagccaacccttgccactgacatgggaaatcttcaggaaagaattacatcaactggtaaaggctctattacgtcagtacaagcaatttatgtgcctgcagatgacttaacagatcctgcacctgctacatcgttttcacatcttgatgcaacaactgttttatcaagacaaatagcagaacttggtatttatcctgcagttgaccctttagactcgacctcaagaatacttgacccaagagtagttggtgaagagcattatagagtagcgagggaagttcaaaaaattttacaagcatataaatcgctccaagatattattgccattttagggatggatgaactttcagaagaggacaagcttacagttgccagggcaagaaaaattcaaagatttttatcacaaccattctttgttgcggaagtattcacaggatcacctggaaaattagtagatttagactcaacgattaagggttttgacgcaatttgcaaaggtgaatatgatcaccttcctgaagcagctttttatatggttgggtcgatagaagaagcagttgaaaaagcagataaacttgagaaagatgctaaaaagtaaa

SEQ ID NO: 273688 - DNA, 1378 bp, Unknown
  Bacterial polypeptide expressing nucleotide sequence isolated from the Sargasso Sea
atgagtagcggacgtatcgttcaaatcatcggcgccgtcatcgacgtggaattcccgcgtgacaaggtgccgagtgtttatgaagcgctgaaagtagttggcgccgaaaccaccctggaagttcagcagcagctgggcgacggtgtggtacgtaccattgcgatgggttcgaccgaaggcctcaagcgtggcctggacgtcaacagctctggcaaggccatctccgtaccggtcggtaaagcgaccctgggccggatcatggacgtgctgggcaacccgatcgacgaagccggccccatcggtgaagaagagcagtgggaaatccaccgccctgcgccgagctatgccgaacaggctggctccaacgagctgctggaaactggcatcaaggttatcgacctggtctgcccgttcgccaagggtggtaaagtcggtctgttcggtggtgccggtgtcggcaagaccgtgaacatgatggaactgatccgtaacatcgccatcgagcacagcggttattccgtgttcgccggtgtgggtgagcgtactcgtgagggtaacgacttctaccacgagatgaaggactccaacgttctcgacaaggtagccctggtctacggtcagatgaacgagccaccaggcaaccgtctgcgcgtagcactgaccggccttaccatggccgagaagttccgtgacgaaggtcgtgacgttctgttgttcgtcgacaacatctaccgttacaccctcgccggtaccgaagtatccgcactgctcggccgtatgccgtcggcagtaggttaccagccgaccctggccgaggagatgggcgttctgcaggagcgtattacctccaccaagaaaggctcgatcacctcgatccaggctgtctacgtacctgcggacgacctgaccgacccgagcccggcgaccaccttcgcccacttggacgccaccgtcgttctgtcccgtgacatcgcttccctgggtatctacccggccgttgacccgctggattccaccagccgtcagctggacccgaacgtgatcggccaggatcactacgagaccgctcgtggtgttcagtatgttctgcagcgctacaaggagctgaaggacatcatcgcgatcctgggtatggacgaattgtccgaagacgacaagcagctggtatcgcgcgctcgtaagatccagcgcttcctgtcccagccgttcttcgtggctgaagtcttcaccggtgccccgggcaagtacgtgtccctgaaggacaccattgccggcttcagcggcattctcaaaggcgactacgaccacctgccggaacaagcgttctacatggtaggcggcatcgacgaagccatcgagaaagccaagaaactgtaag

SEQ ID NO: 273689 - DNA, 630 bp, Unknown
  Bacterial polypeptide expressing nucleotide sequence isolated from the Sargasso Sea
tcgtggtgacctcggaccgtggtctgtgtggtggcttgaacatcaacctgttcaaggcgctgctcagaagcctgaaggaatggcgcgaccagaaggtcgaggctgatttctgcgtggtgggcagcaagggcgcgagcttcttccgcagcaacgggggcaacgtggttgccgccatcagcaagctgggtgaagagccgtccatcaacgacctgatcggtagcgtcaaggtcgtgctggatgcctacgccgagggccgtatcgaccgtctgtatctggtgtcgaacaagttcgtcaacaccatgacgcagaagccggaagtgcagcagttgttgccgttggccgcgagcgatgcgcaaggcgtgcagaaaggtctgtgggactacgtgtacgagccggacgcccagcaattgctggatgcgctgctggtacgctacgtcgagtcgcaggtctatcagtccgtggtcgagaacagcgcgtgcgaacaggctgcgcggatgatcgcgatgaagaacgcaaccgacaacgccggtgatctcatcaaagacctgcagctggtttacaacaaggctcgtcaggcagcgatcacccaggaaatttcggaaatcgtcggcggcgctgccgcggtttaag

SEQ ID NO: 273690 - DNA, 1015 bp, Unknown
  Bacterial polypeptide expressing nucleotide sequence isolated from the Sargasso Sea
tatgagcaaaggaataatcacacaagttattggagcagtagtagacgtaaaatttgatggagaattaccagaaatcttaacagctttagaatgtaaaaatggaagtaatagacttgttttggaagttgcacagcatttaggagagtcaactgcaagaactattgcaatggatgctactgaaggattaaaaagaggagatgaagtagtaaatacaaaagctcctataaaagttccagttggacctgaaactttaggaagaattataaatgtggttggtgaaccaatagatgaaaaaggagaagttaaaactaaagaaagttggccaattcatagacctgctccagagtttaatgatcagtctacagaaacagaaattcttgtcacaggtattaaagtaattgatttgttggctccatatgcaaaaggtggaaaaattggtttgtttggtggtgctggtgttggaaaaacagttttaattatggaattaattaataacgttgcaaaagctcatggtggattttctgtttttgcaggtgttggtgaaagaactagagaaggaaacgatctttatcatgaaatgatggagtcaggtgtaattaaatctgatggtcctggatctaaagcagcattagtttatggacaaatgaatgaacctccaggagcgagagctagagttgcgcttactggattaaccgttgctgaatattttagagatcaagaaggacaagatgttcttttctttgtggataatatttttagatttactcaagcaggatcagaagtatcagctcttttaggtagaataccatctgccgttggatatcaaccaacattagctactgatatgggaaacttacaagaaagaattacaacaacaaataaaggttcaattacatctgtacaggcaatttatgtccctgctgatgatttaactgacccggctccagcaacatcgtttgctcacttggatgcaacaaccgtactttcaagacaaatagcagagataggtatttat

SEQ ID NO: 273691 - DNA, 887 bp, Unknown
  Bacterial polypeptide expressing nucleotide sequence isolated from the Sargasso Sea
aatggcaaaaaacaatattggaattatttcgcaagttatgggtgctgtagttgacgtaaaatttgagggcgatctcccagaaatactgaatgctctagaggttgaaaaccagggtaataggttggtattagaggtggcgcagcatatgggtgaatcacaggtgagaaccattgccatggatacaacggatggattgatgcggggtatggatgtggtagatactggggatccaatccagatgcccgttggccctgagacccttggaaggattatgaatgttataggcgatcctgttgatgagaagggcccggtaaagtcaactgattccttgccgattcatagatcagcgccggagtttttagatcagtcgactgatacagaggtattggtaaccggcataaaggttgtagatttaatagagccttatgctaagggcggaaaaattgggctttttggcggtgctggtgtgggaaaaaccgtgattatcatggaactgataaataatattgcgaaaggtcacggcggatattcagtatttgccggtgttggagagcggacccgtgaaggaaatgacctctatcatgaaatgatagagtcaggggttattgttcctgatggtcccgggtctaaggcagcactggtatacggacagatgaatgagccgcctggtgctagggccagggtggcactatctggtttgactttagcggagtactttagggatcaggaaggccaggatgtgctattttttgtggataatatctttcgatttactcaggcgggttcagaggtttcggctttgcttgggaggatcccatcagctgtggggtaccagcctacattggcaactgacatgggtgccatgcaagaaagaatcacttctacaa

SEQ ID NO: 273692 - DNA, 592 bp, Unknown
  Bacterial polypeptide expressing nucleotide sequence isolated from the Sargasso Sea
agcggtaggttaccagcctacactagctgaagaaatgggtgtacttcaagagcgtatcgcatctactaagacaggttcaatcacatcaatccaagcggtatacgtacctgcggatgatttaacggatccatctccagcaacaacgtttgctcacttagatgcaacagtagtactttcacgtgatatcgcatcacttggtatttacccagcggtagatccacttgattcatcttcacgtcaacttgacccattagtaattggtcaagagcactacgatacagcgcgtggcgttcaaacagttcttcagcgttacaaagaacttaaagacatcatcgcaatcctaggtatggacgagctttctgacgaagataagcaacttgtatctcgtgcacgtaaaatccaacgtttcctatctcagccgttcttcgtggcagaggtatttacaggtgcgtcaggtaaatacgtttcacttaaagacacaattgctggcttcaaaggcattttaaacggtgagtttgatgaccttccagagcaagcgttctacatggttggctctatcgaagaagctcaagaaaaagccaaaagcatgtaa

SEQ ID NO: 273693 - DNA, 1399 bp, Unknown
  Bacterial polypeptide expressing nucleotide sequence isolated from the Sargasso Sea
atgagtagcggaaaggtcgtacaggttatcggcgccgtcatcgacgtggaattcccccgtgacagcgtgccccaggtgtatgacgcactgatggtaggtgacaaagggctcaccctcgaagtgcagcagcagctgggcgacggtgtagtgcgcgcgattgccatgggcccctccgagggcgtgagccgcggtctcgacgttgaaaacaccggcgcgccgatctcggtaccagtgggcacagagacgctgggtcggatcatggacgtgctgggcaaccccattgatgagaaaggtcccattggtgagcaggagcgttctgcgattcaccgtgctgcacccacctatgaagagctcgctgcgtctgatgagctcctggagacgggtatcaaggttatcgatctggtttgcccgtttgccaaaggcggaaaggttggcctgttcgggggcgccggtgtcggcaagaccgtgaacatgatggagctcatcaacaacatcgccaccgagcactcaggtctgtcggtattcgccggtgtgggtgagcgaacccgtgaaggaaacgacttctactacgagatgcaggaatccggtgtcgtgaatgtggaagagatggacaagtcgaaggtagcgatggtgtacggccagatgaacgagccgcccggcaaccgtcttcgtgtggcactcaccgggttgactatggcggagaagtttcgcgatgagggccgggatgtcctgttgtttgtcgacaatatttaccgctacacgctggcgggcaccgaggtatcagcactgctgggtcgtatgccgtctgcggtgggctaccagccgacgttggcagaagagatgggtgttctgcaggagcgaatcacctccaccaagaccggatcgatcacctcgattcaggcggtttacgtaccggcagatgacctcacagacccttcaccggcgacaacctttgcccacctcgactcgacggtggtactgagccgggacatcgccgcaaagggtatctatcccgcggtcgatccgctggactcaacatcgcgacagctggatccgctgatcattggccaggagcattacgaggtcgcgcgaggtgtgcagacggtcctgcagcgctacaaggagcttaaggacatcattgcgatcctgggtatggacgagctttccgaggaagacaagctgatcgtggcccgagcacggaaaattgagcgattcctgtcacagcctttccatgtggcagaggtcttcacgggatcacctggcatctacgtttccttgaaagacacgattgccggcttcaaaggcattcttgcgggtgaatatgatcacttgcccgaacaggccttctacatggtgggctcgatcgagcaggctgtggagagagccgccaagctgtaaa

SEQ ID NO: 273694 - DNA, 931 bp, Unknown
  Bacterial polypeptide expressing nucleotide sequence isolated from the Sargasso Sea
ctgggggctcctataaaggtaccagttggtcctgaaaccttaggcagaatagtaaatgtaattggagaaccaattgatgaaaaaggtgaaattaaaacgaaggaaaattggccaatacatagagcagcacctgaatttaatgatcagtcaactgaaacagaaattttagttacagggataaaagttgttgatcttttagcaccttacgctaaaggaggaaaaattggattgtttggtggtgcaggggtaggaaaaacagttttaattatggaattaataaataacgttgcgaaagctcacggtggtttctcagtttttgcaggtgttggagaaagaacaagagaaggaaatgatctctatcacgaaatgattgagtctggtgtaataaagccagatggagcaggatcaaaagctgctttggtgtacggtcaaatgaatgaacctcctggagctagagcaagagttgctttatcggggcttacagttgccgagtattttagagatcaagaaggtcaagacgtattatttttcgttgataatatatttagatttacacaagctggctcagaggtttcagcattattagggagaattccatctgctgtaggctaccaacccacattagctaccgacatgggaaatcttcaggaaagaataacaactacaaataaaggttctataacatcagttcaggcgatctatgtacctgctgacgacttaacagatcctgcccctgcaacttcattctcacaccttgatgcaacaaccgttttatcaagacaaatagccgaactaggaatttatccagctgttgatccactagattcgacgtcaagaattttagatccaagaattgtaggagatgagcattatagagttgctagagaagttcaaaagttttacaaacctataagtctttacaagatattat

SEQ ID NO: 273695 - DNA, 1534 bp, Unknown
  Bacterial polypeptide expressing nucleotide sequence isolated from the Sargasso Sea
aatggaaattaacccttcagaagtaacaaaaatattaaaagaacaaattaaaaaatttggtgataaagcagaggtaacagaagttggtcaggttttgtcagtaggagatggtattgctagagtatatggtttagataacgttcaagctggagaaatggttgaattttcagatggttcaaaaggtatggctctaaaccttgaaagcgaaaatgttggtgttgtaatttttggtgatgatagagctattaaagaaggtgatacagtaaaaagaactggagccattgttgatacaccagtaggaaaagaattattaggaagagtagttgatggtttaggaaatcctatagatggaaaaggcgttttagaaaaaggagtaaaaaaaagcagggtagaagttaaagctcctggaataattccaagaaaatcagtcagcgaaccaatgcagtctggacttaaagcaattgatagtttggttccaattggaagaggacaacgggaattaattattggggatagacaaactggtaaaactgcggttgcagttgatacaattataaatcaaaaaaaaataaatgagtcaggagatgaaaaacaaaaattatattgtatttatgttgcgataggtcagaaaagatcaacagtaaggcaaattcaaaaaacattagaggaagcaggggcaatggattatacaactattgtggctgctacagcatctgatgctgcaccacttcaatttttagcgccttatactggatgtacaatgggtgaatattttagagacaatggaatgcacgctttaattatatatgatgatttatcaaaacaagcagtagcttatcgacaaatgtctttattgttaagaagacctcctggaagagaagcatatcctggtgatgtattttatttacatagtagactattagaaagagctgcaaagttaagtgatgaacatggtggtggatctctaacggcattaccaattattgaaacacaagcgggagatgtttctgcttatataccaacaaatgttatttcaattacagatggacaaatatttcttgagacgaatttatttaatcaaggtattagacctgcaattaacgttggtttatctgtatcaagagttggttcagcagcacaaacaaaagcaatgaaaaaagtttctggatctatgaaattagaacttgctcaatatagagaaatggctgcatttgcacagtttggatcagatttagatgcatctacacaaaaacttttaaatcgaggatcaaaactaactgaacttttaaaacaaaaacaattttcaccaatgacggtagcagaacaggttatttccgtattttgtggagtaagaggttatttagatgatattgagcttaaagatattgctcagtttgagtcaaaaatcattgaaaaatgtaaatctgaaaaaccagaaattattgaatctatttcagcctctggaaaacttgaagaagatactgagaaattgttggttgaaataataaatgaacttaaaaaaaatcttaattaa

SEQ ID NO: 273696 - DNA, 1420 bp, Unknown
  Bacterial polypeptide expressing nucleotide sequence isolated from the Sargasso Sea
atgagaaaaggacaaattacacaaattattggagcggtagtcgatgttaaatttgaaggagaactacctgaaatattaacagcattagaatgtaacaatggtggtgctagactggttttagaagttgcacaacatttaggagagtcaagtgtaagaacaattgctatggatgcaactgaaggactcaaaagaggagatgaagtaacagatacaggagctccaatcaaagttccagttggtcctgaaactttaggaagaattgttaacgtaattggtgaacccattgatgaaaaaggagaagttaaaactaaagagagttggcctatccatagagcggcacctgtattcaatgaacaatcaacagaaactgaaattttagtaacaggaattaaggtagttgatctactagccccatatgcaaagggtggtaaaattggtttattcggtggtgctggtgtaggaaaaacagtacttattatggaattaattaataacgtcgccaaagctcacggtggattttcagtttttgcaggagttggtgaaagaactagagaaggaaatgacctttaccatgaaatgatagagtcaggagtaattaaaccagaaggaactggatcaaaagctgcacttgtttatggtcaaatgaacgaacctcctggagcaagagctagagttgcattatcaggtttaactgttgcagaatattttagggatcaagaaggtcaagacgttctatttttcgtagataacatttttagatttactcaagcaggctcagaggtatctgcattattaggaagaattccatcagctgtaggttatcagcctacgcttgctaccgatatgggaaatctacaagaaagaataacaactacaaataaaggatcaattacatcagtgcaggcaatatatgttccagccgacgatttaacagaccctgctccagcaacatcattttctcacttagatgcaacaactgtattatcaagacagatagcagaaattggaatttatccagcagttgatcctctagactctacttctagaattttagatcctagaattgtaggagacgaacattatagagttgctagagaagttcaaaaaattttacaaacatataaatctttacaagatattattgcaattttaggtatggatgaattatccgaagaagataagctaattgttgcaagagcaagaaaaattcaaagatttttatctcaaccattttttgttgctgaagtatttactggttcaccaggaaagcttgtggagctagagtcaacaatcaaaggttttgattctatttgtaagggagagtacgatcatttacctgaggctgctttttacatggttggaacaattgaggaagcaattgaaaaagccgaaaaaatggcaaaagatgcagctgcttaat

SEQ ID NO: 273697 - DNA, 1537 bp, Unknown
  Bacterial polypeptide expressing nucleotide sequence isolated from the Sargasso Sea
atggaaataaatccttcagaagtaacaaagatattaaaagaacaaataaaacaatttggagacaaggcagaagtttctgaagtaggtcaggtattatctgttggagatggaattgctagaatctacggcttggataatgttcaagctggagaaatggtagaattttcagatggatcaaaaggaatggctttaaatctagaaagtgaaaatgttggtgttgtaatttttggagatgatagagctgttaaagagggcgacacagttaagagaactggtgctattgttgatactccagtaggaaaagaattattaggtagagttgtggatggtttaggaaatccaatagatggtaaaggtgctttagataaaggaattaaaagaagcagggtagaagttaaggcaccaggaattattccacgtaaatctgttagcgaacctatgcaaacaggattaaaatcaattgacagtttggttccaattggaagagggcaaagggaattaatcatcggtgatagacaaactggtaaaacagctgttgctattgatgcaatcataaatcaaaaaaaaataaatgaatcaggtgacgaaaaacaaaaattatattgtgtttatgttgcaattggtcaaaagagatcaacagtaagacaaattgaaaaaactttagaagaagccggagcaatggaatatacaactattgttgcagcaactgcatcagatgcagctccacttcaattcttagcaccatatactggatgcgcgatgggagaatattttagagacaatggtatgcacgctttaattatttatgatgatctgtcaaaacaagcagttgcatatagacaaatgtcattacttttaagaagacctccaggaagagaagcctatccaggggacgtattttatttgcatagtagattacttgaaagagcagcaaaattaagtgatgatcatggcggtggatctttaacagcacttccaattatagagactcaaggaggtgatgtttctgcattcataccaacaaatgttatatcaattactgatgggcaaatattccttgaaactgagctatttaaccaaggaattagacctgcaattaatgtcggcttgtcagtatctagggtaggatcttcagctcaaaccaaagctatgaagaaggtttcaggatcaatgaagcttgaattggctcaatatagagagatggcagcttttgcacaatttggatcagatttagatgcctctacacaaaaattattaaatagaggtgcaaaactaactgaactattaaaacaaaaacaatattcacctatgacagttgcagagcaagtaatatctgtattctgtggtgttaaaggtcacttagacaatattgagcaaaaagatattgcgaattttgaagcaaaaataatcgagaaatgtagatcagaaaaaccagaaataatcgattcaattatttcttctggaaaacttgaggaagatattgaaaaaacattaactgaattaattctagatcttaaaaaaaattttagttcttaaa

SEQ ID NO: 273698 - DNA, 826 bp, Unknown
  Bacterial polypeptide expressing nucleotide sequence isolated from the Sargasso Sea
tatgaaaatggttgctgcaagtaagttgcgtagatcacagaaaaaagctgagcccgcaagaccttattcatcacgtcttgaagaaatgttagcatctttggcttcttcggcagcatcgggagaggggattattaagcttcttacgggtactggtaatgatcaaaattatattgttgttccagttagtgcagatagaggtttatgcggaggttttaatagcagtattaatagagagacttttaaacttgtaaaatcactacaaagtgatggtaaaaatgttcaactcatgcctgttggaaaaaagagcagggatttttttaatcgagttatgaaaaatcaaattacagaaagttttgttgatttgaacatttcaaatagtggttatgagtcagcgttaaaagtatcgaacaaacttcaggaattatattttgatagtaaatttgataaatgcattatagtatttaataaatttaaatcagcaatttcacaagaggtgacgcaacaacaacttataccattagatgtatcagagtcatctgagaaagagaatacagaaactactgttgctaaagcaatttatgattatgagcctgatgaggaaactattttgaaagatttacttcctaaaaatgtttctattcagatttttaaagtcttactggagagtgatgcaggagaacatggggcaagaatggctgcaatggataatgcaacacgtaatgctggtgagatgattgatagtttaacactaaaatataacagaacgcgacaagcgtttataactaaagaattaattgaaattatttctggagctgaatcagtttaa

SEQ ID NO: 273699 - DNA, 1543 bp, Unknown
  Bacterial polypeptide expressing nucleotide sequence isolated from the Sargasso Sea
catgcaactgaattccactgaaatcgccgagctgatcaagcagcgcattgcgcagtttgatatcaagagcgaagcgcgtaacgaaggtaccatcgtctctgtgagcgacggtatcattcgtattcacggcctggccgatgccatgcaaggtgagatgattgagctgccgggcaaccgctacgctctggcattgaacctggagcgtgactccgtcggtgcggtgatcatgggttcctatgacggtctgtcagaaggaatgaaagtaaaagggactggccgcattctggaagtgccggtcggtcgtggtctgttgggccgggtgttgaacaccctgggtcagccgatcgacggtaaaggtccaatcgacaacgatggcttctcgccgatcgaagtgattgcaccgggcgttatcgagcgtaagtctgttgaccagccggtccagaccggtctgaaagccatcgatgccatgatccctatcggtcgtggccagcgtgagctgatcatcggtgaccgtcaggttggtaagaccgccatcgcgatcgacaccatcatcaaccagaaagactccggcattaagtgtgtctacgttgcgattggccagaaggcctccaccatcgccaacgtggtgcgcaagctggaagagcacggcgccctggccaacaccatagtggtggttgcctctgcttccgaagctgccgccctgcagtacctggctccgtatgccggctgctccatgggtgagtacttccgtgaccgcggtgaagacgcgctgatcatctatgatgacctgtccaagcaggccgtagcttatcgccagatctccctgctgctgcgccgtccgccaggacgtgaagcctacccgggtgacgttttctatctgcactcccgtctgctggagcgtgctgctcgcgtcaacgccgagtacgtagagaagtttaccaatggtgccgtgaaaggccagaccggttccctgaccgcgctgccgatcatcgaaacccaggcgggtgacgtatctgcattcgtaccgaccaacgtgatctccatcaccgatggtcagatcttcctgacctcacagctgttcaactccggtattcgtccggcggttgacccgggtatctccgtatcccgtgtgggcggtgctgctcagaccaagatcgtcaagaagctgtccggtggtatccgtaccgcgctggcccagtatcgcgaactggcggcattcgcccagttctcctccgatctggacgacgcaacccgcaagcagctggaccacggtcagaaagtgaccgagctgatgaagcagaaacagtactctccgctgagcgtggctcaccagtctctggtgctgttcgccgcggaaaaaggctatctctccgatgtcgagctgaacaagatcgtcgacttcgaagccgctctgctctcttacgccaatacccagcatgctgagctgatggctgaaatcaatgccaaggccgactacaacgacgcgatcgttggcaagctgactgcgttgctggatgacttcaaggcaacccagacctggtaa

SEQ ID NO: 273700 - DNA, 868 bp, Unknown
  Bacterial polypeptide expressing nucleotide sequence isolated from the Sargasso Sea
gatggccggcgcaaaagagatacgtaacaagatcgggagtgtgaaaaacactcagaagatcaccggcgctatggaaatggtggcagcaagcaagatgcgccgtgcgcaagatcgcatgtctgccagccgtccgtacgctgaaaccatgcgcaaggtgatcggccatatcgctcaggggaacttggaatacaagcacccctacctcatcgaacgtgaggtcaagcgagtgggttacatcgtcgtctccaccgaccgtggcctgtgtggtggtttgaacatcaacctgttcaaggctgccctcaatgatatgaagcaatggagcgcgaaaggagccaaggttgacctggctctgatcggcaacaaggcctccaacttctttgaacggcacggcgccaaggtgaaagctcatgtcgcaggactgggcgataacccgagcgtcaatgacctgattggttcagtcaaggtcatgctgaaggcttacgacaacggtgagattgacaggctgtacctggtgtacaacaagttcgtcaacaccatggttcagcaaccacgagtcgatcaactgctgcctttgcccgtaactgaagacagcaagctcgccaagaaacaccactgggattacctctatgagccggatcccaagcaactgctggataccctgctgattcgctacgtcgaatcccaggtctaccagggggtagtggaaaacttggcaagtgaacaggcagcccgaatggttgccatgcaagccgcgactgacaacgccggtaacctgattaacgatctgcaactggtatacaacaaggcccgtcaggccagtattacccaggaactgacagagatcgtatccggtgctgctgcggtgtaa

SEQ ID NO: 273701 - DNA, 883 bp, Unknown
  Bacterial polypeptide expressing nucleotide sequence isolated from the Sargasso Sea
catgagtaacggtttcatcgtccaaatcatcggcgctgtggtggacatcgagttcccgcaagatgccgtgccccaggtgtacgatgcactgaaggttgtcagcgaaggtcaaggccagggtctggtgctggaagttcagcaacagatcggtggcggcgtcgttcgttgcatcaccatgggctcctccgacggtctgcgtcgtgggttggaagtagtgaatagcggtaaatccatccaggtgccggtcggtgtatcgactctgggtcggatcatgaacgtactgggcgatccgatcgacgaaaaaggtccgatcggtgaagaagagcgttggtccatccaccgcgcggctcccagctacgaagatcagtccaacagcaacgacctgctggagactggcatcaaggttatcgacctggtatgcccgttcgccaagggtggtaaggttggtctgttcggtggtgccggtgtaggcaagaccgtcaacatgatggagctgatccgtaacatcgcgatcgaacacagcggttactccgtgttcgccggtgtaggtgagcgtacccgtgagggtaacgacttctaccacgagatgatggagtccaacgtactggacaaagtatctctggtttacggtcagatgaacgagccgcccggaaaccgtctgcgcgtggcgctgaccggtctgaccatggccgagaagttccgtgacgaaggtcgtgacgtgctgttcttcgtggacaacatctaccgttacacgctcgcgggcaccgaggtatccgcactgctgggccgtatgccttccgcagtaggttaccagccgaccctggccgaggagatgggtgttctgcaggaacgtatcacctccaccaagaccggttccatcacc

SEQ ID NO: 273702 - DNA, 706 bp, Unknown
  Bacterial polypeptide expressing nucleotide sequence isolated from the Sargasso Sea
catggccgagaagttccgtgacgaaggtcgtgacgtgctgttcttcgtggacaacatctaccgttacaccctggccggtactgaagtatccgcactgctgggccgtatgccttccgcagtaggttaccagccgaccctggccgaggagatgggtgttctgcaggaacgtatcacctccaccaagaccggttccatcacctccgtacaggccgtttacgtgcctgcggatgacttgaccgacccgtctccggcgaccaccttcgcccacctggatgcgaccgtcgtactgtcccgtcagatcgcggcactgggtatctacccggccgttgacccgctggactccacctcccgtcagctggatccgctggtggttggcaaggagcactacgagactgctcgtggcgttcagaccgtactgcagcgctacaaagagctgaaggacatcatcgccatcctgggtatggatgaactgtcagaagaagacaaactgaccgtagcccgtgcccgtaagatcgagcgtttcttgtcccagccgttcttcgtggcagaagtgtttaccggttccccgggcaaatacgtgccgctgaaagagaccatccgtggtttccagggcatcctgaaaggcgagtacgacgatctgccggagcaggcgttttacatggttggcagcatcgacgaagttgtcgagaaagccaagaaactgtaa

SEQ ID NO: 273703 - DNA, 1114 bp, Unknown
  Bacterial polypeptide expressing nucleotide sequence isolated from the Sargasso Sea
aaaatcagtgagcgaaccaatgcaaactggattgaaatcaattgatagtctagttccaattggaagaggacaaagagaattaattataggagatagacaaactggaaaaacagcagttgcaattgatgcaattataaatcaaaaaaaaataaatgaatctggcgatgaaaaacaaaaattatattgtgtatatgttgcaataggtcagaaaagatcaacagtaagacaaatagaaaaaacattacaagaagctggagcgatggaatacacaacaattgttgcagccactgcatcagatgctgcaccacttcagtttttagctccgtatacaggttgtaccatgggagaatattttagagataacggaatgcacgcacttataatctatgatgacctttcaaaacaagctgttgcttatagacaaatgtcattattactaagaagaccgccgggaagagaagcatatcctggagacgtattttatcttcacagtagattacttgaaagagctgcaaaattgagtgatgaacacggcggaggatcacttacagcacttccaattattgaaactcaaggaggagatgtttctgcttttataccgacaaatgttatttcaattaccgatggtcagatattcttagaaacagaactttttaaccaaggaataagacctgctattaacgtaggtttatcagtatcaagagttggatcttcagcacaaactaaagcaatgaaaaaagtttcaggttcaatgaaacttgagctagcccaatacagggagatggcagcatttgctcagtttggttcagatttagatgcatctactcaaaaattattaaatagaggttcaaaattaacagaacttcttaaacaaagacaatattcaccaatgacagttgctgagcaggtgatttcagttttctgcggagtaaggggtcacttagatgatattgaacaaaaagatatagcaaattttgaatctaaaattatcgagaaatgtaaatcagaaaaaccagaaataattaattcaattaactcctcaggtaaattagaggaagatagtgaaaaagcattaagtgaattgattgttgaacttaaaaaaaactttaattaa

SEQ ID NO: 273704 - DNA, 960 bp, Unknown
  Bacterial polypeptide expressing nucleotide sequence isolated from the Sargasso Sea
gaaaaactgtaattataatggaacttataaataatatagctaaggcacacggtggattttcagtattcgctggagtgggagagagaactagagaagggaacgatttatatcacgaaatgatcgagtcaggagtaatcaagccagagggaactgggtctaaagcagcattagtttatggacaaatgaatgagcctccaggagctagagctagagtagctttaactggtcttactgtggcagagtatttcagggatcaagagggtcaagatgttttgttctttgttgataacatttttagatttactcaggcaggttcagaagtatcagctcttctaggaagaatcccttcagcggttggttatcagcctactcttgcaacagatatgggaaacctgcaagaaagaattacaacaactaataaaggatcaattacatctgttcaggcaatttatgtacctgcagatgatttaacagatccagctccagcaacttctttttcacacttagacgcaacgactgtactttcaagacaaattgctgaattaggtatttacccagctgttgaccccttggattctacttctagaattttagatccaagagttgttggtgatgaacactatcgagtagcaagatctgttcagaaaattttacaaacatacaaatctttgcaagatattattgcaattctaggaatggatgagctatcagaggatgataaacttaccgttgctagagctagaaaaattcaaagatttttatcacaacctttctttgtggctgaagtatttacaggatctccaggtaaacttgtagatttagagtcaacaattaaagggtttgacgcaatatgcaaaggagaatatgaccatctgcctgaagctgctttttatatggttggcacaatagaagaagcaatagaaaaagctgaaaaaatggcaaaagatgcagctgcttaat

SEQ ID NO: 273705 - DNA, 1420 bp, Unknown
  Bacterial polypeptide expressing nucleotide sequence isolated from the Sargasso Sea
tatgaaaaaaggaaaaattacacagattattggagcggtagtagatgttaaattcgacggagaattaccagaaattttaacagcattagaatgtgataacagtggcaatagacttgttttagaagtagcacagcatttgggagagtcaagtgtaagaacaattgctatggatgcaacagagggtctaaaaagaggagatgaagtaacagatactggggctccaattaaagttcctgttggtcctgaaacattgggaagaattataaatgtaataggcgaacctattgatgaaaaaggaaaagttcaaactaaagaaaattggccaattcatagatcggcaccagaatttaatgaccaatcaacagagacagaaattttagtaactggaattaaagtagttgatttattagcaccatacgcaaagggtggtaaaattggtttatttggtggtgcaggagtaggtaaaacagttcttattatggaattaattaacaatgttgcaaaagcacatggaggattttcagttttcgctggagttggagagagaactagagaaggaaatgatctctatcatgaaatgatagagtctggggtaattaaaccagaaggcaaaggatcaaaagcagctttagtttacggtcagatgaacgaaccaccgggagcaagagcaagagttgcattatcaggattaacagtagctgaatattttagagatcaagaagggcaagatgtactttttttcgtagataatatttttagatttactcaagctggatctgaagtgtctgcgttattaggaaggataccttctgccgtaggatatcagccaacattagccactgatatgggaaatcttcaagaaagaattacaactacaaacaaaggatctattacttctgttcaagccatatatgtacctgcagatgacctaacagatcctgcgccagctacatctttttcacacttagatgcaacaacagtgttatctagacaaattgcagaaattggaatttatccagcagttgacccattagactctacttctagaattttagacccaagaatagttggagacgaacattatagagttgctagagaagttcaaaaaatattacaaacttataaatctttacaagatattattgcaattttaggtatggatgaactatctgaagaagataaattaactgtagctagagctagaaaaattcaaagatttttatcacaacctttctttgttgcggaagtatttacaggttctccaggaaaacttgttgatctagaatccacaattaaaggctttgatgcaatttgcaaaggtgaatatgatcacttacccgaagcagctttttacatggttggaactatagaggaagctattgaaaaagcagaaaaaatggcgaaagaggcagcagcataa

SEQ ID NO: 273706 - DNA, 535 bp, Unknown
  Bacterial polypeptide expressing nucleotide sequence isolated from the Sargasso Sea
atcgattacttcagtacaagcaatttatgttccagctgatgatcttaccgatcctgctcctgcaacttcatttgctcatttagatgcaacgactgtactctctagacaaatagctgaaattggtatttatccagcagttgatccactagactctacatctagaattttagatccaagaatcgttggggatgaacattatagagtagcaagagatgtacagagaatacttcaatcttataaatccttacaagatattattgctattcttggaatggacgaactatcagaagaagataaattagtagttgcaagagcaagaaaaatacaaagatttttatcgcaacctttttttgttgcagaagtctttacaggatcacctggaaagttagttgatctagaatcaacaattaagggtttcgatgctatttgtaaaggtgaatatgaccatttacctgaggctgctttttatatggttggtactatcgaagaggctatagaaaaaggagaaaaaatggcaaaagaggctgcagcttaa

SEQ ID NO: 273707 - DNA, 766 bp, Unknown
  Bacterial polypeptide expressing nucleotide sequence isolated from the Sargasso Sea
atgaatgaaccacctggaacaagagctcgtatagcattaacaggattaacaatggcagaatactttagggaagttggaaagcaagatgtattgttatttgtagataatgtttatagatatactttagctggaatggaagtttctgccttactaggtagaatgccatctgcagttggatatcaaccaactcttgcaactgaaatgggtgatttgcaggaaagaattacctccacagttgatggatctattacatcatttcaggcagtgtatgtgccagcggatgattataccgacccaggtattgttactacttttggacatttagacgcctcaatatctttagagagatcattagcagctcaagcactttttcctgctgtagaccctttagcctcaaattcaagaattatggagccaggaatagtgggagaagatcactataacaccgcaagagaagtacaagaagttctgcagagatttaaagatcttcaagatgtaattgcaattcttggtattgaagaattatcagaagaagatcgtgagatagtatttcgagcgagaaaaattcaaagatttttaacgcaaccttttcatgtaggagaagtatttactggtattcctggaaaatatgtcaaagtcgaagatactgtcaaaggctttagagagatattaagtggtcagcatgatgacctacctgagcaggcattttatatggttgggacaatagaagaggctgtagaaaaagcaaaaaccttaaaaagttaat

SEQ ID NO: 273708 - DNA, 1096 bp, Unknown
  Bacterial polypeptide expressing nucleotide sequence isolated from the Sargasso Sea
gttgataggaagagtagtcgatcctcttggtagacctatagatgggaaagggtccattaaaactaattcaactgcaccagttgaaaagcctgcccccaatgttgttagcaggaagtctgtagatcaaccagttcagtttggagttaaagttgtagatgcattagttccagttggaagaggtcagagagaattaattattggagatagaagtacaggtaaaactgctgtagctatagattgcataattaatcaaaaaggtggagacctgatatgtatatatgtggggataggtcaaaaatcttctaaagttgcaagcgtagttgatacattaaacaaatatgatgcaatggagcacacaattgttgttgctgcaaatgcgtccgactctgctccacttcaatacctagctccttactcaggttgcgcaatggctgaatattttatggatcaaggaaaagatgttttaattgtatatgatgatttaagtaaacatgcttgggcttatagacaaatgtctcttctgttaagaagaccagctggaagagaggcatatccaggagatgtattttatcttcattctagattgctggaaagagcagcaagagtagaggaagagtatggaggaggatcaataactgctttacctgtgattgaaactcttgctggtgatgtttctgcatatgtgcctacaaatgtgatctcaataactgatggccagatatatttagaatcagatttatttaattctggtgtgcgacccgctctaaatactgggctttctgtaagtagagtaggaggttcggcacaagcaaaagccatgaagaaagtttctggaagtttaaaaattgaacttgcacaatacagagaattggcagcttttgcccaatttgggtctgatgatttagatgatgttacaaaaaagcaattaagcagaggagcaataatagttgagttattaaaacaacctcaatatgaaccagttcctttagaaaatcaagttacattgctttatttagcatcagaaggattgctggataatattgatgtttcagatgtagcagaatatgaaaaatcttggaatgaatatgcgaactca

SEQ ID NO: 273709 - DNA, 898 bp, Unknown
  Bacterial polypeptide expressing nucleotide sequence isolated from the Sargasso Sea
tatgagtgatggaaaaattgttgagataattggagcagtagttgacgtagagttccctaaagactctattcctcaagtatttgacgcgctaaaagttgacgaggctagtttaacactagaggttcaacaacaattaggtgacggaattgtaagaacaattgcaatgggagcgacagatggagttaagcgtggttttgacgttaaaaatactggagctccaatatcagttccggttggggagaaaacacttggtagaatcatgaatgttttaggagatccggtagatcaaaaaggtccagtaggtagcgaaaaaacattgccaattcatagaaaacccccttcttatgaggaacaagctggaggaaatgaattattagaaactgggattaaagtcattgatctcctctgtccctttgccaaaggaggaaaagtaggtttatttggtggtgccggcgtggggaaaactgtaaatatgatggagcttattagaaacattgctatcgagcatagcgggtattcagtatttgctggcgtcggagagagaaccagagaaggtaatgatttctaccatgaaatgagagaatctaacgtacttgataaagtatcgttagtttacggccaaatgaatgaaccgcctggtaacagattaagagttgcattaactggtttgactatggctgaacattttagggatgaaggtcgtgatgtattgatgtttattgataatatctatcgttacacgcttgctggaacggaagtgtctgccctacttggaagaatgccttcagctgtaggttatcagcctaccctagctgaagaaatgggtgcgcttcaagaaagaattacatcaacacaaaaaggatcaattacttcaattcaagcagtgtatgttcctgct

SEQ ID NO: 273710 - DNA, 265 bp, Unknown
  Bacterial polypeptide expressing nucleotide sequence isolated from the Sargasso Sea
atggatgaactttctgaagaggacaagctcactgttgcaagagcaagaaaaatacagagatttttatctcaaccattttttgttgccgaggtttttactggtacacctggaaaacttgtcaacctagactcaacaataaaagcatttgatgccatttgcaaaggtgattatgatcacttaccagaagcagctttttatatggtaggaacaattgaagaagcagttgctaaagcagaaaaaatggccaaggaagcagcagcttaaa

SEQ ID NO: 273711 - DNA, 1042 bp, Unknown
  Bacterial polypeptide expressing nucleotide sequence isolated from the Sargasso Sea
gtagatttgtcagattcaaatgaaattctagaaacaggcattaaagttatcgatctagtttgtccatttgccaaaggcggaaaagttggattatttggcggtgctggcgttggaaaaacagtcaacatgatggagctgattagaaatatagcgattgagcattcaggctactcagtttttgccggcgttggagaaagaaccagagagggaaatgacttttatcatgaaatgacagattcaaatgttttagacaaagtttctcttgtttatggtcagatgaatgagcctccaggaaataggcttagggttgctttaactggcttaaccatggctgaaaaatttagagatgaaggaagagatgttctgctttttgtagacaacatctatagatatactttggctggggttgaagtgtctgcattattagggagaatgccttcagctgttggatatcaacctacacttgcagaagaaatgggagtgcttcaagaaagaattacatctacaaaaacaggctcaatcacatcaatacaagcagtttatgtgcctgctgacgatttaacagacccatctcctgctacaacttttgctcatttagatgccacggttgttctttcaagaagaattgcagaattgggaatataccctgctgtagatccgctcgactcaacatcaagacagctagacccgcttgttgtaggacaagaacactatgaagtggcacaaagagttcaaggtgttttacaaagatataaagaacttaaagacattattgctattctcggcatggatgaactatctgatgaagataaaaacacagtgtcaagagcaagaaaagttgaaaaatttttatcacagccatttttcgttgccgaagttttcacaggatcaccaggaaaatatgtctctgtaaaagatacaatccaagggtttaaagaaattcttgatggcgttcatgatgatgtgccagaacaagctttttatatggttggttccatagaagaagctttagaaaaagctaagacggttaaaagtgattaat

SEQ ID NO: 273712 - DNA, 1549 bp, Unknown
  Bacterial polypeptide expressing nucleotide sequence isolated from the Sargasso Sea
aatgactacaaaaataaacccatcagaaatatcaagcatcattaagaagaagattgatgactataaaggggctgctacagaagctaatgttggtgaagtcctttccactgcagatggcattgtccaaatttatggtttagaagatgcaatgtatggggagctgttagatttcggagaaggaacatatggcctagctttaaatcttgaaacagattccgttggcgctgtagtgctaggtgactcaggacacataaaagaaggacaaaaggtaaaaaccaccggaaggatacttgaggttccagttggcgaaggtttaaaaggaagagttatagatgccttgggcagaccattagacggaaaaggcgaaattaaatcgaaacataatgctcctattgaggttgtggctccgggcgtaatcgataggcagtcagtggatcagccagtacaaacaggaataaagtcaattgatgtaatggttcctattggaagaggacaaagagaattaattatcggagacagacaaacaggaaaaacagcaattgctgtagacaccatagttcatcaaaaaaattctggcataacttgtgtttatgtagctattggccaaaaacaatcaacagtggcaacggtagttaggcaactagaggaagcagacgcacttaaaaacacaatagttgtttcagcaacagcagcagaaagcgcatcattgcaatttcttgcaccatattcagggtgcacaatgggcgaatactttagagatattggtgaagacgctttaattatttatgacgatctatcaaaacatgcgatagcttacagacaaatatctttattacttaaaagacctcctggaagagaggcttttccaggggatattttctatctacactcaagacttttagaaagagcatctagagtcaatgctgagtatgtagaaagggttactgatggaaaagttaaaggaaaaacaggctcattaactgctcttcctataattgaaacacaggcaagcgatgtttcggcttttattccaacaaacgttatctcaattacagacggacagatattcttagaaacagatttatttaattcaggaataaggccggctattaacccaggcatttcagtttcaagggttggtggagcagcgcaaaccaaaataatgaaaaagcttggtggcggagtcaaactagcgcttgcacagtttagagagcttgaatctttctcacaatttgcatcagatttagatgatgctacaagagagcagcttgaaaacggacaaagaataacagagctattaaagcagaagcaattctctccacgatcagttgcatgcgtttctatcgttttgtatgccattgaaaataagtatttaactaatattgaaaaagagaagatgcaatcttttgaagacaacctaagaacatatttcaaatcaaatcacaaagatgtttgggaagaggttaataaaacaggcgattggaatgatgatttagagaagaagtacaaaactattcttgacggctttataaaggaaggatcttggtaa

SEQ ID NO: 273713 - DNA, 1423 bp, Unknown
  Bacterial polypeptide expressing nucleotide sequence isolated from the Sargasso Sea
aatgagtgaggaaaaaggtagagtatcgaaaatagcgggaccggtagttgatgttgcatttccattggatgcattaccggaattaaattatgctcttgaagttgatgtagaggttgatggagaaacaaacacaattgttcttgaagtcgcacagcatttaggtgaaggaaaaattagagctatttctatgcaaggtacagacggtcttcgtagaggtgctgaggttactaataccggtgctcctatttccgttcctgttggccaagctacgttaggtcatatctttaacgtttatggacgttcattagatgttcctactgattctcttgacattaaagagaggtggccaattcatagaaacccacctcctttcgaagaagtgacagcgcaaaatgaaatgtttgagactggcatcaaagttattgatctattaatgccttatgtacaaggtggaaagattggattattcggtggtgctggtgtaggaaaaactgttcttatccaagaaatgattaacagagttgcaacacaccatagtggagtatctgtattcgctggtgttggagaacgaacaagagaaggaaacgaccttttccgagagatggaagagtcaggagttattgataagactgcattagtgttcggtcagatggatgaaccgcctggtgttagattacgagtagctctttcggccttaacaatggcagagtattttagagatgtagaacaacaagatgtattgttatttattgataatattttcagatttagccaagctggttcagaggtgtcaacattattaggacgtatgccttcagctgttggttatcagccaacacttgctgatgaaatgggattccttcaagagagaattacttctctaaaaggtaggtctattacatcattacaggctgtatatgtgcctgctgatgatattacagaccctgctcctcacacagcttttgctcacttagatgcaagaacagtgctttcaagagcaatatctgacttaggaatttatcccgcagttgatccactcgactcttcaagtcgaatattggatccaaagattgttggagatgaacactacacaactgctagagaagtacagagagttcttcaaaggtataacgatcttcaagatattattgcaattcttggattagatgagttgtcagaagaagacaagcttattgttggtagagcaagaagaattcaaagattcttatcacaaccaatgtatgttgcagagcagtttactggtattgaaggtaagttcgtatctattaaagactctgtagaggcctttaagacaattctcagcggcgatatggatgctatacctgagcaagcattctatatgacaggtggacttgatgaagtccatgagaaagcaaaggagcttgaaagctcttcagcatag

SEQ ID NO: 273714 - DNA, 808 bp, Unknown
  Bacterial polypeptide expressing nucleotide sequence isolated from the Sargasso Sea
attgagggaggcgttttggataaggttgctcttgtgtacggacaaatgaatgagcctcctggaaacagactaagggttgctctctctggacttacaatggcagaaaactttagagatgaaggtcgagatgttctgttgttcgttgacaatatttatcggtacactttggctggaacagaatgttcagccttgttaggtaggatgccatctgcggttggatatcagcctacacttgcagaagaaatgggtgtccttcaagaaagaattgcgtccactaaaacaggatcaatcacttctgttcaggcggtctatgttcctgcagatgatttaactgatccctcaccagctacaacattcgctcacttagatgcgaacgtggttttatcaaggcaaattgcttctttaggtatctaccctgctgttgaccctttagattcaaacagcagacagctagagcctgcaatcgtaggtcaagagcactatgacgttgccaatgccgtaaagcaacagctgaatagatataaagaattaaaagatatcattgccatcctgggaatggacgagttatctgaagatgacaagttagtcgttgccagagcaaggaaaatagagagattcctatcccaacctttctttgtggcagaagtattcaccaatgctccaggaaaatacgtgccacttagtgaaacgattcgagggtttaaaggaattgttaatggagactatgacgatatacctgagcaagctttttacatgaccggtaatattgatgaggttgttgaaaaggctaaaaccgaagccgcttaat

SEQ ID NO: 273715 - DNA, 942 bp, Unknown
  Bacterial polypeptide expressing nucleotide sequence isolated from the Sargasso Sea
tatgagtaatggaacagtaatacaaataattggagcagtaattgatgtcgagtttccaaaggaaaacttacccaaaatctacgacgcattaactgttgatgaaactggacttgttctagaggtgcagcagcagttgggtgacggtgttgtaagaacaattgcaatgggtgcctcagaagggcttaaaagaggtgtgtcggtaaccaataccgaaaatccaatatctgttcctgttggagaagctacacttggaaggattatgaatgttctgggagaaccgattgatgaaaagggccctgtggatgcaaaatctgcaatgccgatacatagaaatccgccttcatatgaggatcaggcagagactactgaacttttagagacgggcatcaaagtaattgacttaatatgtccgtttgcaaaaggcggaaaggttggtttatttggtggtgctggagtggggaaaacggtaaatattcaagagctaataagaaatattgcatacgagcatagtggatattcggttttcgctggtgtgggagagaggacccgtgaaggaaatgatatgtaccacgagatgattgaaggtggtgttttggacaaagtagccctggtttacggacagatgaatgaacctcctggaaacagattaagggttgctctttctgggcttacaatggctgaaaactttagagatgaagggcgtgatgttcttttattcgtagacaatatctatcgatacaccttggctggaacagaatgttcagctttattaggcagaatgccatctgcagttggttatcagcctacacttgcagaagaaatgggtgttcttcaagaaagaattgcatccactaaaacaggatcaatcacatctgttcaagcggtttatgtccctgcagatgatttaacagacccttcaccagctacaacattcgctcactt

SEQ ID NO: 273716 - DNA, 1537 bp, Unknown
  Bacterial polypeptide expressing nucleotide sequence isolated from the Sargasso Sea
aatggaaattaaagcagcagaaatatcatctgtaataaaagatcaaatcgctaattttgaaactaaagcagatgttgctgaggttggaactgttttaagtgttggtgatggtatcgcccgagtttatggattagataaagtgcaggcaggtgaaatggttgagtttcctggaggcattaaaggtatggctcttaacttagaaatggataatgttggtgtctcaatttttggtgatgatacaggtattaaagaaggtgatacagttaaacgaacaggagagatcgttgatgtacctgtaggcaaagagttattaggacgtgttgtagatggtctaggaaatccaattgatggaaaaggccctattaaatcatctgaaaaaagaagaatagaattaaaagcaccaggtataattcctcgtcaaagtgtatcagaacccatgcagaccgggattaaagctctagatgcccttgtgcctgttggaaggggtcaacgagaacttataattggtgatagacaaacaggtaaaactgcagttgccattgatactatacttaatcaaaaatctgttaaccaatctaataatgaaaaagaaaaactttattgtatttatgttgctattgggcaaaaaagatcaacagttgctcagattgttaaaactttagaagataatggcgctatggaatatacaattgttgtatctgcaacagcttccgaacctgcccctcttcaatttttatcagcttacacagggtgtacaatgggagaatattttagagataatggaatgcatgcacttattgtttatgatgatttatccaaacaagcagttgcttatagacaaatgtcattattattaagaagacctccaggacgtgaagcatatccaggagatgtattttatattcatagccgtcttcttgaaagagctgctaaaatgagtgatgagcatggtggaggaagtttaacagctttacctattattgaaactcaagcaggagatttatctgcttatattcctacaaatgttatttctattaccgatggacaaatatttttggaaactaatttattttttgctggaattcgtcctgccatcaatgttggtctatcagttagccgtgttggctcagctgcccaaacaaaagcaatgaaaaaaattgctgggccagttaagttagaattagctcagtaccgtgaaatggcagcattcgctcagtttgcatctgacctagacgcttctacaaaacaattacttgatcgtggtgcaagattagttgaaattttaaaacaaggccaatattcacctttaacagtttcagaacaagttgtatcgatctatgcaggtgtgcgtggttatcttgataaagtagctgtaaatgatgttgttaaatttgagtcagaagttttgaacgaaataagaagtaagcattctgatttattggaagctattgctaatgaaaaagagctctccaaagaaaatgatgaaaaattaaagtcaatattagatgatcttgttggaaaatttgcgagtaattaa

SEQ ID NO: 273717 - DNA, 1311 bp, Unknown
  Bacterial polypeptide expressing nucleotide sequence isolated from the Sargasso Sea
tatggcaaataatttaactggaaaaatatcacaagttcttggagctgttgtggatgtagagtttgatggtgaacttcctgcaatcatgaatgccttagaagttgacaataatggaacaagattaatgcttgaggttgctcagcatttaggtgaaaatgctgttcgcacaattgctatggatacaactgacggattagtaagaggtcaaactgcaacagatactggcgcccctatttctatgcctgtagggccagaaacacttggtcgtattatgaatgttgttggtgagcctgttgatgaaagaggtgatattggcgcaacaaaaacctatccaattcatcgacctgcaccagagtttgttgatcagtcaacggaaacagaagttctcgtaacaggtattaaagttgtagatttgctagccccctatgctcgtggtggtaaaattggattatttggtggcgctggtgttggtaaaacagttttgattatggagctaattaataatattgccaaagcacatggtggttattcagtttttgccggtgttggtgaaagaacacgtgagggtaacgatctctatcatgaaatgattgagtctggcattattgatcttaaaggtaaagaatctaaagttgcattagtctatgggcaaatgaacgaacctcccggagcaagagcaagagtagcattatctggactaacacaagcagaatactttagagatgaagaaggtcaagatgtactattttttgttgataatatttttcgttttacacaagctggatctgaagtatcagcacttttaggtcgtatcccgtcagctgttggttatcaaccaacattagctacagatatgggtgcattacaagagcgtattacaacaacaaaaaaaggatcaattacttcggttcaagctatttatgtcccagctgatgacctaacagatcctgcacctgcaacatcattctctcacttagatgcaactacagttctaaatagagcaatttctgaaaaaggaatttatcctgctgtcgacccacttgactcaacatcaagaatattagaccctcaagttgttggtgacgatcattacagagttgctagagaagttcaaagagtcttacaaacttataaaagtcttcaagatattatagctatattaggaatggatgaattatcagaagaagacaaactaacagttgcaagggcaagaaaaattgaaaaatttttaagccaacctttttttgttgctgaaatttttactggatctcctggtaaatatgttgatttagaagatactataaaaagttt

SEQ ID NO: 273718 - DNA, 964 bp, Unknown
  Bacterial polypeptide expressing nucleotide sequence isolated from the Sargasso Sea
tatggctaataatttaactggaaaaatatcacaagttcttggagctgttgtggatgtagagttcgatggtgaacttcctgcaatcatgaatgctttggaagttgataataatggaacaagattaatgctagaggttgctcagcatttaggtgaaaatgcagttcgtacaattgcaatggataccactgacggattagtaagaggtcaaacagcgactgatacaggtgcccccatttctatgcctgtaggtccagaaacacttggccgtattatgaacgttgttggagagcctgttgatgaaagaggtgacattgggacaacaaaaacttatcctattcacagacctgcccctgagtttgttgaccagtctacagaaactgaagttctagtaactggaattaaagtagttgatttgttagctccctatgcccgaggtggtaagatcggattatttgggggagctggtgttggtaaaacagttttgattatggaattaatcaacaacattgcgaaggcacacggtggttattctgtgtttgctggtgttggtgaaagaactcgtgaaggtaatgatttataccacgaaatgattgaatcaggcattattgatcttaaaggtaaagactctaaagttgccctcgtgtatggtcaaatgaatgagcctcctggagcaagagcaagagtagcgctatcaggtttaacacaggcagaatattttagagatgaagaaggacaagatgtgttattcttcgttgataatatttttagatttacgcaagcaggatccgaggtttcggccctcctaggacgtattccatctgccgttggttatcagccaacacttgcaactgatatgggtgctttacaagagcgtatcacgactactaaaaaaggatctattacatcagttcaggctatttatgttcctgctgatgacttaacagaccctgcgcctgcaacatct

SEQ ID NO: 273719 - DNA, 748 bp, Unknown
  Bacterial polypeptide expressing nucleotide sequence isolated from the Sargasso Sea
atggaaattaaagcagctgaaatttcatcagtaattaaagatcagattgccaattttgaaaccaaagcagatgttgctgaggttggaactgtattaagtgtaggagatggtattgcacgtgtgtatggtctcgatcaagtacaagctggtgagatggtggaattcccaggcggtatcaaaggtatggccctcaaccttgaaatggataacgttggtgtttcaatcttcggtgatgatacaggtattaaagaaggtgatacagttaaaagaacaggagaaatcgttgatgttcctgttggtaaagaattattaggtcgtgtagttgatggcttaggaaatccaattgatggaaaaggtccaattcaatcatctgaaaaaagaagaattgaattaaaagctccaggaattattcctcgtcaaagtgtatccgaaccaatgcagactggtatcaaagctcttgatgcccttgttccagttggtagaggtcagcgtgagttaattattggtgatagacaaacaggtaagacagcagtagctattgatactattcttaaccaaaagacagttaatcaatcaaataatgaaaaagaaaaactctactgtatttatgttgcgattggtcaaaaaagatcaacagttgcacaaattgttaaaactttagaagacaacggagcaatggattacacaatcgttgtatcagctactgcttctgagcctgctccacttcaatttttatcagcgtacacag

SEQ ID NO: 273720 - DNA, 691 bp, Unknown
  Bacterial polypeptide expressing nucleotide sequence isolated from the Sargasso Sea
tatgagcaacggaacagttacacaaattattggagcggttatcgatgtcgaattcgacaaagataatatccctaaagtgtatgaggcacttatggttgatgagagcggaacaactcttgaggttcagcagcaattaggtgatggtgtcgtaagaacaattgctatgggagcaactgagggcttaaaaagaggtctttcagcatcgagaaccaacgctcctatttcagttccagtcgggccagagacactgggaagaattgtagatgttcttggcaaccctattgatgaaaaggggccgatcggtgaaaaggcaaaaatgccaattcacagaaaaccaccaagctatactgatcaatcggcgtcaaatgaagttctagaaactggaatcaaagttattgatcttatgtgcccttttgcaaaaggtggaaaaataggactatttggtggtgcgggtgttggaaagactgtaaatatgatggagcttattaacaatattgcacttcagcattctggtctttctgtatttgctggagtaggtgaaagaaccagggaaggtaatgatttctattatgaaatgcaggaatctggagttgttaacatcgacaacctcggcgaatcaaaagttgcaatggtttacggacagatgaatgaacctccaggaaacagacttagagttgccctaaccggatta

SEQ ID NO: 273721 - DNA, 853 bp, Unknown
  Bacterial polypeptide expressing nucleotide sequence isolated from the Sargasso Sea
atgagtcaattaaatccatcagaaatatctagcgttttaaaagagaaaattgctggtttggatctttctgcagaaagaaaaaatgaaggtattgttgttagtgtgtctgacggcatagtaagaatacatggcatgggagacgtaatgtatggtgaggttatagagtttgaaaatggcactaagggcatggccctaaacctagagcaagactccgttggagcggttgtcttaggagattatttagaaataattgaaggtcaaaaagcagtttgtacaggaaaagttttagaggttccagttggtgaggctatgttaggaagggtagtaaatactttgggtgctccaattgatggaaagggtgaaataaaagcagaaaatactgcgcctgttgaggttgttgctcctggtgttattgctcgtcaatctgttgatcaaccagttcagattggtttgaaagcagttgatgccatggttccaatcggtagaggccaaagagaattaataattggagacagacaaacgggcaaaacagctgttgcaattgatgcaattattaaccaaaaaggaactggtattaaatgtatttatgttgctattggtcaaaaacaatcaacagttgcaaatgttgtcagaaaattagaagagtatggggcaatggagcatacgatagttgtatcagcgacagctgctgatcctgcaccaatgcaatatctttcagcatacgcaggatgcacaatgggagaatatttcagagacaaaggagaggatgcattaattgtttatgatgacctttcaaaacaagcggttgcttatagacaggtatcattattattaaaaaagcctccaggcagag

SEQ ID NO: 273722 - DNA, 1420 bp, Unknown
  Bacterial polypeptide expressing nucleotide sequence isolated from the Sargasso Sea
tatggcaaaaggtgataaaggaaaagttgtacaagttattggtactgttgttgatgtaggttttgaccaaaatcaacttccagagatttttcatgctctagagcttgaaaatgaaggagaaagattggttttggaagtagagcaacatgttggtaattcatgggctagatgtcttgcgctgggacctacagaaggattagctagaggagtagaagttgttgatactggagctcctgtttcagtaccagttggtaaggattcattaggcagactatttaacgtaataggagatccaatagatgatggtgagcctattaataaagaagctattagatggcctatacatagaaaagcgcctgactttgatcaacaatctggttcagtagaagttctagaaacaggaattaaagttttagacttaataactccattcgctaaaggtggaaaaatcggtgcttatggaggtgcaggtgtaggtaaaacagttattatcactgagctaattagaaatattgctcaagaacactcaggtgtatcagtgtttgcaggtgttggagaaagatcaagagaaggaaacgatttatatcacgaaatgcaggattatggagtactaaattctactgcattagttttcggacaaatgaacgaacctccaggaactagagcgagaattgctcttacaggtctaactatggctgaatattttagagacgaacaaaaacaagatgttttattattcgttgacaatatttatagatacattcttgcaggtatggaagtgtcagccttattgggtagaatgccttcagctgtaggttatcaaccaactctttcaacagaaatgggtgatttagaggaaagaattactacaactgtaaatggttcaattacatcatttcaagctgtttatgttcctgctgatgattatactgaccctggtattgttactacttttggacatttagacgcgaacgtttctttagatagatctttagcagctcagtttttgttccccgctgttgatcctttagcctcaaattcaagaattatggagcctgcaatcgttggggaagatcactataatgcagctagaggagtacaacaagttcttcagagatataaagatcttcaagatgttatagctattttgggtattgatgagttgtctgaagaagaccaaataattgtagctagagcaagaaaaattcaaagatttttaactcaaccattttttgtaggtgaagttttcactggaatacctggaaaatatgttccggtagcagaaacagtaaagggatttttagaaattctagatggaaagcatgacgatctgcctgaacaagccttttacatggttggaggtattgaagaagcagtagctaaaggtgaagaaatgaaacagcaaatagagaataactaa

SEQ ID NO: 273723 - DNA, 895 bp, Unknown
  Bacterial polypeptide expressing nucleotide sequence isolated from the Sargasso Sea
atgccaagtttaaaagatatcaaaactcagattaactctgtagtttctacaaagaaaatcacaacagcaatgaaaatggttgcggcaagcaaattgcgaagatcacaagagaaagcagttgcagcaagaccatactcttcacgcttagaggaaatgttatcttcactggcatcttcagcagcatctggagaaggtattattaagcttcttaccggtactggtaatgatcaaaattatatcgttgttcctgttagtgctgacagaggtctttgtgggggtttcaatagcagtattaatagagaaacatttaagttggttaaatctttacagaatgatggtaagaatgttcaacttatgcctgttggaaaaaagagtagagattttttcaatcgtgtgatgaaagaacaaattgttgagagctttattgatcttaatgtatcaaataatggttatgattctgcactaaatgtatcaaacaaacttcaagatttatattttgagggaaaatttgataagtgtattttagtcttcaacaaatttaaatcagcaatttctcaagaagtaacacaacaacagcttattccattagatgtatcagagtcatcaaaagaagaaaaagaagataacaatgatgcaaaagcaatttatgattatgagcctgatgaagaaactattttaaaagacttacttccaaaaaatgtttctattcagatttttaaagtattactagaaagtgatgctggtgaacatggagctagaatggcagcaatggataatgccacacgtaatgctggtgaaatgatagatgggttaacactaaaatataacagaacgcgacaagcgtttataactaaagaattaattgaaattatttctggagctgaatcaatttaaa

SEQ ID NO: 273724 - DNA, 949 bp, Unknown
  Bacterial polypeptide expressing nucleotide sequence isolated from the Sargasso Sea
ttcaactgtagcaggtattgcaaaaactttagaagaaaaaggtgctttagagtacacggttatagttgcagcaaatgcttcagatcctgctcctatgcaagtatttgctcctttttcaggcgcctgtataggagagtattttagggatacaggaaggcctgctttgataatatatgatgatttatcaaaacaagcagttgcttacagagaggtgtcacttctgttaagaagacctccaggaagggaagcatacccaggagatgtattttatcttcattcaagactattagaaagatcggcaaaggttgtaaatgatgataaagttgcaagcggaatgaatgatctaccagtttctttaaaatcaaaagtaaaaggaggaggatcactaacagctcttccaattattgaaactcaagctggagatgtttcggcatatatacctacaaatgttatatctattacagacggtcaaattttcttagaatcagatttatttaattcaggagttagaccagctattaacgttggtatatcggtttcaagagttggaggatcagcacaaattaaatccatgaaaaaagttgcaggtactcttaaacttgaccaagctcaatacagagagcttgaagccttttcaaaatttggttcagatcttgatgctgcaacacttaatgtaatagaaaagggtagaaggaatgttgaaattcttaaacagaatcaaaatgatcctttccaagttgaggatcaagttgctattatctatgctggatctcaaaatttacttaaagaagttccagttgaaaaagttaaggcatttgaagaagcttttcttcaagagcttagaaaaaacaataagaaacttttagcagaattaaaatcaggaaaaatatctgataaagaaacagatgaaattaaaaaagtagctgaaaaaattgctaagtcattttaa

SEQ ID NO: 273725 - DNA, 658 bp, Unknown
  Bacterial polypeptide expressing nucleotide sequence isolated from the Sargasso Sea
tatgagcaaaggaataatcacacaagttattggagcagtagtagatgttaaatttgatggagaccttccagaaattttaaccgcgttagagtgtaaaaatggtgacaacagattagttttagaagttgcccaacatttaggagaaactactgtaagaacaattgcaatggatgcgactgaagggttaaaaagaggtgatgaagtaacaaatacaaatgcaccaatacaagtcccggttggaccagaaactcttggaagaattataaatgtaattggagaaccaattgatgaaagaggagaagttaaaacaaaagaaacatggccaattcacagagctgcgccagaatttaatgaccaatcaactgaaacagaaatattagttacaggtataaaagttattgatcttctagctccttacgcaaaaggaggaaaagtagggctttttggaggagcaggagtaggaaaaactgtattaatcatggagctaattaacaacgttgctaaagctcatggaggtttttcggtcttcgcaggagttggtgaaagaactagagaaggaaatgatctttatcatgagatgatagaatctggagtaatcaaaaaagatggagatggatctaaagccgccttagtttatggacagatgaatgaacctcca

SEQ ID NO: 273726 - DNA, 841 bp, Unknown
  Bacterial polypeptide expressing nucleotide sequence isolated from the Sargasso Sea
aatggaaataaatccttcagaagtaacaaagatattaaaagaacaaattaaaaattttggcgataaagccgaagttacagaaattggtcaagttttatcagttggagatggaatcgctaggatttatggattagataatgtgcaagctggtgaaatggtagaatttgcagatggatcaaaaggtatggctcttaacttggaaagtgaaaatgtaggtgttgtaatttttggagatgatcgaaacattaaagagggtgatgtagtaaaaagaacaggtgatattgttgatactccagtaggaaaagaattattaggaagagttgttgatggattaggaaacccaatcgatggtaaagggtcattagataaaaatgtaaaaaaaagcagagtagaggtaaaagcaccaggaattataccaagacaatcagtcagcgaaccaatgcaaacaggacttaaatcaattgatagtttagttccaataggaagaggacaacgggaactaattattggagataggcaaacaggtaaaactgctgtcgctgtagatgcaattattaatcaaaagaaaataaatgaatctggagatgaaaaacaaaaactttattgcatatatgttgccgttggacaaaaaagatcaactgtaagacaaattcaaaaaacactagaggaagctggtgctatggagtatacaactatcgttgctgccactgcatcggactcagctcctctacagtttttagctccatatactggatgtgctatgggtgaattttttagagacaatggaatgcatgctttaataatctatgacgacttatctaaacaagctgtagcatacaga

SEQ ID NO: 273727 - DNA, 1022 bp, Unknown
  Bacterial polypeptide expressing nucleotide sequence isolated from the Sargasso Sea
tgttgatctgttagctccttacgctaaaggaggaaaaattggtttatttggcggtgcaggtgtaggaaaaacagttttaattatggaattaatcaacaacgtagcaaaagcgcacggtggattctcagtttttgcaggtgttggagaaagaacaagagaaggaaacgatctttatcatgaaatgattgagtctggagtgataaaaccagatggagcaggttcaaaggccgctttagtttatggtcaaatgaacgaacctccaggagcaagagcaagagttgctttatcaggacttacagttgctgagtattttcgagatcaagaaggtcaagatgtattattttttgttgataatattttcagattcacgcaagcaggctcagaagtatcagcattgttaggacgtatcccatccgctgttggatatcaaccgaccttagcaacggatatgggaaatttacaagaaagaattacaactactaacaaaggatcaattacatcagttcaggcaatatatgtacctgctgacgacttaactgatccagcaccagcgacctcattctcacaccttgatgctacgaccgttctttcaagacaaatagctgaattaggaatttatccagcagttgatccacttgactcaacttctaggatcttagatccaagaatagttggtgatgaacattatagagttgcaagagaagttcaaaaaattttacagacttataaatctttgcaagatattattgcaattttaggtatggatgaattgtccgaggaagataaattaactgttgcaagagcaagaaaaattcaaagatttttatcacaaccgttttttgttgcagaagtttttactggttcaccgggaaaattagtagatctagaggcaacaatcaaaggcttcgatgcaatttgcaaaggtgagtatgatcatctacctgaagcagccttttatatggttggaactatagaagaagccatagagaaagctgagaaaatgtcaaaagatgctgcttaat

SEQ ID NO: 273728 - DNA, 1519 bp, Unknown
  Bacterial polypeptide expressing nucleotide sequence isolated from the Sargasso Sea
attgagcgaatttaatattgatgcaaaacaaatttcagattcactgaaagatacattaggtaattggcaagattctgtaaaagatgatcttgttggtagcgtatctgcagtcgccgatggtgtagcaagggtaagaggtttagaaaatgttatggcctctgaacttcttgaattcccaggtggtttagtaggtgttgcattaaaccttgaagaagattcaattggtgttgttttaatgggtgattcaaatcacattgaagaaggaatgccagtaaagcaaacaggagaagtactttctattggtgtcggagatggatttttagggagggttattgatcctttaggaaatccaatcgatggtaaaggacctatcgaatttagtgaaagaagacgtttagagttacaagcaccttccgttgttgaaagacagcctgtaggtgagccacttcaaacaggaattaaagcaattgactcaatgattccaattggtaggggccaaagagaattaattattggtgatagacaaataggtaaaacagctgttgccgttgataccataatcaatcaaaaagataccgatgtgaaatgtatttacgtagctattggtcaaaaatcatctactgttgctgaagttgttcaaagatttgaagacgagggagtgttagataaaacagttattgtaaatgcacccgcatctgctgctgcagctcttcaaatgtatgctccttatgctggttcagctattggacagcattggatgtataacggtcaacatggtcttattgtatttgatgatttatccaagcaggcaattgcatatagacagatttcacttttactaagacgacctccaggaagagaggcttatccaggtgacgttttctatcttcactcaaggcttttagagcgttgtgcaaaagtaagtgaagaattaggtggaggatctcttacaggtctaccaattattgaaacaaaagctggtgacgtatctgcttttattccaactaacgtgatttcaattactgatggtcaaatatatctagagtcagaactcttttactctggtgtaagaccagctgtaaaccctggtacatcagtatcaagagtgggtggttctgctcaaaccaaagctatgaagaaagtctctggtccgttaagaatcaaccttgcacaatttagagaactagaagcattcgcggagtttggatcagatttggatgcagcttcacaggctcaactcgatagaggtcgaagagttgttgaattattgaaacaaccacaatacaaaccagtccctgttgaagaacaggttgtatcactgtatgcagtaacagaaggttttctagatgttgtagaccctgcagacattccacaagccgagaaagatctcgtagattttataaaaacaagacattctgaagttattaattcaataaaaactacaggtgaactacctgaagatgaattaaaagctgctgtcgaggcttttgtaaatacattagagaagaaagaagagtaa

SEQ ID NO: 273729 - DNA, 1420 bp, Unknown
  Bacterial polypeptide expressing nucleotide sequence isolated from the Sargasso Sea
aatgagtgagaatataggtagagtagtaaagattgcaggacctgttgttgacgtggcttttcctcaggacgaacttccagagataacatttgcccttgaagtagatgttgaaatagatgatgttaccagcaccattgtgcttgaagtagctcagcatttaggcgagggaagagtaagagctatttcaatgcaaggtactgatggtctaagaagaggagctgaagtaaccgatactggcgcaccgatttcggtcccagtaggacaagaaacacttggtcatatctttaatgtttggggcgaaacgctagatgtagaaacaagctcaattggtgttaaacaaaaatggcctattcatagaaaaccacctccttatgaagatgtctcagctcaaaatgaaatgtttgaaacaggtatcaaagttatcgatttattaatgccttatgtacaaggtggaaagattggtttatttggtggagctggtgttggtaaaactgttcttattcaggaaatgattaacagagttgctacacaacacggtggtgtatcagtgtttgctggtgttggagaacgaacaagagaaggtaatgacttatttagagaaatgcaagaatctggagttattgataaaacagctctagtttttggtcaaatggatgaaccacctggagtgagattacgagttgctttgtcagcgttgacaatggccgaatatttcagagatgaagaaaaacaagatgttcttttatttattgataatatctttcgtttttcacaggccggttcagaggtatcaacattacttggaagaatgccttcagctgttggataccaaccaacccttgctgatgaaatgggatttcttcaagagagaattacatctttgaaaggtcgttctattacatctctacaagcagtctacgttccagcagatgatattactgaccctgcacctcacactgcttttgctcacttagatgcaagaactgtgctttcaagaacaatcgctgaccttggaatttatccagcagtcgatcctttagattcatcttctagaatcctggatccaggaattgttggagatgatcattacgaaatagctagagaagttcaaagagttcttcaaagatacaatgacctacaagatattattgcaattcttggtattgatgaattgtctgaagaagacaagcaaattgttggtagagccagaagaattcaaagattcctctctcagccaatgtttgttgctgagcaatttactggaatagagggtaagtttgtctcaattaaagattctctggaagcctttaaaactatattaagtggagagcttgatgctgtcccagaacaagctttttatatgactggtggacttgacgaagttatggccaaagcaaaagatttggaagaaaacctataa

SEQ ID NO: 273730 - DNA, 1399 bp, Unknown
  Bacterial polypeptide expressing nucleotide sequence isolated from the Sargasso Sea
atgagcaatggaatagttacacaaattattggagcggttatcgatgttgaattcgacaaagataatataccaaaggtatatgaggccttaatggtggatgaaagtggaacaactcttgaggttcagcagcaattaggagatggagttgtaagaacaattgctatgggagcaaccgagggactaaaaagaggcttaactgcgtcaagaacaaatgctcctatttcagttccggttgggccagagaccctaggcaggattgttgatgttcttggaaaccctatagacgaaaagggacctataggcgaaaaagaaaaaatgcctatacacagaaaaccacctacatatactgaccagtctgcatcaaacgaagttcttgaaactggaataaaagttattgatttaatgtgtccttttgcaaaaggaggaaagattggactatttggtggtgctggtgttggtaagacggtcaacatgatggagctcattaataacattgcattgcaacattctggcctatcagtatttgcaggggttggagaaagaactagagagggaaatgatttttattatgaaatgcaggaatctggtgttgttaatatcgacaaactaagcgagtcaaaagttgccatggtgtatggacaaatgaacgaaccccctggtaatagattaagggttgctttgactggtttaacaatggcagaaagctttagagatgaaggtaaagatgtgttgttatttattgataatatctaccgttatactcttgcgggggttgaggtatcagctttgcttggaaggatgccttcggctgttggatatcagcctaccctagctgaagaaatgggggcccttcaagaaagaattacttctacaaagactggatctataacatctatccaggcagtatatgtcccagctgacgacttaactgacccttctccagctactacatttgctcatttagatgcaacagttgttctttctagacagatttcagagttaggcatatatccagctgttgaccctctagactcaactagcagacagcttgatccatttgttgttggcgatgagcactatgaggttgcacaaggagttcaaaaaatattacagagatataatgagcttaaagatattattgccattcttggaatggatgagctatctgaagaagacaagggtttggtagctcgagcaagaaaagctcaaagattcttgtcacaaccattttttgttgcagaaatatttacaggcaccccaggtaagtatgtttccttagaagacacgataaaagcttttaaaggtatcttaaatggagattatgaccatcttccagaacaagccttttatatggtgggtactattgaagaggcagtagagaaggctaaaactttataat

SEQ ID NO: 273731 - DNA, 1420 bp, Unknown
  Bacterial polypeptide expressing nucleotide sequence isolated from the Sargasso Sea
atgaaaaaaggacaaattacacaaattattggagcggtagttgacgtaaaatttgatggagaattaccagaaatattaacagcattagaatgtgacaacgctggaaatagacttgttttagaagttgctcagcacttaggagagtcaagtgtaagaactatagcaatggacgctacagaaggtttaaaaagaggagatcaagtgatagatactggttctccaattaaagttccagttggtccagagactctaggaagaattattaatgtagttggtgaaccaattgatgaaaaaggagaagttaaaacaaaagaaaattggcctatacatagatcagcaccagaatttaacgatcaatcaactgagacagaaattttggtaactggaattaaagtagttgatttattagctccctatgcaaaaggtggtaagattggtttgtttggaggagctggagttggaaaaacagttcttattatggaattaattaataacgttgcaaaagctcatggaggattttcagtttttgcaggtgttggagaaagaacgagagagggaaatgatctataccatgaaatgattgagtctggagtaattaaaccagagggtgatggttcaaaagctgcattagtatatggtcaaatgaatgaacctccaggagcaagagctagagttgcactatcaggtttaactgtagctgaatattttagagatcaagaaggtcaagatgttctttttttcgtagataatatatttagatttactcaagcaggatcagaagtatcagcattattaggtagaattccatctgctgttgggtatcaaccaacattagcaacagatatgggcaatcttcaagaaaggattacaacaacaaacaaaggttctattacttctgttcaggccatatatgttcctgcagatgatttaacagaccctgctccagcaacatcattttctcacttagatgcaactacagtactgtctagacaaattgcagaaattggaatttatcctgctgtagatccattagactcaacatctaggattttagatcctagaatagttggagatgaacactacagagtagcaagagaagtgcaaaaaattttgcaaacttataaatctttgcaagatattatagcaattttaggtatggatgaattatccgaagaggataaattaattgtggcaagagcaagaaaaattcaaagatttttatcacagccattttttgtagctgaagtttttactggatctcctggaaaactggttgatttggaatctacaattaagggatttgatgccatctgcaaaggagaatatgaccaccttccagaagccgcattttatatggtcggaacaattgaagaagccattgagaaagcagaaaaaatggcaaaagatgctgcagcttaat

SEQ ID NO: 273732 - DNA, 574 bp, Unknown
  Bacterial polypeptide expressing nucleotide sequence isolated from the Sargasso Sea
attgacagcgctgccaattaatgaaactcaagctggagacgtttctgcatttgtaccgacaaatgttatttcaattacagacggacaaattttcttagagactgatctatttaatgctggcatcaggcctgcgataaacgcagggctatcagtatctcgtgttggtggttcagctcagacgaagataataaaaaaattaggtggtggtattcgtttggctttagcacaataccgagagttggcagcatttgctcaatttgcatctgacttagatgaggcgacaagaaagcagcttgaaaggggtcaacgtgccactgaactgatgaaacaaaaacaatactcaccactttcagtatcagagatggccttatcattattcgcagtcaatgagggctatcttgatgatgttgaagtagccaaaatcagtgattacgaaagcgctttgcatgattatgctagatcaaatgagggtgaattgttagaaaacattaataagaccggcgactataacgatgatatagaagcctcaatgaaaaaaatctgcgatgattttgcaaaaaatggatcttattaa

SEQ ID NO: 273733 - DNA, 1378 bp, Unknown
  Bacterial polypeptide expressing nucleotide sequence isolated from the Sargasso Sea
tatgagtgctggaactactgtgcaagtcattggagctgttgtagatgtcgaatttccaagtgatgctataccaaatatttacgatgcattaacaatcgaagatgcagatctaacgcttgaagttcagcaacaattgggtgacggtgtagttaggacaattgcaatgggatccagtgaaggcttaaaaagaggcatgagtgtaaataacacaggccaaccaatttctgttccagttggagagaaaacactgggaagaattatggatgtgctaggaactccaattgacaataaaggcgatattggtgctgaaatgaacatgccaattcacagaacccctccgacctatgaagagcaagcttcatcaactgaaatgttggaaacaggaatcaaggtaattgatctcattatgcctatcgcaaaaggaggaaaagtagggttattcggcggcgcgggtgtcggaaaaacagtgaccctaatggagttgattcgtaacatcgccgcagagcattccgggtattcagttttcgctggtgttggtgaaagaacacgagagggaaatgatttctatcatgaaatgacggaatccaatgtaattgataaggtctctttggtttatggacaaatgaatgagcctcctggaaacagacttagggttgccctcacaggtcttacaatggcggaagcatttcgtgatgagggaagagatgtattgatgtttatcgataatatttatcgatacacgctggccggtacagaagtttctgcgttattgggcagaatgccatctgctgttggatatcagccaaccctagctgaagaaatgggtgtacttcaagagcgaattacatcaacaaaaacaggctcgatcacatctttccaagcagtttacgttcctgccgatgacttaacagatccatcacctgcaacgacatttgctcatctcgatgcgaccttggttctctctcgtcagattgcagaacttggaatttatcctgctgttgatccactggactcaacaagtagacttttagatcccaatattattggacaagaacactatgattgtgctcgtcgcgtccaaggtgtgcttcaacgatacaaagaattgcaagacataatagctattcttggaatggatgaattgtctgaagacgacaagctcagtgtcacaagagcaaggaagattatcagatttttctctcagcctttcttcgtggcagagacatttactggcgccccgggcaaatatgttcagctatctgaaacaataaaaggcttcagcggcattgtgaatggtgattatgatgatcttcctgagcaagcgttttacatggttggttcaattgaagaagcagtagaaaaagcaaaaaccacatag

SEQ ID NO: 273734 - DNA, 1399 bp, Unknown
  Bacterial polypeptide expressing nucleotide sequence isolated from the Sargasso Sea
atgagcaacggaatagttacacaaattattggagctgttattgatgtcgaatttgacaaggataatatcccaaaagtttatgaagcattaatggttgatgagagtggaacaactcttgaagttcagcaacaactgggcgatggtgttgtaagaacaattgccatgggcgctaccgaaggtttaaaaagaggcttatctgcctcaagaactaatgctcctatatctgtaccagttggaccagaaacacttggaaggattgtggatgttttaggaaatccaatagatgaaaagggaccaattggtgaaaaatcaaaaatgcctattcacagaaaaccaccaagctacacagaccaatcagcttctaacgaggttcttgaaacaggaattaaagttattgatttgatgtgtccttttgcaaagggtggaaaaattggactatttggtggtgcgggtgttggtaaaacagtaaatatgatggaattgattaataacatcgccctccaacattctggtttatctgtatttgctggagttggagaaagaaccagagaaggaaatgatttctattacgaaatgcaagagtcaggcgtggttaatattgacaatttaagtgagtcaaaagttgcaatggtttatggacagatgaacgaaccaccaggtaacagacttagagtcgctttaacaggcttaactatggcggaaagttttagagatgaaggaaaagacgttttattatttattgataatatttatcgatataccttagcaggtgttgaagtttctgctctgttaggaagaatgccttcagcggtaggttatcagcctactttggctgaagagatgggcgccttgcaagaaagaatcacatctactaaaacagggtcaattacatcaattcaagctgtgtatgttccagctgacgacctgactgacccatcacctgcaactacttttgctcacttagatgcaacggttgttctctcgagacaaatttcagaattaggaatatatcctgctgttgatcctcttgattctacaagtagacagcttgatccttttgtagttggcgatgatcattatgaggtagctcaaggagtccaaaaaatactccaaagatacaatgaactaaaagatatcatcgctattttaggaatggatgagctttctgaagaggataaaggattggttgcacgggcaagaaaggctcaaagatttttatctcaaccgttctttgttgctgaaatttttacaggcactcctggaaaatatgtgtcccttgaagacaccatcaaggcatttaaaggaatactaaatggtgattatgatcatttaccagagcaagctttctatatggttggaactatcgaagaggcagtagaaaaagcaaagactttataaa

SEQ ID NO: 273735 - DNA, 1534 bp, Unknown
  Bacterial polypeptide expressing nucleotide sequence isolated from the Sargasso Sea
aatggaaattaatccttcagaagttactaagatcttaaaagaacaaatcaaaaaatttggagataaagcagaagtaactgaagtggggcaagttttgtctgtaggagatggaatcgctagaatttatggattagataacgttcaagctggagaaatggttgagtttgctgatggatcaaagggaatggcattaaacttagaaagtgataatgtaggcgttgttatattcggagatgataaagctgtaaaagaaggagacacagttaaaagaactggtgcaattgtagatacaccagtcggtaaagaacttttgggaagagtagttgatggattaggtaatccaatagatggtaaaggaaatttagataaaggagtaaagcgaagtagagttgaagttaaagctccaggtattattccaagaaaatcggttagtgaaccaatgcaatctggtttaaaatctgttgacagtttagttccaattggaagaggtcaaagagaattgattattggagatagacaaacaggaaagactgcagttgcaattgatacaatcattaatcaaaaaaaaattaatgaatctggggacgaaaaacaaaaattatattgtatttatgttgctattggacaaaagagatcaacagttagacaaattgaaaaaacattagaagaggcaggagcaatggaatatacaactatagttgctgcaacagcatcagatgctgcacctctgcaatttttggcgccctacactggttgtactatgggagaattttttagagataatggtatgcatgcactaataatttatgatgatttgtcaaaacaagctgttgcatacagacaaatgtcattgctattaagaaggccccctggaagggaagcataccctggagatgtattttatttacacagtcgacttttggaaagagctgctaaattgagtgacgaacatgggggaggttcccttacagcactacctattatagaaactcaaggtggagatgtgtcagcatttataccaacaaatgtaatctcaattacagatggacaaatttttctagaaacaaatctatttaaccaaggtataagaccagcaataaacgtaggtttatcagtatctagagtcggatcatctgctcaaacaaaggcaatgaaaaaggtttcaggttctatgaaattagagcttgcacaatatagagaaatggcagcatttgctcaattcggatctgatttagatgcctcaactcaaaaacttttaaataggggttcaaagttaactgaacttttaaaacaaaaacagtattctccaatgactgtagctgaacaggttatttcagtgttttgtggggtaaaagggtatctagatgatgtagaactaaaggacatagcttcttttgaaacaaaaattattgctaaatgtaaatcagaaaaaccagaaattatagaagcaatttctaacactggaaaacttgaggaagactctgaaaaagctttagtagaattaatcaagcaacataaagaaagttctaaataa

SEQ ID NO: 273736 - DNA, 971 bp, Unknown
  Bacterial polypeptide expressing nucleotide sequence isolated from the Sargasso Sea
catgaaaaaaggaaatataacacaagttattggagcagtagtcgatgtaaagtttgatggagagctaccagaaattttaacagctttagaatgtaacaatgctggtaatagactggtattagaggtggcccagcatttaggagagtcaagcgtcagaactatagcaatggatgctacagaaggtttaaaaagaggtgatgaagttacagatacaggttcaccgattaaagttccagttggcccagaaactttaggaagaattataaatgttataggtgagcctatagatgaaaaaggtgaagttaagaataaagaaaactggcctattcatagacctgcaccaacttttaatgatcaatctactgagactgaaattcttgttacaggaattaaagtaatagatcttttagcaccatatgcaaaaggaggaaaaattggattatttggtggagcaggagtaggaaaaacagtacttataatggaattaattaataacgttgcaaaagctcatggaggtttctctgtctttgctggagttggagagagaacaagggaaggtaatgatttatatcatgaaatgatagactccggagtaataaaacctgatggagaaggttcaaaagcagccttagtttatgggcaaatgaacgaaccaccaggagcaagagcaagagtagctctaacaggattaactgttgcagaatattttagagatcaggaaggccaagatgtattatttttcgtagataatatatttagatttactcaggcaggttcagaagtatctgctctattaggaagaattccatcggcagttggatatcaaccaacactagcaactgatatgggaaatctacaggaaagaatcacaacaaccaacaaaggttcaattacatctgtacaagctatttatgttcctgctgatgatttaaccgatcccgcacctgctacctcttttgcccacttagatg

SEQ ID NO: 273737 - DNA, 1420 bp, Unknown
  Bacterial polypeptide expressing nucleotide sequence isolated from the Sargasso Sea
atgagaaaaggtaaaattacacaaattattggagcggtagtagatgttaaattcgaaggagaactaccggagatattaacagcattagagtgtgataattctggaaataggctagttctagaagttgcacagcatttaggggaatcaagcgtaaggacaattgctatggatgcaacagaaggtttaaaaagaggagacgaagtaacagatacaggagctccaattaaagttcctgttggtccagaaactttaggaagaattataaatgtaattggtgaacctattgatgaaaaaggagaagttaaaactaaagaaaattggcctatccatagatcagcaccagaatttaatgatcaatcaacagaaacagaaattttagtgaccggtatcaaggtagttgatttattagcaccttatgcaaaaggtggtaaaattggtttatttggtggtgcaggggtaggaaaaacagttctgattatggaattaatcaacaacgttgcaaaagcacatggaggattttcagtttttgcaggagttggtgaaagaactagagaaggaaatgatctttatcatgaaatgatagagtcaggagtaattaaaccagaaggaactggatcaaaagcagcattagtttatggccagatgaatgaaccaccaggagcaagagctagagtagctttgtcaggtttaacagttgctgaatattttagagatcaagaaggtcaagacgttctttttttcgtagataatatatttagatttactcaagcaggatctgaggtgtcagctttattaggaaggatcccatcagcggtaggttaccagccaactttagctaccgatatgggaaatcttcaagaaagaataacaacaacaaacaaaggatcaattacatctgtacaggctatatatgtaccagcggatgatttaaccgatcctgctccagctacatcattttctcacttagatgccacaactgttttatctagacagattgctgaaattggaatttatccagctgtagatcctttagattcaacctcaagaattttagatccaaggattgtaggagatgagcactatagagttgcaagagaagttcaaaaaattttacaaacttataaatcattacaggacattattgcgatcttaggtatggatgaattatctgaagaagataaattagttgttgcaagagctagaaaaattcaaagatttttatctcaaccattttttgtagctgaagtattcacaggatcaccaggaaaacttgtcgatttagaatcaacaattaaaggtttcgattctatatgcaaaggagaatatgatcatttacctgaagctgctttttacatggttggaacaattgaagaagcaatcgaaaaagctgaaaaaatggcaaaagatgctgctgcataat

SEQ ID NO: 273738 - DNA, 700 bp, Unknown
  Bacterial polypeptide expressing nucleotide sequence isolated from the Sargasso Sea
atggaaataaatccttcagaagtaacaaaaatattaaaagaacaaataaaacaatttggagacaaagcagaagtttcggaagtaggccaggtcttatcagttggagatggaattgctagaatctatggcttggacaatgttcaagctggagaaatggtagaattttctgatggatcaaaaggaatggctttaaacctagaaagtgaaaatgttggtgttgtaatttttggagatgatagagctgttaaagaaggtgatacagtaaagagaacaggtgcaattgttgatacaccagtaggaaaagaattattaggaagagttgtagatggtttgggaaatccaattgatggtaagggagctttagataaggaaattaaaagaagcagagtagaagttaaagcaccaggaattattccacgtaagtctgttagcgaacctatgcaaacaggattaaaatcaattgatagtctagttccaattggaagagggcaaagggaattaatcattggtgatagacaaactggtaaaacagctgttgctattgatgcaattataaatcaaaagaaaataaatgaatctggagatgaaaaacaaaaattatattgtgtatatgtggcagttggacaaaagaggtcaacagtaagacaaattgaaaaaacgttagaagaagctggagcaatggaatatacaacgatgtgcc

SEQ ID NO: 273739 - DNA, 1336 bp, Unknown
  Bacterial polypeptide expressing nucleotide sequence isolated from the Sargasso Sea
atggtaaaaattcgtcctgatgaaattagtagtgtaattcgccaacagattgagcaatacactcaagaagcacaagttgtaaatgtaggaacagtacttcaagtaggagatggtattgctcgtatttacggtttagaaaaagtaatgtctggtgaattacttgagttccaagatggaacaattggagtagccctcaaccttgaagcagacaacgtaggtgctgtattaatgggagatggtcttaaaatccaagaaggtgattctgtaaaagcaactggtaagattgcacaagtaccagtaggggaagcattcttaggtcgtgtagtagacgcattagcacgtccaattgatggtcgtggtgatattaaggctgatggtgttcgattaattgaatcaccagcacctggaattattgctcgtcgttcagtatacgaaccacttcaaactggacttgtatcgattgatgcaatgatcccaattggacgtggtcagcgtgagcttattattggtgaccgtcagactggaaaaactgcagtagcaacagatacaatcattaaccaaaaaggtggtgatgtaatttgtgtatacgtagcaattggacagaaagcatcatcagtagcacagattgtgacaactctttcaaatgctggagcaatggactacacaattattgtagctgagaacgcagattcacctgcaactctccaataccttgcaccatatactggggcttcattagctgagtacttcatgtacacaggtcgtgcaactctcattatttatgatgacctttctaagcaagcacaagcttaccgtcagatgtcactccttcttaagcgtcctccaggacgtgaagcataccctggtgacgtattctaccttcactcacgtttacttgagcgtgcagcgaagcttagtgatgcattaggtgaaggaagtatgactgcacttccaattattgaaacacaaggtggagacgtatcagcatacattccaacaaacgtaatttcaattactgatggtcaggtattcctttcagctgaccttttcaactcaggtattcgtccagcaattaacgttggtatttcagtatctcgtgtaggttcagcagctcaaattaaagcaatgaagcaagtagcaggaacacttaagcttgaacttgcacaattcgctgagcttgaggcattctcacagttcgcttctgaccttgatcaggcaactcaaaatcaacttgcacgtggagcacgtttacgtgagcttcttaagcaagcgcagagtcagccactttcagttgatcagcaagtagcaactatctacactggaacacagggttact

SEQ ID NO: 273740 - DNA, 712 bp, Unknown
  Bacterial polypeptide expressing nucleotide sequence isolated from the Sargasso Sea
atgaatttcctttatgacatttcagcagtagaaattggtcaacatttctattggagtcttggtggcttccaaatgcacggacaagtacttattaactcatggattgtactcggacttatcattgcgttcgcagtaacaacaactcgtgatttaaaaccagttccagaaggtggacaaaaccttgctgaatttgttgtagagtacattcgtgacattgcaaaaactcaggttgggagcgattacttagagtggactccatttattggaactttattcttatttattttcgtttcaaactggtctggagcattaatcccatggaagcttattgaacttccacacggagaacttggagcaccaacaaacgatattaacacaactgtagctcttgcacttcttacttcacttacatatttctatgcaggtttaaagaagaaagggttagaatactttggaaagtacgtacagccaacgccaatcttacttccaattaacgtattagaagacttcacaaaaccattatcattaagtttccgtctttttggaaacattcttgctgatgagcttgtagtagcagtacttgtatcgttagttcctcttgtgattccagtgcctcttattttccttggattatttacaagtggaattcaggcattaatttttgcaactcttgcaggagcttatattggagaagcacttgaagggcactaag

SEQ ID NO: 273741 - DNA, 508 bp, Unknown
  Bacterial polypeptide expressing nucleotide sequence isolated from the Sargasso Sea
aatttcaattacagatggtcaaatatttttagaaacagagctctttaaccaaggtatcagaccagcaattaacgtaggattatcggtatctagagttggatcttcagctcaaacaaaagctatgaaaaaagtatcaggttcaatgaagcttgagttagctcagtatagagaaatggcagcttttgctcaatttggatcagatttagatgcttcaacacagcagctccttaaccgaggttcaaagttgactgaacttttaaagcaaaaacaatattcaccaatgacagttgcagagcaagtaatatctgttttttgtggagttaaaggttatttggatgatattgatttaaaagatattgctgaatttgaaactaaaataattgaaaagtgcaaatctgataagcctgaaataattgattctattcagagttctggaaaacttgaagaagataaagagaaactattaatagaagtaattacccaactaaaacaaaactttaaatcataa

SEQ ID NO: 273742 - DNA, 1399 bp, Unknown
  Bacterial polypeptide expressing nucleotide sequence isolated from the Sargasso Sea
atgagcaatggaatagttacacaaattattggagcggttattgatgtcgagttcgataaagataatattccaaaggtgtatgaagcacttatggttgatgatagtggaaccactcttgaagttcagcagcagttaggtgatggtgttgttagaacaattgcaatgggtgcaacagaaggtttaaaaagaggtttagttgctacaagaactaatgcgcctatctcagttccagtggggccagaaacattgggaagaattgttgacgtgcttggaaatcctatagatgaaaaaggaccaattggcgagaaacagaaaatgccgattcatagaaagccgccaacctatacagaccaatcagtatcaaatgatattcttgaaaccggtattaaagttattgatttgatgtgtccctttgcaaaaggcggaaagatcggattgtttgggggtgccggtgttggtaagacggttaatatgatggagcttattaataatattgcgctgcaacattcaggcctgtctgtatttgcaggtgttggtgaaagaactagagagggaaatgatttctattatgagatgcaagaatcaggagtagttaacattgataatcttggagagtctaaagttgcaatggtgtacggacagatgaatgagcctccaggaaacagacttagagttgcattaacaggattgactatggctgaaagcttcagggatgaaggaaaggatgttttattatttattgataatatttatagatatactctggcaggcgttgaggtttctgctttattagggagaatgccttcagctgttggatatcagccaacccttgctgaagaaatgggtgccctacaagaaagaattacatccaccaagacaggatccatcacatctattcaagcagtatatgtgccagccgatgacttaactgacccatcgccagcaactacgtttgctcacttggatgcaacagtggttctatcaagacaaatttcagagctaggaatttatcctgctgttgacccgcttgactcaactagcagacagctagatccttttgtggttggggatgagcattatgaggtagcacaaggagttcaaaaaattttacaaagatataacgagctaaaagacattattgctattcttggaatggatgagctttctgaagaagacaaaggtttggttgcaagagcaaggaaggctcaaagatttttatcacaacccttctttgttgctgaaatatttacagggacgcctggaaaatatgtttcattagaagataccattagggcttttaaaggaatattaaatggtgattatgatgatcttccagagcaagctttttatatggttggaacgattgaagaagcagtagaaaaggctaagactttataac

SEQ ID NO: 273743 - DNA, 1546 bp, Unknown
  Bacterial polypeptide expressing nucleotide sequence isolated from the Sargasso Sea
atgagtcaattaaatccatcagaaatttccagcgttttaaaagagaaaattgctggccttgatctttctgcagaaagaaaaaacgaaggtatcgtagtgagcgtctcagacggtattgtaagaatacacggcatgggagatgttatgtatggtgaggttatagaatttgaaaatggtacaaagggcatggcccttaatctcgaacaagactctgtaggagcagttgttcttggagattatcttgaaattattgaaggacaaaaagctgtttgtactggaaaggtgttagaggttcctgttggagaggctttattaggaagggttgtaaatacccttggtacgcctattgatggcaagggtgaaatacaagcagagagcgcagcaccagttgaggttgtcgctccaggtgttattgctcgtcagtctgttgatcagcctgttcaaattggccttaaagctgttgatgctatggtcccaattggtaggggtcaaagggagctcataattggagacaggcaaaccggtaaaacagctgtcgcaatcgatgcaattattaatcaaaaaggaacaggtattaaatgtatttatgttgccattggtcagaagcaatccacagtagcaaacgttgttaaaaaattagaagaacatggagcgatggagcatacaattgttgtttcagctacagctgcagatcctgccccaatgcaatacctatctgcatatgcaggctgcacaatgggggaatattttagagacaagggcgaagatgcattaatcgtttatgatgatctttctaagcaagcagtcgcttatagacaagtatcacttttattaaaaagacctccaggaagagaggcataccctggtgatgttttttatctgcattccaggttgttagaaagggctgcaagagtaaatgcagactatgttgaaaaaattactggtggtaaggttaagggtaaaactggctcattaacagcccttccaattattgaaactcttgctggagatgtttcggcttttgttccaacaaatgtgatatcaattacagacggacaaatatatttagagacagagttatttaattcaggtattaggcccgctattaatccagggctttcagtctcaagggttggcggatcggctcaaacaaagattatgaaaaagttagctggtggagttaggactgcattagctcaatatcgtgaattagctgctttctctcagttcgcatcagaccttgatgaagcaaccaaacagcagcttgctaatggtagagcatttacagagctgctgaaacaaaagcaatatgctccaatgagtgttgcccagcaagcactaagtttatttgctgcagatagggggtacatggcagatatagaagtcgagaaaatcttggactttgaagaagccttacatggttacttaacagcagaaaagggcgagctagaacaacaaataaatacaacaggtgactggaatgatgatatagaaaatcaatttaaagagctcgttgaagattttaaaaaaacacaaactttttaat

SEQ ID NO: 273744 - DNA, 337 bp, Unknown
  Bacterial polypeptide expressing nucleotide sequence isolated from the Sargasso Sea
tatagagtagcaagagaagttcaaaaaattcttcaaacctataaatctttgcaggatataattgctattttgggtatggatgaattatcagaagaggataaattagtagtagcaagagcgagaaaaattcagagatttttatctcaaccattttttgttgcagaggtttttacaggatctccaggtaaacttgttgatttagagtcgacaattaaaggatttgatgcaatatgcaaaggagagtacgatcatttaccggaagcagctttttatttagttggtacaattgaagaagcgatagaaaaggccgagaaattagcaaaagatgttgcttaat

SEQ ID NO: 273745 - DNA, 1399 bp, Unknown
  Bacterial polypeptide expressing nucleotide sequence isolated from the Sargasso Sea
gcaggtgaaatggtagaattccaggacaattcaaaaggaatggcgcttaacttggaaagtgacaatgttggtatagttatctttggagatgataaagcaataaaagaaggtgatacagttaaaagaacaggagcgattgttgatgtacctgtcgggaaagagttgcttggtagagtggttgacgctttaggaaacccaattgatggtaaagaaaatttagataaaaatcttaaaagaaaaagagtagaagtaaaggccccaggaattataccaagaaaatctgttggagagcccatgcaaacaggtttaaaagcaattgatagtttaattccagttggtagaggacaacgagaactaataattggagacaggcaaactggaaaaactgcagttgcggttgatactatcataaaccaaaaaaaaattaatgagtctgaggatgaaaaaaagaaactttattgtatatatgttgcaatcggccaaaaaagatcaacagttgcacaaattgtaaaaaccttgcaagacgcaggagcaatggattacacaattgttgtttctgctaccgcatccgatcctgcccctctacagtttttagcgccttacactggatgtacctttggtgaattttttagagataatggaatgcatgctttaatcatctatgatgatttgtctaaacaagcagttgcatacagacaaatgtctttattattaagacgtccaccaggtagagaagcttacccgggtgacgtattttatttacatagcagattacttgaacgtgcagctaaattaaatgatgataatggaggtggatcacttactgcattaccaataattgaaactcaggccggagacgtttctgcatatatcccaacaaatgtaatttcaataaccgacggtcagatttttttagaaacagaacttttcaatcaaggtataagacccgcagtaaatgttgggctatcagtttcaagagttggttcagcagctcaaactaaagcaatgaaaaaagtagctggttcaatcaaattggaactagcgcagtatcgagaaatggcggcttttgctcaatttggatctgatttagatgcatcaactcaaaaattattaaatagaggctcaaaacttacagaactgttaaaacaagatcaatacagtccaatgacagtagcagagcaagtagtatcagttttttcaggagtaaaagggtatttagatactgttgaaaatagtgaaattcgatcatttgaaaaaggtttactagaattaattaaaagcgacaaacctgagatactggagtctattcaaaaaagcggaaagattgaagaagataccgaaaaattattatcagaagtaataactaattataaaaaatcaaattttgaaaaaaaataat

SEQ ID NO: 273746 - DNA, 931 bp, Unknown
  Bacterial polypeptide expressing nucleotide sequence isolated from the Sargasso Sea
aatagctaatgtcgtagcaaaacttgaagagtatggagcaatggagcacacaattgttgtttcagcggcagccgctgacccagctgcgatgcaatacctctcagcatactcaggctgtgcgatgggagaaaattttagagatacagggcaggatgcattaattgtttacgatgatttgtcaaagcaagcagttgcttacagagagatatcactgttacttagaaggcccccaggaagagaagcttttcccggcgatgttttttatcttcactcaagacttttagagagagcagctagagtaaatgcggaatatgtagaaaaaattacaaagggaaaagtgaaaggtaaaacaggatctttaacagcattaccgattattgaaacacaagccggagatgtatctgcttttgttccaactaacgtaatttcaattactgacggacagatattcctagaaacagatctttttaattcaggcattagaccagctattgatccgggactttctgtatcaagagttggtggagccgcacaaaccaagataattaaaaaacttagtggaggaattagaacagaccttgctcaatacagagagcttgcggcattctcacagtttgcatctgatctggatgacgcaactaaagaacaattagaacacggtaagcgaattactgagcttctaaaacaaaaacaatattctccaatgagtgttgccgatcaagctatgagcttatatgcagctgacaaaggatatatgaaagatgttgatatagataaagtaggtgactttgaatcagctctattagcttattttgaatcagaaaaatctgacctaaaaaaacaaattaatgataccggagattgggatgacgacattgaaaaccagtttaaggaattagttgaagactttaagaaaacacaaacatattaa

SEQ ID NO: 273747 - DNA, 406 bp, Unknown
  Bacterial polypeptide expressing nucleotide sequence isolated from the Sargasso Sea
ttatcccgcagtagatccacttgattcaacatcattaattcttgatcctcaagttgttggtgatgatcactatagagttgctagggaagttcaaagagtattacaaacttacaaaagtcttcaagatattattgctattcttgggatggatgaattatcagaagaagataagcttacagttgcaagagcaagaaagattgaaaagtttttgagccaacctttctttgttgcagaaatctttactggatcaccaggaaaatatgttgatcttgaagatactatcaaaagttttgatgggctagttaaaggtgagtacgatcatatgcctgaagcagcattttatatggtaggtggaatggatgaagcaattgaaaaagctaagaaattagaggttgaagctgcataa

SEQ ID NO: 273748 - DNA, 1537 bp, Unknown
  Bacterial polypeptide expressing nucleotide sequence isolated from the Sargasso Sea
aatggaaattaaagctgcagaaatttcatcagtaataaaagaccaaatatcaaattttgaaaccaaagcagatgttgctgaagttggaacagttttaagtgttggagatggaatcgctagagtctatggtttagatcaggttcaggcgggtgaaatggtagagtttcctggtggagttaaaggtatggctctaaatttagaaatggacaatgtaggtgttagtatttttggtgatgatacaggtattaaagaaggagatactgttaagcgtacaggagaaattgttgatgtaccagtaggaaaagaattattgggcagagttgttgatggcttaggtaacccaattgatggaaagggtccaattaattctaaagacagaagaagaattgaattaaaagctccaggaattataccaagacaaagtgtatcggaaccaatgcagactgggataaaagctttagatgcacttgttcctataggaagaggtcaaagagagttaattattggagacagacaaacaggcaaaactgctgtagctattgatactattttaaatcaaaaaacagttaatgaatccaataatgaaaaagaaaagctgtattgcatttatgttgctattggtcaaaaaagatcaacagttgcacaaatagttaaaacattagaagacaatggagcaatggaatatacaatagtcgtaagtgcaacggcttctgaaccggctccacttcaatttttatcagcctacacaggttgtactatgggagagttttttagagataatggtatgcatgctttgattgtttatgatgatttatctaaacaagcggtagcatatagacaaatgtctttactacttagaagaccgccaggacgtgaagcttatccaggagatgttttttatattcatagtagacttttagagagagctgctaaaatgagtgatgagcatggaggaggaagcttaacagctcttccagttattgaaactcaagcaggcgatttatctgcatatattccaacaaatgttatttcaattacagatggacagatatttcttgaaacaaatttattttttgctggaattcgaccagcaattaatgttggattatcagttagtagggttggatctgcagcacaaactaaagcaatgaaaaagattgcaggaccagtaaaacttgaattagctcaatacagggaaatggcagcatttgctcaatttgcttctgatcttgatgcttctactaaacagcttctagatcgaggagcaaggttagttgaaatattaaaacaaggacaatattctcccctaactgtaccagagcaagtagtgtctatttatgcaggtgttaggggctatttagataaaattaatgtgaatgatgtagtacgttttgaatctgaagttatgtcagaagttagaactaatcattcagatttgcttgaatctttagcaaatgaaaaagaattatccgaagagaacgatgaaaaactaaaatctattcttgatggatttgtagataaatttttaaatagttaa

SEQ ID NO: 273749 - DNA, 1094 bp, Unknown
  Bacterial polypeptide expressing nucleotide sequence isolated from the Sargasso Sea
tatggctaacaatttaactggaaaaatatcacaagtacttggagcagttgtagatatagaatttgatggagaacttcctgctattatgaacgcacttgaagtagataataatggtaatcgactaatgttagaagttgcacaacatttaggagaaaacgctgtccgtacaattgccatggacgttacagatggtttggtcagaggccaaacagcaacagacacaggtgcccctatttcaatgcctgtaggccctgaaacgttaggacgtataatgaatgtagttggagagcctgttgatgaaagaggtgaaattggaacaaaaaaaacatatcctattcatagatctgctcctgaatttgttgatcaatctactgaaacagaagttttagttaccggtatcaaggtggttgatcttttggcgccatatgcaagaggtggtaaaattggactttttggtggagcaggtgttggtaaaacagttttaattatggagttgattaataatattgcaaaagcacatggtggttattctgtttttgcaggagtaggagaaaggactcgtgaaggaaatgatctttatcatgaaatgattgagtctggtattattgacttaaaaggaaaagattccaaagttgctttagtttacggtcaaatgaatgaacctcctggagctcgagcaagagttgctttatctggattgactcaggcagagtatttcagagatgaagaaggtcaagatgttttattttttgtagataatatatttcgttttactcaagcaggttctgaagtatcagctcttttaggaagaataccgtctgccgttggttaccaaccgacattggcaactgatatgggggctcttcaagagcgtattacaactacaaaaaaaggatcaataacttcggttcaggcaatttatgttcctgctgatgatttaacagatccagcacccgcaacatcattttctcaccttgatgcaacaactgtcttaaaccgtgcaatttctgaaaaaggtatttatccagctgtagacccgcttgactctacttcaagaattttagatccacaggttgtaggagatgatcattatc

SEQ ID NO: 273750 - DNA, 1072 bp, Unknown
  Bacterial polypeptide expressing nucleotide sequence isolated from the Sargasso Sea
aaatcaaacaggccgattcacgcaaaagcaccctcgtttgaggaacagtcaaccgaagccgatgtattagaaacaggaattaaagtcattgaccttctttgcccgtttgcaaaaggcggcaaggtgggtttgtttggcggtgctggtgttggtaaaacagttactgtcatggagctaattagaaacatcgctgcagaacatgatggcttttcggtttttgctggagtgggagaacgaacaagagaggggaatgacttttaccatgaaatgatggagtcaaacgtcctcgataaagttgcacttgtatacggacaaatgaatgagcccccgggaaacagactcagagtagcactgactgggctaacgattgctgagaactttagagacgagggaagagatgtattgatgttcatcgacaacatctacagatacacgcttgcaggcacagaggtatcagcattacttggaaggatgccatctgcggttgggtatcaaccaaacctcgcagaagagatgggcgtacttcaagaaaggattacctctaccaaaacaggttcaatcacatcaattcaagcggtttatgtaccagcagatgatctgacagacccttcaccagctacaacatttgcccacctggacgcaacggttgtattggcaaggtcaattgcagagcttggtatttatccagcggttgacccgcttgactcaaacagtcgtcaactagaccccggcattgttggccaagagcactatgacactgcaaggtcagttcaacaggtcctgcaacgctacaaagagttgcaagacatcatagcaatccttggtatggacgagctttctgaagaggataagctcaccgtacagagagcaagaaagatccaaaggttcttgtcacaaccattctttgttgcagaggtctttacaggatcaccaggtcagtatgtgtctcttagggattcgattaaggcattccaaggaattgttgctggtgagtatgatgatctcccagaacaagcattctatatggttggcaccatcgaagaagcggtcgaaaaagctaaaagcatgtaac

SEQ ID NO: 273751 - DNA, 1420 bp, Unknown
  Bacterial polypeptide expressing nucleotide sequence isolated from the Sargasso Sea
aatgagtgaaaatataggtagggtagtaaaaatagcaggacctgttgttgacgttgcttttccacaagatgagttaccagagattacatttgctcttgaagtagatgtcgaaattgatgggaatacaagcacaattgtcttagaagttgcacaacaccttggtgaaggaagagtaagagctatttctatgcaaggtactgatggtttaagaagaggagctgaagtaactgatactggtgcgcctatctcagttccagttggacaagaaacattaggacacatatttaacgtctggggcgaaaccctagatgtagaaactagctcaataggtgttaaacaaaaatggccaatacacagaaaacctcctccatatgaagatgtgactgcacaaaatgaaatgtttgaaactggtattaaagtgattgatttattgatgccatacgtgcaaggtggaaaaatcggattattcggtggagctggtgtcggtaaaactgttcttattcaagaaatgattaacagagttgcaacacaacacggtggtgtatctgtttttgccggtgttggagagagaacaagagaaggtaatgacttgttcagagaaatgcaagaatctggagttatcgataaaacagctttagtttttggtcagatggatgaaccacctggagtgaggcttcgtgttgcattgtcagcactaacaatggctgaatacttcagagatgaagaaaaacaagatgttcttttattcattgataacattttccgtttctcacaagctggttcagaggtctcgacattattaggtagaatgccttctgctgtcggataccaacctactcttgctgatgaaatgggatttttacaagagagaattacatctcttaaaggtagatccattacatcactacaagcggtatatgtgcctgcagacgatattactgaccctgcacctcacactgcatttgctcacttagatgctagaacagtgttatcaagatctattgctgacttgggaatttatcctgctgtggatccacttgactcatcatcaagaatcttagatccaggcgttgtaggggatgaacattatgaaactgcacgtgaagtccaaagagtgcttcaaagatacaacgatcttcaagatattattgcaattcttggtatcgatgagttatcagaagaagataagcagatcgttggtagagcgaggagaatacagcgtttcttatctcaacctatgtttgttgctgaacaatttacaggaatagaaggtaagtttgtctctattaaagatagtgtcgaagccttcaaaacaatcttaagcggagaactcgattcagtgccagaacaggctttttatatgacaggtggattagatgaagtcatgtctaaagctaaagaattggaagaaaatctctaa

SEQ ID NO: 273752 - DNA, 1519 bp, Unknown
  Bacterial polypeptide expressing nucleotide sequence isolated from the Sargasso Sea
attgagcgaatttaatattgatgcaaaacaaatatcagattcattaaaagagactctaggtgattggcaggattctgtaaaagacgatcttgttggttacgtttctgcggtagctgatggagtagcaagagttaaaggcttagaaaatgttatggcatcagagcttcttgaattcccagggggacttgttggagtagcacttaaccttgaagaggattctatcggtgttgttttgatgggtgactcaaatcacatagaagagggcatgcctgtaaaacaaactggagaggtgttgtcaattggtgttggtgatggctttttaggaagagttattgatcccctaggaaatccaattgatggcaaaggacctattgaatttactgaacgaagacgattagaacttcaagccccatctgttgttgaaagacaacccgttggggagccactacaaactggtattaaagctattgactcaatgattccaattggtcgtggacaaagagaattaattattggtgatagacagattggaaaaactgctgttgcagttgatacaataatcaatcaaaaagacacagatgttaaatgtatctatgttgctattggtcaaaaatcatcaactgttgcagaagtagtagagagatttgagcaagagggtgttctagataaagtagtaattgtaaacgcacccgcctcagctgcagctgcattgcagatgtatgctccttatgctgggtcagcaattggccaacattggatgtataacggtgagcatggattaattgtttttgacgatctatcaaaacaagccatcgcatatcgtcagatatcacttctactaagaagacctcctggaagagaggcttatcctggtgacgttttctatcttcactcaaggctattagagcgttgtgcaaaagttagtgaagagttaggtggcggttcacttacaggactaccaatcatagaaacaaaagctggagacgtatcggcattcatcccaacaaatgttatttccattacagatggacagatttatttggaatcagaactcttttattctggtgttagacctgctgtaaacccaggtacatcagtatcaagagtgggtggtgctgcacaaactaaagctatgaagaaagtttcaggacctttaagaattaaccttgcacagttcagagagttagaggcctttgcagagtttggatcagacttggatgctgcatcacaagcacagcttgatagaggaagaagagttgtcgaattattaaagcagccacaatatcaaccagtgccaatggaagagcaagtcatctcactctatgcagtaacagagggatttttagatgtagttgatcctgctgacatccctcaaaccgaattagatttgattgattttgttaaaacaagacattcagatgttattaattcaataaaaacaacaggtgaattacctgaagaggaattaaaaacagctgttgaagcctttgtaagtacattggagaaaaaagaagaataa

SEQ ID NO: 273753 - DNA, 1420 bp, Unknown
  Bacterial polypeptide expressing nucleotide sequence isolated from the Sargasso Sea
atgagaaaaggacaaataacacagattattggggcggtagtagacgtaaaatttgaaggagaactaccagaaattttaactgcactagagtgcgataatggtggaaatagattagttttggaagttgcacaacacttaggggagtcaagtgttagaacaattgcaatggatgcaacagagggtcttaaaagaggagacgaggtaaccgacacagctgctccaattaaagttccagttgggccggagactcttggaagaattataaatgtgattggtgagcctattgatgaaagaggaaaagttaaaagttcagataattggccaattcacagagctgcaccagaatttaatgatcaatcaacagaaactgaaatacttgtcacaggaataaaggttattgaccttttagcaccctatgcaaaaggtggtaaaattggtttatttggtggagctggagttggtaaaactgttttaattatggaattgattaacaacgttgcaaaagctcatggtgggttttcagtttttgcaggagtaggagaaagaactagagagggaaatgatctttaccatgaaatgatagattcaggtgttattaaaactgatggggaaggttctaaagcagcattagtttatggacaaatgaacgagcctccaggggcaagagctagagtagctttaactggattaactgttgctgaatactttagggatcaagaaggtcaagatgtactattctttgttgataacatttttagatttacacaagcaggatccgaggtctctgcattacttggtagaataccttcagctgtaggatatcaaccaacattagcaactgatatgggtaacttacaggaaagaattacaacaacgaataaaggttcaattacctctgttcaggcaatttatgttcctgcagatgacttaactgacccagcgcctgcaacttcatttgctcacttagatgcaacaactgtactttctagacagattgctgaaattggaatttacccagcggtagatccactagactcaacttctagaattttagatcctagaatagttggagacgaacattatagagtggcaagagaagtacagaaagttctgcaaacttataaatctttacaagatattatcgcaattttgggaatggatgaattatctgaggaggataaattagttgttgctagagctagaaaaatacaaagatttctatctcaacctttctttgtagctgaagtatttactggctcgccaggtaagcttgtagatttagaatcaacgatcaaaggttttgatgctatttgcaaaggtgaatatgatcacttaccagaagctgcattttatatggttggcactattgaagaagctgttcaaaaagctgagagtttagctaacgaagctgccgcataat

SEQ ID NO: 273754 - DNA, 1261 bp, Unknown
  Bacterial polypeptide expressing nucleotide sequence isolated from the Sargasso Sea
atggaaataaatccttcagaagtaacaaaaatattaaaagaacaaattaaaaagtttggagataaagctgaggttacagaggttggtcaagttttatcagtaggagatggtatagcaagaatttatggattagataatgttcaagctggagaaatggtagaattttctgatggctctaaaggaatggcattaaaccttgagagtgaaaatgtaggtgtagtgatttttggtgatgatagagcagttaaagaaggtgatactgtaaaaagaactggtgcaattgttgatacaccagttgggaaagaattgcttggtagagtagttgatggtttaggaaacccaattgacggaaaaggtgcgttagataaaagtttaataagaagtagggttgaggtaaaagctcctggtataattccacgtaaatctgtaagtgaaccaatgcagactggtcttaaatcaattgatagtttagttccaattggaagaggacaaagagaattaattattggtgatagacaaacaggtaaaacagcagttgcaattgatgctattataaatcagaaaaaaattaacgagtcaggtgatgagaagaaaaaattatattgtatttacgtagctgtaggccaaaagagatctacagttaggcagattgaaaaaacactagaagaagctggtgcgatggaatacacaacaatagttgcagcaaccgcatcagatgcagcacctttgcaatttttagcaccttatactggatgcactatgggtgagtattttagagataatgggatgcatgccttgattatatatgatgatttatcaaaacaagctgttgcatatagacaaatgtcacttctattaagaagacctcctggaagagaagcataccctggagatgtattttacttacatagtagattattagaaagagcagcaaaattgagtgatgagcatggtggaggatcattaacggctcttccaattatcgaaactcaaggtggagatgtttctgcattcatacctactaatgttatttcaattactgatggtcaaatatttcttgaaacagaactttttaaccagggaataagacctgctataaatgttggattatctgtatcaagagttggatcatctgctcaaactaaagcaatgaaaaaagtttcagggtcaatgaaattagaactcgcgcaatatcgtgaaatggctgcctttcgcacaatttggttcagacctcgatgcatctactcagaaattacttaac

SEQ ID NO: 273755 - DNA, 751 bp, Unknown
  Bacterial polypeptide expressing nucleotide sequence isolated from the Sargasso Sea
atgtacttttcacctctagaacagtttactattatttctttaattccttgccatttaggaaatttttatttttcatttacgaattcagctctatttttccttttatcaactggcgctttcgtatttttatgttcattagtttttacaaaaggtgggactcttgtaccaaccccttggcaatcacttattgaatctatttatgaatttgttgtaagtttagtctcagaacaaattggaaaaaaaggggttcaatatttcccatttgtttttacgctttttacttttctccttttaagtaatttgattgggatgattccttatagtttcacaactacaagtcattttatcattacttttactttgtctttttgtgtttttattgcaatgactttaattggattccaaacccatggactgcatttttttagttttttacttccacctggcgcacctttagttttagcccctggtttagtcgtgattgaacttgtttcttattgcttccgaggtatcagccttggagttcgactttttgctaatatgatggctggacacactttagtaaaaattttaagtgggtttgcttggactatgctttcattaagtggtgtattaaaacttgctgctgcaattccgtttttagttgtatttgctttaatgtttttagaagtaggcgttgcttgtttgcaagcttacgtgttcactattttaacttgtatctatttaaatgatgcaatccatctacattaag

SEQ ID NO: 273756 - DNA, 1483 bp, Unknown
  Bacterial polypeptide expressing nucleotide sequence isolated from the Sargasso Sea
atgtcacaaaaaattggtaaagtttctcaaattattggtcctgtagttgatgtttcttttgatacagcaaacacagaattacctaagatttatgattcattagaaataaaaaaagctgatggttcagtgctagttttagaagttcaatcacacgtaggtgaggatatggttagaactatatcaatggactcaacagatggtttacaaagaggcgcagatgttgtatcaaccggaaatccaattcaaatgcctattggcaaagatatctacggtcgtttatttaacgttataggagatgcaattgatggtatggaagacttaccaaaaagtggtaaaagtggcttacctattcatagagaagctccaccatttgaacaactttctacttcaacagaagttttatttactggaattaaagttattgatttgattgagccatatgcaaaaggtggaaaaattggtctttttggaggtgcaggtgttggtaaaactgttctgattcaggagcttataaataatatagctaaaggacatggtggattatcagtttttgctggtgtaggtgaaagaactagagaaggaaatgatttacttcgtgaaatgttagaatcaggaatcatcgactatggtaaagaatttatggaatctatggaaaatggtggatgggatcttagtaaggttgataaaaaagcattagagaactcaaaggcaacatttgtttttggccagatgaatgaacccccaggagctagagctagagtagctctttctggattgacagtagcagagtattttagagatggaagtggtgatggacaaggaaaggatgtattattctttgttgataatattttcagatttactcaagcaggttcagaggtatcagctctattaggtaggatgccctcagctgttgggtatcaaccaacattagctactgaaatgggtgcaatgcaggaaagaattacatctacaaaaaaaggatcaattacctcagtacaagcagtatacgtcccagcagatgacttaacagatccagctccagctaccactttttctcacctagatgcaactacagtattatcaagaaaaattgcggaattaggtatttatccagctgtagatcctcttgattctacatctagaattttaacacctgaaatccttggtgatgatcattacaattgtgctcaaagagtaaaagaaatgcttcaaaaatataaagaacttcaagatatcattgccattctaggtatggaagagctttccgaagaagataaattagttgtatctcgagcaagaagagtgcaaagatttttatcacagccatttcatgttgctgaacaatttacaggaattcctggtgtattagttgatattaaagacacaattaagggttttaacatgatcatggatggagagcttgaccatttaccagaagcggcatttaacctaaaaggaactatagtaggaagcaattgaa

SEQ ID NO: 273757 - DNA, 691 bp, Unknown
  Bacterial polypeptide expressing nucleotide sequence isolated from the Sargasso Sea
atgtcacaaaaaattggtaaagtttctcaaattattggtcctgtagttgatgtttcttttgatacagcaaacacagaattacctaagatttatgattcattagaaataaaaaaagctgatggttcagtgctagttttagaagttcaatcacacgtaggtgaggatatggttagaactatatcaatggactcaacagatggtttacaaagaggcgcagatgttgtatcaaccggaaatccaattcaaatgcctattggcaaagatatctacggtcgtttatttaacgttataggagatgcaattgatggtatggaagacttaccaaaaagtggtaaaagtggcttacctattcatagagaagctccaccatttgaacaactttctacttcaacagaagttttatttactggaattaaagttattgatttgattgagccatatgcaaaaggtggaaaaattggtctttttggaggtgcaggtgttggtaaaactgttctgattcaggagcttataaataatatagctaaaggacatggtggattatcagtttttgctggtgtaggtgaaagaactagagaaggaaatgatttacttcgtgaaatgttagaatcaggaatcatcgactatggtaaagaatttatggaatctatggaaaatggtggatgggatcttagtaaggtgataaaaaagc

SEQ ID NO: 273758 - DNA, 1390 bp, Unknown
  Bacterial polypeptide expressing nucleotide sequence isolated from the Sargasso Sea
aatgagtgatactggcgtaattaaacaaataataggtgcggttatcgacgttgagtttgataaagcccaaattccgaacatctatgatgcattggtcgtaggcgaaaataaccttgtgcttgaaacacagcaacaattaggagacggcatagtgagaacagttgctatgggaactactgaagggttaaaaagaggattaaacgttgaaaacactaaggcaccaatcagcgttcctgttggtgaagcaacactaggcaggataatgaatgttttaggtgatccaatagatatgaaaggagaagttaaaacaaaagagagaatgccgattcatagaaagccaccagaatatgtagatctagctgactcaaacgaaattttagaaacaggcattaaggtcattgatctagtgtgccctttcgcaaagggtggaaaagtagggctctttgggggagcaggagttggaaaaacagtaaatatgatggaattaatcagaaatatagcaattgagcattcaggctattcagtttttgctggtgttggtgagagaacaagggaaggaaatgacttctatcatgaaatgacagactcaaatgttttagacaaggtctctcttgtttatggccagatgaatgaacctccaggaaacaggcttagagttgcattaacaggactaactatggctgagaaatttagggacgaagggagagatgttttacttttcgtagacaatatctataggtataccttagctggtgtagaagtatccgcattgcttggaagaatgccttcagctgttggttatcagcctacacttgcagaagaaatgggagtgctacaagaaagaattacttcaaccaaaacaggttcaattacatctatacaagcagtttatgtgccggctgacgatttaacagacccatcaccagcgacaacttttgctcacttagatgctacggtcgtcctttcaagaagaattgcagaacttggaatatatcctgctgtcgatccccttgactcaacctcaagacaattagatccattagttgtagggcaagaacattatgaagtggcacaaagagtgcaaggcgttttacagagatataaagaactcaaagatattatcgctattcttggtatggacgagctgtcagatgaagacaagaacacggtctcaagagcaagaaaagttgaaaaatttttatcacagccattttttgttgcagaagtttttacaggcgcaccaggaaaatacgtttctgtgaaagacacaattcaagggtttaaagaaattcttgatggtgttcatgatgacgtaccagagcaagctttttatatggtcggctctatagaggaagttttagaaaaggctaagacagttaaaagtgattag

SEQ ID NO: 273759 - DNA, 1549 bp, Unknown
  Bacterial polypeptide expressing nucleotide sequence isolated from the Sargasso Sea
aatgactacaaaaataaacccatcagaaatatcaagcatcataaaaaagaaaattgatgactacaaaggagcggctacagaagcaaatgtaggggaagttctctctacagcagatggaattgttcaaatttatggcctagaagacgcaatgtatggagagctattagactttggagaaggaacatatgggctagccttaaaccttgaaacagactctgttggggcagtagtattaggcgactctggtcatataaaagaaggccaaaaggtcaagaccacaggaagaatacttgaagttccagttggtgaaggtctaaaaggaagagttcttgatgccttaggcagaccattagatggaaagggtgaagttaaatcaaaacataatgctcctattgaggttgtggcaccaggagtaattgataggcaatcagtagatcagccagtacaaacaggaattaagtcaattgatgtaatggttcctattggaagaggacaaagagaactaataattggagacaggcagacaggaaaaacagcaatagctgtggacaccatagttaatcaaaaaaattctgacataacatgtgtttatgtagctataggccaaaaacaatcaacagttgcaactgtagttaggcagctagaagaagcggacgcacttaaaaatacaatagttgttgcagcaacagcagctgaaagcgcatcattacaatttcttgcaccatattcagggtgtacgatgggcgaatacttcagagatattggtgaagatgctttaattatttacgatgacttatcaaaacatgcgatagcctatagacaaatttccttgttgcttaaaaggccacctggaagagaggccttccctggagatattttctaccttcattcaagacttttagaaagagcatcaagagttaatgctgattatgttgaaagggtgaccgatggaaaagttaaaggcaaaacaggatcactaactgccctccctataattgaaactcaagcaagcgacgtttcggcttttattccaacaaacgttatctcaattacagacggacagatattcttagaaacagacttatttaattcaggaattaggccggccattaatcctggcatttcagtttcgagagttggcggagcagcgcaaactaaaataatgaaaaagcttggtggcggagtcaaattagcacttgcacagtttagagaattagaatctttttcacaatttgcatcagacttggatgatgccacaagagagcagctcgaaaacggacaaagaataacagagttgcttaagcagaagcaattctccccacgatcagtcgcgtgtgtttctattgtcttatacgccatcgaaaataaatatttaactaatattgaaaaagaaaagatgcagtctttcgaagataaccttagaacctatttcaaatcaaagcacaaagatgtttgggaagaagttaataaaactggcgactggaacgatgacttagaaaaaaaatataaagcaatacttgatagttttgtaaaagaaggatcttggtag

SEQ ID NO: 273760 - DNA, 974 bp, Unknown
  Bacterial polypeptide expressing nucleotide sequence isolated from the Sargasso Sea
tatgagcaacggattagtaacacagataataggagctgttatcgatgtagaattcgataaagaaaacataccacaggtgtatgaagctttattaatagacgaaagtggcaccactttagaagttcagcagcaattaggtgacggagttgtaaggacaattgcaatgggtgcaacagaaggactcaaaagagatctaagtgtctcaagaacaaatgctccaatatctgtgccagttggaccagaaacattaggtagaattatggatgtgctcggaaatccaatagatgaaaaaggcccgataggcgaaaaagaaaaaatgcctattcataaaaaaccgcctagctatacggatcaatcagcatccaatgaaatcttagagactggcattaaagttattgatcttatgtgtccttttgctaagggtggaaaagttggactttttggaggtgctggtgtcggaaaaactgtcaacatgatggaacttatcaataatatcgctcttcaacactcaggactatcagtatttgcaggagttggcgaaaggactagagaagggaatgacttctattatgagatgcaagagtctggggttgttaatattgaaaagttaggcgaatcaaaagtttctatggtatatggtcaaatgaacgaacctcctggcaatagattaagagtagctctaacaggactaaccatagctgaaaaatttagagatgaaggaaaggatgttttactatttatcgataatatttatcgatacacacttgcgggagtagaagtctctgcattgttaggaagaatgccatctgctgtaggctatcagccaactttagcagaagaaatgggagctcttcaagaaagaataacttcaaccaagacagggtctataacatctattcaagcggtgtacgtgccagcagatgatttaacggacccatccccagcaacaacatttgctcacttagatgcaactg

SEQ ID NO: 273761 - DNA, 1462 bp, Unknown
  Bacterial polypeptide expressing nucleotide sequence isolated from the Sargasso Sea
aatggtagcaactccatcaacttcttcacaaacaaaaggcgtagttcgtcaggtaattggtccagttctagatgtagaatttccagctgggaaattgcccaaaatattaaatgccttaagaattgaagctaaaaatccagctggacaagatatagcgctcactgcagaagtccaacagctcctaggtgaccatagagtaagagcagtggcaatgagtggcacagacggccttgtaagaggcatggaggcaatcgacacaggagcaccaatatctgtacctgtaggagaagcaactttaggaagaatatttaatgttttaggagaaccagtagatgaacaaggtccagtaaatactaaagataccgctccaatccacagagctgcgccaaaattaactgacctagaaactaagccaaaagtttttgaaactggtattaaagttatcgaccttttggctccttacagacaaggaggaaaagttggattattcggaggtgctggtgttgggaagacagttcttattcaagaattaattaataacatcgcaaaggagcatggtggagtttctgtttttggtggtgtaggagaaagaactagagaagggaacgatttatatgaagaatttaaagaatctggagttatcaatgcagatgatttaactcaatctaaagttgccttgtgttttggacagatgaatgagccacctggtgcaagaatgagagtaggcttatcagcacttacaatggccgaacattttagagatgttaataaacaagacgtcctactttttgttgataacatttttagattcgttcaggctggttctgaagtatctgcactactgggaagaatgccttcagctgttggatatcaaccaacgctgggaactgacgttggtgaattgcaagaaagaattacatctacattagaagggtcaataacatctatccaagctgtttacgtacctgctgacgacctaacagaccctgctccagctacgacctttgcccatttagatgctactaccgtgcttgctagagctcttgcagctaagggaatttatccagcagttgatccattagactcaacgagcaccatgctacaaccatcagttgttggcgatgagcattacaaaacagccagagctgttcaatcaactttacaaagatacaaagaacttcaagatattatcgcaattcttggtttagatgagctttctgaagaagatagattaacagtcgacagggccagaaaaattgaaaaattcctctcacagcctttcttcgtagcagaaatatttacaggaatgtctggaaaatatgtaaaattagaagatacaattgctggtttcaatatgattttatcaggtgaattggatgacttaccagagcaggcattttacttagttgggaatattgatgaagttaaagcaaaggctgaaaaaataaaatcagaaaaataa

SEQ ID NO: 273762 - DNA, 406 bp, Unknown
  Bacterial polypeptide expressing nucleotide sequence isolated from the Sargasso Sea
aatggcaatttctctaaaagttttagctcctaataaaaatgtttatcaaggcgaagctgaagaagtaatccttcctagtactactggtcaacttggtatactcccagggcatatctctttggttactgctatagatattggcgttttaaggctaagaatgaattcccagtggaaatcaatagctcttatgggaggcttcgctgaaattgaatcagatgaagttatagttttagtaaataatgctgaaattggttctgaaattaatgttcaaaatgctgaacaagatcttaaagaagcaaaattagcaattagcaaattttctgaaaatgaaaaaaatccagaaaaaattaaagccttgaaagaggtttccaaggctgaggctagaattcaagctgcaaagaactaa

SEQ ID NO: 273763 - DNA, 1420 bp, Unknown
  Bacterial polypeptide expressing nucleotide sequence isolated from the Sargasso Sea
tatgagcaaaggaataatcacacaagttattggagcagtagtagacgtaaaatttgaaggagaactaccagaaattttaacagcattagaatgtaaaaacggtgataacagattagttttagaggttgctcagcacttaggagaatctacagtaagaactattgcaatggatgctactgaaggattaaaaagaggagatgaagttgtaaatacaaatgctcctattcaagttcctgttggaccagaaaccttagggagaattattaatgtaattggtgagccaattgacgaaagaggtgaggttaaaactaaagaaagctggcctattcacagagctgcacctgaatttaacgatcagtcaaccgaaactgaaatattagttactggtattaaagttatcgacctattagcaccatacgccaaaggaggaaaaattggattatttggaggtgcaggtgttggtaaaacagttttgattatggaattgattaacaacgttgcaaaagctcatggtggattttcagtctttgctggtgttggagaaagaacaagagaagggaacgacctttatcatgaaatgatggattcaggggtaataaaaaaagatggccctggttctaaggctgcattagtttatggacaaatgaacgaacctccaggagcaagagcaagagttgctttaactggattaacagtagcagaatattttagagatcaagaaggacaagacgttttatttttcgttgataatatttttagatttactcaagctggatcagaagtatctgctttattaggtagaattccttcagctgtaggatatcaacctacgttagctactgatatgggtaaccttcaagaaagaattacaacaacaaacaaaggatcaattacttctgtgcaagcgatttatgttccagctgatgacttaactgatccagcacctgcaacatcgtttgctcacttagatgctactacggtactttcaagacaaatagctgaaattggtatctatcctgcagtagatccattagactctacttcaagaattttagatccaagagtagttggtgacgaacattatagagttgcaagagatgttcaaagaattttacaatcttataaatcacttcaagatattattgctattcttggtatggacgaattatctgaggaagataaattggttgtagcaagagcaagaaaaattcaaagatttttatctcaaccgttttttgttgctgaagtatttacaggttcaccaggaaaattggttgatcttgaatcaacaatcaaaggatttgatgcaatctgtaaaggtgaatatgatcacctgccagaagcagctttctacatggttggtacaatcgaagaggctattgaaaaagctcaaaaaatggaaaaagaagccgcagcttaa

SEQ ID NO: 273764 - DNA, 1537 bp, Unknown
  Bacterial polypeptide expressing nucleotide sequence isolated from the Sargasso Sea
aatggaaataaatccttcagaagttacaaagatattaaaagaacaaataaaaaattttggagataaagcagaggttactgaagttggtcaagttttatcagttggtgatggtatcgctagaatttatggtcttgacaatgttgaggctggagaaatggttgaattttctgatggctctaaaggtatggccctaaacttagagagcgaaaacgttggtgttgtaatttttggtgatgacagaaatattaaagagggtgatgttgtaaaaagaactggaaatattgttgatacgccagttggaaaagaattactaggtagagtagtagatggtttgggaaatccaattgatggcaaaggtgcattagataaaagtgtacaaaagagcagagtagaggttaaagcccctggaattatccctagacaatcggttaatgaaccaatgcaaacgggattaaaatcaattgatagtttggttccaattggaagaggacaaagggaattaattattggtgatagacagacgggaaaaactgctgttgcagttgacgcgatcataaaccaaaaaaagattaatgaatcaggtgacgaaaaacaaaaattatattgtatttatgttgctgtaggtcagaagagatcaactgttagacaaattcaaaaaactttagaagaagctggtgcaatggaatatacaacgattgttgcagcaacagcatctgactcagcaccacttcagtttttagctccatatactggttgtgctatgggtgaatatttcagagataatggaatgcacgcgttaattatctatgatgatttatcaaaacaagcagttgcttatagacaaatgtcacttttacttagaagacctcctggacgtgaggcttacccaggagatgtattctacttacatagtagattgttagaaagagctgcaaaattgagtgatgaacatggtggaggatctttaacagcacttccaattattgaaactcaaggtggagacgtatcagcgtttattccaacaaacgtaatttcaattacagatggtcagattttcttggaaactgaattatttaaccaaggaattagacctgcaattaacgttggattgtcagtttctagggtaggttcatctgctcaaaccaaagcgatgaaaaaagtttcaggatcaatgaaacttgagcttgctcaatatagagaaatggcagcatttgctcaatttggatcggatttagatgcgtctactcaacagctattgaatagaggatcaaaattaactgagcttctaaaacaaaaacaatattctccaatgacagttgctgaacaagtaatttcggttttctgtggtgttaaaggatatcttgatgatattgatttaaaagatgttgcaggttttgaaagtaaaatcatagagaaatgtaaatcagaaaaacccgagattattgagtcgatacaaagttcaggaaaacttgaagaggataaagaaaagttattagttgaactgattgctcaattaaaggaaacccttaaatcttaa

SEQ ID NO: 273765 - DNA, 874 bp, Unknown
  Bacterial polypeptide expressing nucleotide sequence isolated from the Sargasso Sea
tatggcaagtttagacgatctaaaaaaaaggatagctagtgtaaaatctacacaaaaaattactaaggctatgaaaatggttgcagctgcaaaattaagaaaagcacaagaaagtgctgaaaaaggacgaccttattcagaaaaaatgaacaatgtaattttaaacctgtctagtggaatttcagataaagaaaatgcaccaaagttattagctggtacaggacaagacaaagttcatctttgtgttgttatgacatcagatagaggtctatgtggtggatttaattccaacataattaagaaagcaaaaagttatttttctaaaattttagatgagaataaagagcttaaaattatcactgtaggttcaaaaggcaatgatcagcttaagagaatttatggtgataaaataattgaaaatatttcatttaaagaatcgaaaaatgcaaattattttgatgcagataaagtaggaagaactattattgaaaaatttgaagcaggtgaatttgatatttgtacaattttctacaataaatttaaaaatgtaattacacaaatcccacaggctcaacaaataattcctttaaatgatgagggaagtgaaaatagttcagatgaaagttacgaatttgaaccagatgaagatgaaattttaagcaatttgttgccaaaaaatatttcaacacaaatatttaaggcaatgttagagaattcagctagcgaacaaggatccagaatgagtgcaatggataatgcaacccgaaacgcaggtgaaatggttgacaaacttactatcgaatataatagaagtcgtcaggcagcaattactaaagaactaatagaaatcatatcaggagcagaaagtttataa

SEQ ID NO: 273766 - DNA, 898 bp, Unknown
  Bacterial polypeptide expressing nucleotide sequence isolated from the Sargasso Sea
aatggaagaactaaatccctcagaaataagtcaagttattaagcaaaaaatcgacgccctagacacatctgctaaacctagcaatgaaggcacggtcgtttttttagccgatggaatagccagaatacacggcctaggcgaagtcatgaacggagagcttatagagtttgatcatggcgtgatgggaatggcacttaacctagaaagagactctgtcggagctgtgattttaggagattacaagcttttggcagaaggcagctctgcaaaatgcacaggcagaatactagaagtgccggtaggagaagccttgttaggaagggtggtcgattctcttggaaaccccatagacggtaaaggagaagtaaagacaacagaaactgccccagttgaaaaagttgcaccgggtgtaatttctagaaagtctgttgaccagccagtgcagctcggtataaaggctgttgacagcatggtcccaataggaagagggcagagagagttaataattggtgacagacaaacaggcaagaccgccatagcaatagacgcaataatcaaccagaaagataccggagtgaaatgtatttatgttgcggtggggcaaaaacaatcttccatcgcacaagtggttagaacccttgaagagtatggcgcgatggaaaacaccattgtggttgtggcggcggcggctgatcctgcccccatgcaatatatagcacctttctcagcatgctcaatgggcgaatattttagagaccgaggagaagatgcacttatcatttatgatgatttatctaaacaggcggttgcatatagacagatgtctttattattgagaaggccgccaggaagagaggcttatccgggtgatgttttttatcttcactctaggttatag

SEQ ID NO: 273767 - DNA, 1384 bp, Unknown
  Bacterial polypeptide expressing nucleotide sequence isolated from the Sargasso Sea
tatgagtaaaggaacagtaatacaaataataggtgcggtaatcgatgttgaatttcctaaagaaaatcttcctaagatatatgacgcattaaccgttgatgaaaatggactagttttagaggttcaacaacaactgggcgatggagttgttagaaccattgccatgggaccttcagagggtctaaaaagaggagttgatgtaaccaacacagagaatccaatttctgttccggttggagaagaaactctaggcagaattatgaatgtgttgggtgagcctatagatgagaaaggggacgtggcagcaaaaaaatcaatgcccattcacagaaaccctccttcttatgaagatcaggcggaaacaaccgagcttcttgaaacaggcataaaagttattgaccttatttgtcctttcgcaaaaggcggaaaggtgggactgtttggaggcgcaggtgttggcaagacagtcaacatacaggagcttatcagaaatatagcctatgagcacagtggttattcagtgtttgcaggcgttggagaaagaactcgtgaaggcaacgacatgtaccatgaaatgatcgaaggaggggttctggacaaggtagcattggtatacggtcagatgaacgaaccgcccgggaacaggttaagagttgcactctcaggactaacaatggcagaaaattttagagatgagggtagggacgttttattgttcgttgacaacatttacagatacacattagcaggaacagagtgttcagctcttttgggcagaatgccgtcagcggttggataccagccaactcttgctgaggaaatgggagtattgcaagaaagaattgcttcgacaaagacgggatccattacatctgtgcaggccgtttatgttcctgccgacgatttaaccgacccctcacctgcaacaacatttgctcacttagatgccaacgtggttctatctaggcaaatcgcttctcttggaatttatccagctgttgacccactagattcaaacagcagacagctagagccaggcatagttggtcaagagcattacgatgtagctaatgcagttaaacagcagctaaacaggtacaaggaacttaaagatattattgctatcttgggcatggatgagctttcagaagaagataagcttgtagttgcaagggcaagaaaaatagaaagatttttatcacagcccttctttgtagccgaggtctttactaatgctccaggaaaatatgtccccttaagtgaaaccataagaggatttaagggcatagtgaatggtgattatgatgatataccagagcaagcattccttatggcgggcggtatagatgaggtggttgaaaaagccaagtcagaggcggcgtag

SEQ ID NO: 273768 - DNA, 595 bp, Unknown
  Bacterial polypeptide expressing nucleotide sequence isolated from the Sargasso Sea
tatgagcaaaggaataatcacacaagttattggagcagtagttgacgttaaatttgatggagaacttccagaaattctaacagcattggaatgtaaaaatggggataacaggttagttttagaggttgctcaacatctaggtgaaacaacagttagaacaattgcaatggatgctactgaaggattaaaaagaggtgatgaagtaataaatactaacgctcctatccaagtaccagttggacctgaaactcttggaagaattatcaatgtaattggtgagcctatagatgaaagaggcgaagttaaaacaaaagaaagttggccaattcacagagcagccccagaatttaatgatcagtcaactgaaacagaaattcttgtaactggtattaaggttattgacctgttagcaccttatgcaaaaggtggaaaaattggattatttggtggagctggagttggtaaaacagtcttaattatggaattaattaataacgttgcaaaagctcacggaggattttcagtttttgcaggagtaggtgaacgaactagagaaggaaatgacctttatcatgagatgatggactctggagta

SEQ ID NO: 273769 - DNA, 1462 bp, Unknown
  Bacterial polypeptide expressing nucleotide sequence isolated from the Sargasso Sea
ctgaagtcggcccaagtattatctgttggggacggaatagctagaatttatggcttagataatgttcaggctggtgagatggttgaatttgctgatggatcaaaaggtatggctcttaacttggaaagtgaaaatgttggtgttgtgatttttggtgatgatagaaacattaaagaaggtgatgttgttaaaagaacaggaaatattgttgatacaccggtcggaaaagaacttttaggcagagtagttgatggcttaggaaatcctattgatggaaaaggagcgctggataaaagtgttaaaaaaacaagggtagaggtcaaagcccctggtatcattcctagacagtcagttagtgaaccaatgcaaactggattaaaatcaattgacagtttagtgccaattggaagagggcaaagagaattaataattggagacagacagacaggtaaaactgccgttgctgttgatgcaattataaatcagaaaaaaatcaatgagtcaggcgatgagaaacaaaaattatattgtatatatgttgcagtcggtcaaaaaagatcaacagtaagacaaattcaaaaaacgttagaagaagcaggcgcaatggaatacacaactattgttgcagctacagcatcagattcagctcctttacaatttttagctccttatacaggttgtgctatgggcgaatattttagagataatggaatgcacgctttaattatttatgatgatttatctaaacaagctgttgcttatagacaaatgtctcttcttttaagaagacctccaggaagggaagcctacccaggagatgtattttacttacacagtagattgttagaaagggcagcaaaacttagtgacgaacatggtggaggatcactaacagcacttccaataatcgaaacacaaggaggagatgtttctgcatttatcccaacaaatgtaatttcaattacagatggccaaatatttttagaaacagagctttttaaccaaggtattagaccagcaattaatgtaggattatcggtatctagagttggatcttcagctcaaacaaaagctatgaaaaaagtatcaggttcaatgaaacttgagttagctcagtacagggaaatggcagcttttgctcaatttggatcagatttagatgcttcaacacagcagctccttaaccgaggttcaaagttgactgaacttttaaagcaaaaacaatattcaccaatgacagttgcagagcaagtaatatctgttttttgtggagttaaaggttatttggatgatattgatttaaaagatattgctgaatttgaaactaaaataattgaaaagtgcaaatctgataagcctgaaataattgattctattcagagttctggaaaacttgaagaagataaagagaaactattaatagaagtaattaaccaactaaaacaaaactttaaatcataat

SEQ ID NO: 273770 - DNA, 943 bp, Unknown
  Bacterial polypeptide expressing nucleotide sequence isolated from the Sargasso Sea
atggaaataaatccttcagaagttacaaaaatattaaaagaacaaattaaaaattttggtgaaaagactgaggttactgaagtcggccaagtattatctgttggggacggaatagctagaatttatggcttagataatgttcaggctggtgagatggttgaatttgctgatggatcaaaaggtatggctcttaacttggaaagtgaaaatgttggtgttgtgatttttggtgatgatagaaacattaaagaaggtgatgttgttaaaagaacaggaaatattgttgatacaccggtcggaaaagaacttttaggtagagtagttgatggcttaggaaatcctattgatggaaaaggagcgctggataaaagtgttaaaaaaacaagggtagaggtcaaagcccctggtattattcctagacagtcagttagtgaaccaatgcaaactggattaaaatcaattgacagtttagtgccaattggaagagggcaaagggaattaattattggagacagacagacaggtaaaactgctgttgctgttgatgcaattataaatcagaaaaaaattaatgagtcaggtgatgagaaacaaaaattatattgtatatatgttgcagtcggtcaaaaaagatcaacagtaagacaaattcaaaaaactttagaagaagcaggcgcaatggaatacaccactattgttgctgctacagcatcagattcagctccattacaatttttagctccttatacaggttgcgcgatgggcgaatattttagagataatggaatgcatgctttaattatttatgatgatctatctaaacaagctgtagcttatagacaaatgtctcttcttttaagaagacccccaggaagggaggcttacccaggagatgtattctacttacacagtagattattagaaagagcagcaaaacttagtg

SEQ ID NO: 273771 - DNA, 1510 bp, Unknown
  Bacterial polypeptide expressing nucleotide sequence isolated from the Sargasso Sea
atgactggaaaaatttctcaaataatgggtgcagtagttgacgtcgcattcgaagatggacatctaccaaatattatgaacgcactaagcgttgataggggagatgaaggcattttggtgcttgaggttgctcagcatttaggtgataatatggtgagaacagtagcaatggattcaactgatgggttgactaggggggtagaggttattgatagcggctctccaatcactgtacctgtgggccaagaaacgctaggaaggctttttgatgttcttggtaatgtaattgatggaaaaggtgatttaaaaactgataaaaagaatccgattcatcgaccagctccaaaacatgaagaattaactacttcaactgaaattttagttacgggtattaaggtcgttgaccttatggagccatataccaaaggaggaaaaactggtttgtttggcggggctggagtaggtaagacagttttaattcaagagttgattagaaacattgcaacggagcatggtggttattctgtttttgctggagttggcgagcgaactagagaaggcaatgatctttataatgaaatgactgagtctggtgtgattgataaaacaacaatggtatttggtcaaatgaatgaacctcctggagctcgtttaagggttgctctaagtggactggctatggctgagttttttagagatgatgaaggtagggatgttttattatttgtagataatatttttagatttacacaagctggatctgaggtttctgctcttttaggaagaatgccttctgcggtaggttatcagccaaccttatcaacagaaatgggagaacttcaagagagaattacatcaacaaaaaaaggatccattacttcagtgcaggcggtatatgtacccgcagatgatttaactgacccagcgcctgcaacagcctttgctcatttagacgcaacatcggttcttgaaagaaaaattgctgaattaggaatctatcctgcagttgacccattagcatcaacttcaagaattttagatcctaggataattggtgatcgtcactacgatgtagcaagaaatgttgagggtgtcttgcaaaaatataaagatcttcaagacattattgcaatcttaggaatggatgaattatctgatgaagataaattaacagtatctcgagcgagaaaaattcagaaatttttctctcaaccattttttgttgcagagcaatttaccggaacgcctggtagatatgttgagcttgaagatactgtttcaggttttgaagcaattttgaatggcgaagctgatgacattcctgaaaatgcgttttcttatgttggatcaattgatgaagcttttgataaaagcaaagatgtaaaatcaggaagctccagtgatgaatcaaaaaaggaaaacaagcccatcgatgaagatggtgaacaaggtaaagaagaagccgaaactgaagagctatctaccgaaaagaattcagatcaagaataga

SEQ ID NO: 273772 - DNA, 1348 bp, Unknown
  Bacterial polypeptide expressing nucleotide sequence isolated from the Sargasso Sea
atggaaatcaaaactgataatattaccgcattactccaagagcagattaaaaagtttgatttatctgttgatgtatctgaggttggtgaagtaattgaaataggggatggtgttgcccgcgtttcgggtcttgaaaaagttatgagctcagagctcgtagagctcccaaatgacgtttacggcatggctcttaatttggaagatgataatgttggtgtggttttatttggtgaatctagccatgttaaagaaggtgatcttgcaaaacgaacagggaaagtcgttgaggtaccagtaggtagttcaatgcttggccgtgttgttaatccattaggtcaacccgttgatggtaaaggagcaattgaaactaaagacttccttcctattgaaagaaaagcattaggtgttatgtcgcgctcaccagttaatcagcccttacaaacaggtattaaagctgttgatagtatgataccaattggccgaggccagagagagttaattattggggatcgtcaaactggaaaaactgcggtagcagttgatgcgattataaatcaaaaatatacccatgagacagattctccagtttattgtatatatgttgcgattggtcaaaaagcatcaacggtcgcatctattgttgctgaactagaagcaaatggggcaatggattatactacagtagtctcttcaagcgcgtctgatgaagcgcctttacaatatatcgctccctattctggatgtgcgatgggggagcatttcagagacaacggaaaacacgctctaattatttacgatgatttatcaaagcaggcagtagcctaccgacagatgtcacttattcttagaaggccccctggaagagaggcatttccgggagatgttttttatctccatagccgattattggaaagggcatcaaagctttctgaagatcttggaggaggatctttaactgctctaccaattattgagacacaagaaggggatgtatctgcctatattccaacaaacgtgatttcgattactgatggacagatttatttagagaaaaatttatttaactccggtgttcgacctgcaattgatgttggcatatcagtatctcgcgtaggtggtaatgcgcaaattaaagcaatgaaaggtgttgctggtacgttgcgattggaccttgcacaataccgtgaacttgaagcttttgcaaagtttggctctgatctcgataaaaatacacaagcacaattgactagaggtgagcgcatggtagagattcttaagcaaggacaatatgttcctatgtcagttgaaaagcaagttgcaataatttttgcagtttcaaagggatatt

SEQ ID NO: 273773 - DNA, 868 bp, Unknown
  Bacterial polypeptide expressing nucleotide sequence isolated from the Sargasso Sea
atggcagcaggcaaggaaatacgcggcaagatcaaatcggtggaaaacaccaagaagatcaccaaagccatggaaatggtggccgcatccaaaatgcgcaaggcgcaggaccggatgcgggctgcccgcccatacagcgagaagatccgcaacattgcagccaacctcggcaaggccaacccggagtacgtgcacccgttcatgaaagtgaacgatgccaagaccgccggtgtgatcgtcatcaccacggacaagggcctgtgcggcggcatgaacaccaacgtgttgcgtgccgtgacgaccaagctgcgtgaactgcagggtgctggcgtctcgaccgaagccgtggcgattggcaacaagggcctgggtttcctgaaccgtgtgggcgccaaggtggtttcgcacgtgacgggcctgggcgacaccccccacctggacaagctgattggcccggtgaaggtgctgctcgatgcatacgcagaaggcaagatcaacgcggtgtacctgagctacaccaagttcatcaacaccatgaagcaggaatcggtggtggagcagctgctccccctgtcctccgagcagatgcaggctgagaagacggaacacggctgggactacatctatgagcccgatgcgcaaagcgtcatcgacgagctgctggtccgttatgtcgagtccctgatttaccaggcggttgcggaaaacatggcgtccgagcagtcggcacgcatggtggccatgaaggccgccaccgacaacgccggcagcgtcattggcgagttgaagctggtctacaacaagacgcgccaggcagcgatcacgaaagaactttcggaaatcgtggctggcgccgctgctgtgtaag

SEQ ID NO: 273774 - DNA, 772 bp, Unknown
  Bacterial polypeptide expressing nucleotide sequence isolated from the Sargasso Sea
aatggctcaagtgcaaggcaagattgttcaatgtatcggcgccgtggtggacgttgagttcccacgcgaccagatgcccaaggtttacgacgccctgaagctggaaggctctgccctgacgctggaagtgcagcagcagctgggtgacggcgtggtgcgtaccatcgccctgggttcctccgacggcctgcgccgcggcatcatggttaccaacaccggcaaccccatcaccgtgcccgtgggcaaggcgacgctgggccgcatcatggacgtgctgggcaaccccatcgacgaacgtggtcccgtgggtcaggagctgacggcttcgatccaccgcaaggcacctgcgtacgacgaactgtcgccctcgcaagaactgctggaaaccggcatcaaggtgattgacctggtgtgcccgttcgccaagggcggtaaggtgggtctgttcggtggcgccggtgtgggcaagaccgtgaacatgatggaactcatcaacaacatcgccaaggcccactcgggtctgtcggtgttcgctggtgtgggcgagcgtacccgcgaagggaacgacttctatcacgaaatggccgattccggcgtggtgaatctggagaacctgggcgagtccaaagtggccatggtgtacggccagatgaacgagcctccaggcaaccgtctgcgcgtggccctgactggtctgaccattgcggaatctttccgtgacgagggccgtgacgtgctgttcttcgtggacaacatctaccgctacacgctg

SEQ ID NO: 273775 - DNA, 952 bp, Unknown
  Bacterial polypeptide expressing nucleotide sequence isolated from the Sargasso Sea
catggcaaatcttaaagagattagagatcgaatcgtttccgttaaaaatacaagaaaaataacggaggccatgagacttgttgcagctgcaaaagttaggagagctcaagatcaagttcttaaaagtagaccttttgcagataaacttgcacgagtcctagaaaatattcaatctagagtacaatttgaggctgtcgactctcctctattatccaagagagaagtaaagagtatctccttggtttgtataactgcggatagaggtttatgcggtggttacaacacaaatattataaaaaaggtagaaataagatacgcagaattagtcaaacaaggttaccagccaaatttaattttggtagggaagaaagctattggatattttcaaaatagaaaggatagatatgtaattaaaagtactttcaaagaactagaacaggtacccacagtcaaggactccgaaggagttacaaatgagattttagctgaatttctttcagaaaattctgatagggtggaaattatttacacgaaattcattactctagttagctgcgcgcctgtcgttcaaacactattgccacttgaccctcaaggaattgctgaggaaaacgatgaaatttttaggttgactacaaaagatagtaagttacttgttgaaaaatcaaatattgaaaaaagtgattcagagaaattaccatcagatattgtttttgaacaaagtcctgatcaactattagattcattattaccattatatttacagaatcaggtactaagagctcttcaagagtcagcagcttcagaactcgcttgcaggatgaccgcgatgaataatgcgagtgataatgctaaagaattagcaagtactttgaatctaacctataacaaagctagacaagcagctattactcaagaaatattagaagttgtaggaggttcagcagtttag

SEQ ID NO: 273776 - DNA, 1537 bp, Unknown
  Bacterial polypeptide expressing nucleotide sequence isolated from the Sargasso Sea
aatggaaatcaatccttcagaagttacaaaaatattaaaagaacaaattaaaaattttggtgaaaagacagaggttactgaagtcggccaggtattatccgttggagatggtattgctagaatttatggcttagataatgttcaggctggtgagatggttgagtttgctgatggttcaaaaggtatggctcttaacttggaaagtgaaaatgttggtgttgtaatttttggtgacgacagaaatattaaagaaggtgatgttgttaaaagaacaggaaatattgttgatacaccagtaggaaaagaacttctaggtagagtggttgatggtcttggaaatccaattgatggaaaaggagcccttgataaaagtgttaaaaaaacaagggtagaagttaaagctcctggtattatcccgagacaatcagttagtgaaccaatgcaaactggcttaaaatcaattgatagtttagtgccaattggaagaggtcaaagagaattaattattggagatagacagacaggtaaaactgctgttgctgtcgatgcaattataaatcagaaaaaaattaatgagtcaggtgatgaaaaacaaaaattatattgtatctatgttgcagtaggtcaaaaaagatcaacagtgagacaaattcaaaaaactttagaagaagctggagcaatggaatacacaactattgttgctgctacagcatcagactcagcgccactacaatttttagctccttatacaggttgtgcaatgggtgagtattttagggataatggaatgcacgctttaattatttacgatgatctatcgaaacaagctgttgcatatagacaaatgtctcttcttttaagaagacctccaggtagggaagcttacccaggagatgtattttatctgcacagtagattattagaaagagctgcaaaacttagtgatgaacatggtggaggatcattaactgcacttccaataattgaaacacaaggaggtgatgtttctgcatttattccaacaaatgtgatttcaattacagatggccaaatatttttagaaacagagctttttaaccaaggtattagaccagcaattaacgttggattgtctgtatcgagggttggatcttcagctcaaacaaaagccatgaaaaaagtatcaggctccatgaaacttgagttagctcagtatagagaaatggctgcttttgctcaatttggatcagatttagatgcttctacgcaacagctacttaatagaggttcaaaattgacagaacttttaaaacaaaaacaatattcaccactgacagtcgcagagcaagtagtatctgttttttgtggagttaaaggttatttggatgacatagatttaaaagatattgcagagttcgaaacaaaaataattgaaaaatgcaaatctgataagcctgaaataattgactctatccaaagttctggaaaacttgaagaagacaaagaaaaactattaatagaagtaattactcaacttaaacaaaactttaaatcataa

SEQ ID NO: 273777 - DNA, 460 bp, Unknown
  Bacterial polypeptide expressing nucleotide sequence isolated from the Sargasso Sea
aatggcaagtctagacgatttaaaaaaaagaatagcgagtgttaagtctacacagaaaattacaaaggctatgaagatggttgctgcagcgaaactaagaaaagctcaagaaagtgcagaaaaaggaaggccttattcagaaaaaatgaataatgttattttaaatttgtctagtggaatatcagataaagagaatgctccaaaacttttatcagggacaggaaatgacaaggttcatttatgtgttgtaatgacatcagatagaggattatgtggaggtttcaattctaatataattaaaaaagctaaaagttacttcttgaaaattttaagcgagggaaaagaacttaaaattataactgtaggctcaaaaggaaatgatcagttaaagagaatgtatggtgataaaattatagagaatatttctttcaaggagtcaaaaaatgccaattattttgat

SEQ ID NO: 273778 - DNA, 861 bp, Unknown
  Bacterial polypeptide expressing nucleotide sequence isolated from the Sargasso Sea
ctgcagatccagcacctatgcaatatctatcagcctatgctggatgcacaatgggagaatattttagagataaaggggaagatgctctaatagtatacgatgacctatcaaaacaagctgttgcatatagacaggtatcattgcttcttaaaaggcctccagggagagaggcatatccaggtgacgttttctatcttcactcaaggttgcttgagagggctgcgagagtaaatgccgactatgttgagcaaattactggaggtaaagttaaaggcaaaacaggttcattaaccgcattgccgattattgaaacattggctggagacgtttcagcctttgttccaaccaatgtaatttctattacagacggacaaatatatttagaaacagaattatttaattcaggtgtaagacccgcaattaacccaggtttatctgtatcaagggttggaggatcagcgcaaacgaaaattatgaaaaaattagctggtggtgtgagaactgcgttagctcaatatcgtgaattagctgctttctctcagtttgcttctgatttagacgatgctaccaaacagcaacttgcaaatggtaaagcttttacagaacttctaaaacaaaaacaatatgcgccaatgagtgttgctcaacaagcattaagtttatttgctgctgacagaggatttatggcggatgttgaggttgaaaaaattcttgattttgaagaagcccttcatggatatttgacctctgaaaaaggtgatctcgaagaacaaatcaactcaacaggtgactggaacgatgatattgaagcacaatttactgctttggttgaagactttaagaaaacacaaacctattaaa

SEQ ID NO: 273779 - DNA, 694 bp, Unknown
  Bacterial polypeptide expressing nucleotide sequence isolated from the Sargasso Sea
aatggtagcaactccatcaacttcttcacaaactaaaggcgtagtacgtcaggtaattggtccagttctagatgtggaatttccagccggaaaattgcccaaaatattaaatgctttaagaattgaagctaaaaatccagctgggcaagacatagcgctcactgcagaagtccaacagctcctaggtgaccatagagttagagcagtggcaatgagcggcacagacggccttgtaagaggtatggaggcaatcgacacaggagcgccaatatctgtacccgtaggagaagcaactttaggaagaatatttaatgttttaggagaaccagtagatgaacaaggtccagtaaatactaaagatactgctccaattcatagatctgccccaaagttaactgacctagaaactaagccaaaagtttttgaaactggtattaaagttatcgaccttttggctccttacagacaaggaggtaaagttggattattcggaggtgctggtgttgggaagacagttcttattcaagaattaattaataacatcgcaaaggagcatggtggagtttccgtttttggcggtgtaggagaaagaactagagaagggaacgacttatatgaagaatttaaagaatctggagttatcaatgcggatgatctaactcaatcaaaagttgccttgtgtttggacagatga

SEQ ID NO: 273780 - DNA, 1399 bp, Unknown
  Bacterial polypeptide expressing nucleotide sequence isolated from the Sargasso Sea
tatggcaaatattggaaaaatatctcaaataatgggcgcagttgttgacgtcacttttgaagatggtaatttacctgaaataatgaatgcattacatgttgaaagggaggatgaaggtgatttaatcttagaagtagcccagcatctaggagaatcaactgttcgtacagttgcgatggattctacggacgggctagtcagaggagtcgatgtaaaagattctggcaaaccaatttcagttccagtcggccctgaaacattgggtaggttgtttgatgtgacgggtaatgttatagatggaaaaggtaaggtgtctgcaaagaaagaatatccaattcatcgttcagctccaaagcatgaagatttatctacctctacagaaatgctagttactggtattaaagttgtggatatgatggaaccgtatacaagaggaggtaaaacaggactattcggtggcgcaggtgttggaaaaactgttttaattcaagagttgattagaaatatagctacggagcatggtggttattctgtatttgctggagtaggagaaaggaccagagaaggaaatgatttatataacgaaatgacagaatcaggagtcatagaaaaaacgactatggtttttggtcaaatgaatgaaccaccaggcgcaaggttaagagtagctctaagtggtcttacaatggctgaatattttagagacgatgaaggaagagatgttttattatttatagataatatttttcgattcactcaagcaggatctgaagtttctgcgctactaggtagaatgccttcagcagttggttatcagcctacactcggtactgagatgggtgaccttcaggaaagaattacatctacaaaaaaaggatcaataacttctgtacaagctgtttatgttccagcagatgatttaactgatccagcgcctgctacagcttttgcacatctagatgcaacctctgttctggaacgaaaaatagctgagcttggtatatatcctgcggttgaccccttagcatcaacatctagaattttagatccgagagttataggagataatcattataatactgcacgcgaagttcaaaatattcttcaaaaatataaggaccttcaggatatcattgcaattttaggtatggatgaactttcagatgatgataaactttcagtatcaagagcacgaaaaattcaaagatttatgtctcaaccattttttgttgcagaacagtttactaatgttgaaggtcggtatgttgaactagatgatactattgctggatttaaggctattttgaatggtgatgttgatgaatattctgaaaatgctttttcctacgtaggtactattgacgaagcaattgaaaagggtaaaaaactggcagcttaa

SEQ ID NO: 273781 - DNA, 1030 bp, Unknown
  Bacterial polypeptide expressing nucleotide sequence isolated from the Sargasso Sea
atgtcaattaatccatctgaaataacgaaaatcttaaaagaacaaattaaaaactttggtgataaagcggaagttacggaagtaggaaaagttttaactgttggagatggtatcgctagaatatatggcttagacaatgtacaggctggagaaatggtggaatttgatgacggttctaaaggaatggcattgaacttggagagtgataacgttggagtagttatatttggtgatgacagaaaaataaaagaaggcgacacagttaaaagaacaggctctattgttgatgttcctgttggaaaagatttattaggaagagttgtcgatggactaggaaatccgattgatggaaaaggtaacttaaatgataaagctcaaagaaaaagagtagaagttaaagccccaggtattattcctagacagtctgtaagcgaacctatgcaaacaggtttaaaggcaattgatagtttaattcctataggcagagggcaaagagaattaataattggagaccgtcaaacaggaaagacagctgtggctatagatactataataaatcaaaaagaaattaacgagtctaatgatgagaaaaaaaagttgtattgtgtttatgtagctattggccaaaaaagatcaacagtagcgcaaattgtaaaaactttagaggatgcaggagctatgaaatatacgactatagtatctgccacagcatcagattctgcaccattacaatttttggcaccttatactggctgtacaattggagagtactttagagacaatggaatgcatgccttaataatttacgatgatttatctaaacaagctgtggcatatagacagatgtcacttttattaagaagacctccaggtagagaagcttatcctggtgatgtgttttatttacatagtagattattagaaagagctgcaaaacttagtgatgctaatggtggtggttcacttactgctttaccaattattgaaactcagcaggtgacgtttctgcttatattccaacaaatgtaat

SEQ ID NO: 273782 - DNA, 1388 bp, Unknown
  Bacterial polypeptide expressing nucleotide sequence isolated from the Sargasso Sea
catgaaattcaacaccgacgagatcgcctcggttctgcgtgaggaaattgaccgctatcagactggtattgatgtccgagaagtcgggcaagtactcgaagttggtgacggcattgctcgcgtctgggggctatctggcgtaatggccggcgaaatggtcgagtttccaggtggcgttactgggttggcatttaacctcgaagaaaattctgtcggtgtcatcattcttggtgattacctgaaggtaaacgagggtgatgaagtacgaagcactggaaagcttctcagtgtacctgtcggtgatgcggtcattggtcgggttctcgacccacttggaaatccactcgacggaaaaggaccgatcaccactgacaaaagaaggcctgttgaaactcttgcaccgggtgtcgctgatcgtcaacccgttcgcgaacctcttcaaacgggcattaaagcaatcgatgcgatgactcctatcggccgcggtcaacgagaattgattatcggtgaccgtaaaactggaaaaacagcgatcggaattgatgcaatcatcaatcaaaaacacagtggcgtgaaatgcttttatgttgctgtcgggcaaaaagactcatccgtcgccgtcgccattgatgtgttacgtaagcatggcgcaatggattacacgacggtaattgtcgcaggaggatctactgctgcaccgcttcagtacatcgcaccctattctggaaccgcaatggcagaagagttcatgtacaacggcgaacatgccttaatcgtttatgatgatctctcgaagcaagcaaccgcctaccgacaactatcactcctcatgcgtcgcccaccgggacgtgaggcgtatcctggtgacgttttctatgcccatagccgccttctcgaaagatctgcaaaactttctgatgaacacggcgggggctcgctcacatcactaccaatcatcgaaacacttgaaggtgaagtgtcggcctacattccgactaacgtgatctcgattactgacggccaaatctaccttcagcccgatttgttctttgccggccagcgaccagcaatgaacgttggtatctctgtttctcgtgttggtggtgctgcccagactaaagcgatgaagaaggtttccggtgggcttcggctcgaccttgcttcattccgtgaacttgaagcattcgcacagcttggaacagatcttgacgcagcaacacagtccagactcgaccgtggctattgcatggttgaactgctcaaacaaggccagtaccagcctcttgatatcgtcgatcagattctcagcatctacgcaggaacccgtggacacctcgacaacgtcaagcgagaagaagtctctgcctgggaagcaggcttcctaacat

SEQ ID NO: 273783 - DNA, 710 bp, Unknown
  Bacterial polypeptide expressing nucleotide sequence isolated from the Sargasso Sea
agcatatccaggagatgttttttatctccactctagattgttagaaagagcagcaaaaattataaataatgataaattagcttccgaaatgaatgatctacctgattcattaaaaaaagaagttaaaggaggaggttcattaacagctttacctattattgagactcaagaaggtgatgtttctgcttatattccaacaaatgttatttcaattacagatggacagatatttttagaatccaatttatttaattccggtattagaccagcaataaatgtaggtatttctgtatctcgagttggtggttctgcacaaattaaatcaatgaaaaaaatatgtggtacccttaagttagatcaagctgcttttagagaattagaagctttttctaaatttggttctgatttagatgcagccactcaactggttatagatagaggaagaactaatcaagaaatactcaagcaaaatcagtattctccacttagagttgaagaacaaatagctgttatttattgttcttctaatgggttttttgatggtgttgatttaaaaaacatatctaagcttgagactgaatatttagatgttgttaattctaagcacaaaaacctattagatgagcttgcagatgggaaggtaaatgaaaaaagtttagaaaaacttggagaagttgcaaataaggtagcttcaaattataaaagctaat

SEQ ID NO: 273784 - DNA, 880 bp, Unknown
  Bacterial polypeptide expressing nucleotide sequence isolated from the Sargasso Sea
aatgcctagtttagatgatcttaaaaaaagaataaaaagcgtaaaatctacacaaaaaattacaaaagccatgaaaatggttgctgcagctaaattaagaaaagctcaagaaagcgcagagagaggacgaccttatagcaaaaaaatgcaaagtattattcttaatttaaccaaatctatcaatgatccagaaaatgcacctaggcttttagtaggcactggaaaagataaaacttatttatgtgtggtattaacagcagatagaggactctgtggcggttttaattctaatatttgcaaactggcaaaaacaaaattcaaacaaattttaaatgaaggaaaagagcttaaaataatttctgtaggatcaaaaggtttagaccaaattaaaagagaatacggaaaatatattattaaaaaatttagctttaaagaaaaaaaaaagatttctttcaatgaagctgaaataattggtagtgaaatcataaatttatttaaaaaaaatgaattcgacaaatgtattttattttttaataattttaaaaatgtgataactcaaattcctcaagcacaacaaattatacccgcagaaaatcaattatctgaaaaaaaagatgagaatacaatgtcttatgaatttgaaccagaggaggacgaaattttagaagatctattaccaaaaaatatatctacccaggtgtttaaagcgtttcttgaaaatgctgctagtgagcaaggttcacgaatgactgcaatggacaatgcaacaagaaatgccggtgaactagttgataaacttacaattaactacaacagaagtagacaggcttctattaccaaagaattaatagagatcatatctggagcagaaagtttataa

SEQ ID NO: 273785 - DNA, 649 bp, Unknown
  Bacterial polypeptide expressing nucleotide sequence isolated from the Sargasso Sea
agatgtattttatttgcacagcagattattagaaagagcagctaaactaaacgataaaagcggaggaggatctttaactgctttaccaattattgagactcaagctggagatgtttctgcttacataccaaccaacgttatttcaattactgatggtcaaatatttttggaaactgagttatttaaccaaggaattcgacctgcggtgaacgtaggactttcggtttctcgtgtaggctcagccgctcaaaccaaggcgatgaaaaaagttgcaggttcaattaaattagagctagctcaatacagagaaatggcagcatttgctcagtttggttcagatctagatgcttctacccaaaaactattgaatcgaggagcaaaactaacagagcttttaaagcaagatcaatactccccaatgacagtagcagaacaagtaatttcagtattcacaggggtaaaaggttatctagatgatgtcgagttgggtaaaataaaaaaatttgaaaaaaatattatagaaaaaataaaatcagaaaaaccagaaataatagaatcaattttgtcatctggaaaattagatgaaaatatagaaaaacttctagcgcaaactattgaagaatacaaaaaaggtaataataatgcctag

SEQ ID NO: 273786 - DNA, 1399 bp, Unknown
  Bacterial polypeptide expressing nucleotide sequence isolated from the Sargasso Sea
tatgagcaacggaacagttacacaaattattggagcggttatcgatgtcgaattcgacaaagataatatccctaaagtgtatgaagcacttatggttgatgagagcggaacaactcttgaggttcagcagcaattaggcgatggtgtcgtaagaacaattgccatgggagcaacagaaggcttaaaaagaggtctttcagcatcgagaaccaatgctcccatttcagttccagttgggccagagacattgggaagaattgtagatgttcttggtaatcctattgatgaaaagggaccaatcggcgaaaaatcaaaaatgccaattcacagaaagccaccaagctatacagatcaatcggcgtcaaatgaagttctagaaactgggatcaaagttattgaccttatgtgcccttttgcgaaaggtggaaaaataggactatttggtggcgcgggtgttggaaagactgtaaacatgatggagcttattaataatattgcacttcagcattctggtctttctgtatttgctggagtaggcgaaagaactagggaaggcaatgatttctattatgaaatgcaagaatctggagttgttaacatcgacaaccttggcgaatcaaaagttgcaatggtttatgggcagatgaacgaacctccaggaaacagacttagagttgctctaactggactaactatggcagaaagttttagagatgaaggaaaagatgtcttactttttattgataatatttatcgttacactttggcgggtgttgaagtgtctgctttattgggaagaatgccatcagctgtaggttatcagcctactttggctgaagaaatgggcgcactacaagaaaggattacatctactaagacaggatctattacatctatacaagccgtatacgttccagctgacgacttaaccgatccttcaccagcaacaacttttgctcacctagatgcaacagttgttctttcaagacagatttcagaactaggaatttatcctgctgttgatccacttgattcaacaagtagacagcttgacccatttgtagttggagatgatcattacgatgtcgctcaaggagttcaaaaaatattacagagatataatgaattgaaagacatcattgctattcttggaatggatgagctttctgaagaagataaagggcttgtagcaagagcaagaaaagctcaaagatttttatcacaaccattttttgttgcagaaatatttacaggaacacctggcaaatatgtttctctagaagataccatcaaagcttttaaaggaattttaaatggtgactatgatcatcttcctgaacaggctttttacatggttggaactattgaagaggctgtagaaaaagctaaaacattataa

SEQ ID NO: 273787 - DNA, 979 bp, Unknown
  Bacterial polypeptide expressing nucleotide sequence isolated from the Sargasso Sea
tatgagcggactaaacccatctgaaatttcaagtgttcttaaggacaaaatttcagggcttgatctaaaggctgaaaccaaaaacgaaggaaccattgtcaatgtttctgatggaattatcagaatacacggaatgggcgatgttatgtatggtgagctcgtagagtttgaaaatggtgtttttggacttgcacttaacttagagcaagactctgtaggtgttgttgtccttggtgattaccttgggctaagtgaagggcaaaaagttacatgtacaggtaagatcttagaggttcctgtaggtgaggaaatgctcgggcgagttgtagacgctctaggaaatccaatcgatggaaagggggaacttaaaacaaaacaaactgcccctattgaagtagttgcgccaggggttattgctagacaatcagttgaccaaccagtgcaaattggacttaaatcaatcgatgcaatggttccaataggaagaggccaaagagagctcattattggcgatagacaaactggaaaaacagctgtagcaattgacgcaataattaatcaaaaaggtacaggaattaaatgtatttatgtagctattggtcaaaaacaatcaacaatagctaatgtcgtagcaaaacttgaagagtatggagcaatggaacacacaattgttgtttcagcggcagccgccgacccagctgcgatgcaatacctctcagcatattcaggttgtgcaatgggagaatattttagagatacagggcaggatgcattaattgtttacgatgatttgtcaaagcaagcagttgcttacagagagatatcactattgcttagaaggcctccaggtagagaagctttccctggagatgttttttatcttcactcaagacttttagagagagcagctagagtgaatgcggaatacgtagaaaaaattacggaaggaaaggtaaaaggtaaaacaggatctctaaca

SEQ ID NO: 273788 - DNA, 685 bp, Unknown
  Bacterial polypeptide expressing nucleotide sequence isolated from the Sargasso Sea
atgagcacaggcaagatcgtacaggtaatggggccggttgttgatgtggaattcgaaacagagaaccttcctcaaattttctcagcacttgaaatcaaactggacggggactctaaactaatttgcgaagtacagcaacatctcggcgaaagtacagtacgcacagtatcaatgggatcaacagatggtctttaccgagggatggatgtaaaggatttaggtgaaactatctctactcctgtcggaaagggtgtacttggcagaattataaatgtaacaggagatccagttgatgaagccggaccgataaaaacaaacgaacgctggtcaatccaccgtgaagccccgacatttgctgaccaagaaacagatgcacaaatgttggtaactggagtaaaggttatggacctcctttgtcccttccttaaaggaggcaaaattggattgtttggtggagcaggagttggaaaaacagttgtgatcatggaactgatccgaaacattgctgcagaacatggtggcttctcagtttttgctggcgtaggtgagcgtacacgtgaaggaaatgatctttggaatgagatgaaagaatcaggagtgctggacaaaacaagccttgtatatggtcaaatgaatgagcctccaggtgcacgtgcccgggtagcactgacgggcttaaccgttg

SEQ ID NO: 273789 - DNA, 788 bp, Unknown
  Bacterial polypeptide expressing nucleotide sequence isolated from the Sargasso Sea
tttctgctgcaaactaagacgtgcggaagaccacataaaggaagcgacaccatatgctcaaaagctgaaaagcattgtctcttcacttagttcacgttttgaagacgaagagcaggatacgagcttaggcagtctcttccggaattccagcggaaaaagaacgggtgttatcttagttactagtgaccgtggactttgcggagggttcaattcaaatctttctaaggctttacttcaacaacttattgatgaaggagtggagtgtgctgaatttgcaatctttggaagaaaagggaatgattttttcaaaagaactccacataaaattcttgtcaattatgcaggaagttctccagatcaacatcttaacctggtcaaggaagttgtgagtgactttactcggcgatttgagaatggtgaactagatcaagtgcttctcgcatacaatcattttgtaagcgtgatttctcagattcctatgattgagcctcttctaccgatcaaacctatagaaaaagaaatagttgataaacgcgaaatattgtttgaaccctcacccgaagaaatactacaaactcttttgaaaaaatatgttcaaaaccaagtttacgtttcctggcttgatacaatagcaggtgagcatgcagctcgtatgacttcaatggacgctgcaacaaaaaatgctggagaaattattgataaactccagttgcattataatagaaccagacaggcagcaattacaggcgaactgattgaaatcataagcggtgcagaaagtttataat

SEQ ID NO: 273790 - DNA, 1531 bp, Unknown
  Bacterial polypeptide expressing nucleotide sequence isolated from the Sargasso Sea
catggaaattcaaccagcagaaatatccgcaattttaaagaaaaaaattaaggattttggaaaagatgctgaagtgtctgaaataggtcaggtgctatcagttggtgatggtatcgctagagtttatggtttggataatattgaagctggtgaaatggttgaatttcctggcgaaattaaaggaatggcccttaatcttgaagaggataatgttggtgttgttatttttggtgatgatactgacattaaggaaggtgatactgtaaaaagaacgggtgcaattgttgaagtgccaattggaaaagagcttcttggaagagttgtagatgcattaggtaacccaattgatggaaaaggcccaattaattcatctgaaagtaaaagagttgatattaaagcccctggaatcattcctagaaaatcagttaatgagccaatgcaaactggattaaaagcaattgactcattgataccaattggtagaggacaaagagaacttatcattggcgatagacagactggtaaaacagctatcgctgtagatgccattcttaatcagaaagaggtcaataaatcagatgatgagtcgcaaaaattatattgtatatatgttgcgattggtcaaaaaagatcttcagttgcccagttagttaaaaccttagaagagaatggagcaatggaatattctattgtagtagcggctacagcttcagaaccagctcccttacaatatttggctccttttactggttgcacgatgggtgaatactttagagacaattccatgcatgctctagttgtttatgatgatttatcaaaacaggctgtcgcttatagacaaatgtctctcttattaagaagacctcctgggcgtgaagcttatccaggtgatgttttttatcttcactcaagattattggaaagagcagctaaattaaatgatgataatggaggtggttctttaacggccttgcctataattgaaacgcaggcaaatgatctatctgcatatattccaacaaatgtaatttctattactgacggccaaatctttctagaaactgatctctttttccaaggaattagaccagcagttaatgtcggtctttctgtttcgcgtgttggttcttctgctcagattaaggcaatgaaacaagttgcaggatcaattaagggtgaattagcccaatacagggaaatggctgcctttgcacagtttggatctgacttagatgcctcaactcaaaaacttttagctagaggggaaagattaactgagcttcttaagcaaaaacaattctcaccaatatctacaaacgaacaggttgttcttttatttgctggtgttaatggatatatggatgatattgccgtaaaccaaattggtgattttgaagaaggtcttttaagccatataagagaaaactatgcacaaattttagaaacaattaatgcgactaagagtcttgatgatgaaactgaagctactcttaaaaatgcagttgaagaatttgcggcaagttttaaataa

SEQ ID NO: 273791 - DNA, 640 bp, Unknown
  Bacterial polypeptide expressing nucleotide sequence isolated from the Sargasso Sea
aatggacagtaaatcaaacggaaaaataacacaagtaacaggagctgttgttgatgtacaatttgacggcgacttgccagaaatattaaatgcattagagactgacaataatggccaaaaacttatccttgaggttgcatctcatttaggtgaaaatattgtaagaaccattgccatggactcaacagaaggtctggtaagagggcaagaagtaaatgatactggaaatcctataaaggttccggttggcgaagctactttgggcagaataatgaatgtagtcggcgagccaattgatgatggaggatcggttgactcaaaagagtccagaccgatacatacatcagctccaccctatgttgaacaatcaacagagacagaaatactcgtgacaggtatcaaggttgtggatcttctcgcgccctattcaaaaggcggaaagattggcctatttggtggcgcaggtgtgggtaaaaccgtgcttattcaggaacttataaataatgttgcgcaggcacatggtggatattcagtctttgccggtgttggtgagagaacaagagagggaaatgatttataccatgaaatgattgaggctggcgttaacaaagagggtggaggtaatggctcaaaaatgtgc

SEQ ID NO: 273792 - DNA, 1543 bp, Unknown
  Bacterial polypeptide expressing nucleotide sequence isolated from the Sargasso Sea
atggacataaatccatcggaaattactaaaattttaaaagagcaaataaagaatttaggagataaagcagaagtttcagaaattggaaaagttctttccgtaggagatggaattgctagggtttacggcttagacaatgttcaagctggtgaaatggtcgtgtttcaggacaactcaaaaggtatggctcttaatctagaaaacgacaatgttggtattgttatttttggagatgataaatcaattaaagaaggtgatacagttaaaagaactggagcaatagttgatgtacctgttggtaaagagttgcttggcagagtagttgatgcattgggaaatccaattgatggtaaagaaaatttagataaaaatattaaaagaaaaagggttgaagttaaggctccaggaattataccaagaaagtctgttggtgaacctatgcaaacaggtttaaaagcaatcgatagtttaattccagtaggaagaggacaaagagaattaataattggagatagacaaaccggaaaaactgcagttgcagtagatacgatcattaatcaaaaaaaaataaatgagtcagatgatgaaaaaaagaaactttattgcatttatgttgcaattggtcaaaaaagatcaacagttgctcaaatagtcaaaactttacaagatgctggagcaatggattatacaattgttgtttcggcaacagcgtctgatcctgccccattgcaatttttagcaccatacacaggatgcacatttggtgaatttttccgagataacggaatgcatgctttaataatttatgatgatttatccaaacaagctgttgcttacagacaaatgtcacttttattaagacgtccgccaggtagagaggcataccctggtgacgtattttatttgcatagtagattacttgaacgtgcagcaaagctaaatgatgataatggcggtggttcactgactgctttaccaattattgaaactcaggcaggtgatgtatctgcttatattcctacaaatgttatttcaattactgatggccagatttttttagaaactgaacttttcaatcaaggtatacgacctgcagtaaatgtaggtttgtctgtttctagagttggttctgcagctcaaaccaaagcaatgaaaaaagttgcaggttcaataaaattggagttagcacaatatagagaaatggcagctttcgctcagtttgggtctgacttagatgcatcaacccaaaaattgttaaacagaggttcaaagcttactgagttattaaagcaggatcaatacagcccaatgacagtagcagaacaggttgtaacagtttattgcggtgtaaaaggttatttagatactattgaaaataatcaaatccgatcatttgaaaaaggtttattagatttaattaagaatgaaaaacctgagatattagaatcaattcaaaatactggaaagatcgaggagaacactgaaaagcttttaacagaagttataacaaactataaaaaaactaattttgaaaaaaaataat

SEQ ID NO: 273793 - DNA, 514 bp, Unknown
  Bacterial polypeptide expressing nucleotide sequence isolated from the Sargasso Sea
aatgccaagcctagatgatttaagaaaaagaatttcaagtgtaaagtccactcaaaagataacaaaggctatgaaaatggttgctgcagcaaaacttcgtaaagcacaagaaatggctgaaaaaggaagaccctacagtgataaaatggacttaataatccagaatttaagtaaagcaattaatgatccttctaatgcgccaaaacttctggttggtaccggagaggataaaacgcatctttgtgttgtaatgacagctgatagaggactttgtggtggatttaatacaaatatatgtaaattagctaaaaaatattttgatgaagctatcaaatcctctaaaaatttgaaaataattaccgttggcactaaaggccttgaccaattaaaaagagattatagtcaatatattattaaaagaattaacttaaaagataaaaaaaaattatcttttttagatgcagaagaaatcggtaaacaaatagttgaattattaaaaataagaatcgataag

SEQ ID NO: 273794 - DNA, 1123 bp, Unknown
  Bacterial polypeptide expressing nucleotide sequence isolated from the Sargasso Sea
gaagttctttatactggaattaaagtaatagattttattgaaccatataacaaaggtggtaaaattggattatttgggggtgctggagttggaaaaactgttttaattcaagaattaataaataatatagcaaaagcttattctggtctttcggtttttgctggagttggagaaagaactagagaaggtaatgatttattaagggaaatgattgaagctgggattgtagattatggtgaagaattcaaaaaatcaatggaagaaggaggatgggacttatcaaaagtagataagaagaaattaaaaaaatctaaagctgcatttgtatttggtcaaatgaatgaaccccctggagcaagagcaagagtagctttatctggattaacattagctgaatattatagagatggtgatggaaaagggaaaggaagagatattcttttttttattgataatatttttagatttactcaagcaggatcagaagtttctgcactacttggaagaatgccatccgctgttggatatcaacctacactagcaaccgaaatgggagctatgcaagagagaattacatctacaaaaaaaggttctattacctctgttcaagccgtttatgttcctgcagatgatttaacagatcccgcaccggctactacattttctcatcttgatgctcaaagtgtattatctagaaagttagcagcaattggaatatacccttcgatagatccacttgattctacatctagaattcttacagaagaagttgttggtgaagaacattatacatgtgctcaaagagttaaagaattacttcaaagatataaggaattacaagacataatcgctattttaggaatggatgaattatcagatgaagataaagaggttgttcatagagcaagaagagttcaaagatttttatctcagccatttcatgttgctgaaccttttacaggaattaaaggagaattagttgatattaaagatacaattaaaggttttaatatgatcatgaacggagatctagatcatcttcctgaagctgcatttaacttaaaaggcaccatagaacaagcaatagaagcaggagaaaaaatgattgcaaaagtaaaataat

SEQ ID NO: 273795 - DNA, 1417 bp, Unknown
  Bacterial polypeptide expressing nucleotide sequence isolated from the Sargasso Sea
atgagaaaaggaaaaattacacaaattatcggagcggtagtcgatgtcaaatttgatggggaattgccggaaattttaactgcattagaatgtgataatgctggaaatagattagttctcgaagttgcgcagcatctaggagaatctagtgtaaggacaatagctatggatgcaactgagggtcttaaaagaggtgatgaagtaacagatactggatccccaatacaggttccagtgggaccagaaaccttggggagaattattaatgttattggtgaacctattgatgaaaaaggtgatgtaaaaacaaaagaaaactggcccattcatagatcagccccagaatttaatgatcaatctactgaaacagaaatattagtaacaggaataaaagtaatagatttgcttgcaccttatgcaaaaggtggaaaaattggattatttggaggtgcaggtgtaggaaaaacagttttaattatggaattaattaataacgtggcaaaagctcatggtgggttctcagtatttgcaggtgttggagaacgaacaagagaaggtaacgatttatatcacgaaatgatcgactcaggtgtaattaaaccagagggagatggatcaaaagctgcattagtatatggtcagatgaacgaacctccaggggcaagagcacgagtagcattaacagggttaacagttgccgagtacttcagagatcaagaaggtcaagatgttctttttttcgtagataatatttttagatttactcaagcaggatcagaagtttcagctctcttgggtagaattccatcagcggttggatatcaaccaactttagcaacagatatgggtaacttacaagaaagaattacaacaacaaataaaggatcgattacatcagttcaagcgatttatgtgcctgccgatgatttaactgatcctgctccagcaacctcttttgcgcatttagatgcaactacagttttatcaagacaaatcgctgaaattggaatttacccagctgtagacccattggactccacatctagaattcttgacccaagaattgttggtgatgaacattatagagtggcgagagaagttcaaagaatattacaaacctacaaatcattgcaagacattattgctattttaggcatggatgaattatctgaggaagataaacttgttgtggcaagagcaagaaaaatacagagatttttatcccaaccattttttgttgcggaagtttttactggctcgccaggtaaacttgtagatcttgatgcaacaatcaaaggttttgatgcaatttgcaaaggtgagtatgatcatttaccagaggcagcattttacatggttggaacaattgaagaagcaattgagaaggccaaaaaaatggaaaaagatgcagcttaat

SEQ ID NO: 273796 - DNA, 928 bp, Unknown
  Bacterial polypeptide expressing nucleotide sequence isolated from the Sargasso Sea
tgtgtttacgtagcagttggacaaaaaagatctacagtaagacaaattgaaaaaactttagaagaagctggagcaatggagtacactactattgttgcagcaacagcatcagatgctgcccctcttcaatttttagctccatatacaggttgtgcgatgggtgaattttttagagataacggaatgcatgcattaattatatatgatgatttgtctaaacaggctgtagcttacagacaaatgtcattattgcttagaaggccaccaggtagagaagcatatccaggcgatgtattttacttgcacagcagacttttagaaagagctgcaaaattgagtgatgagcatggtggaggttcattaacggcactgccgattattgaaacgcaaggtggtgatgtgtctgcatttatacctacaaatgtaatatctattactgatggccaaatttttctcgaaacagaattatttaatcaaggtataagaccagccattaacgttggtttatcagtttctagagttggttcttctgcacaaacgaaagcaatgaagaaagtttctggctcaatgaaacttgagcttgcccaatatagagaaatggccgcatttgctcagtttggttctgatttagatgcatcaacacaaaaattacttaatagaggatctaagcttactgaattattgaaacaaaaacagtattcgcctatgacagttgcacaacaagtcatttcagtgttttgtggagttaaagggtatttagatgatattgagctgaaggatatagctgaatttgagaacaaaattcttgaaaaatgtaaatctgaaaagccagaaattatagattcacttggttcaggaaaattagatgaagatactgagaaattattaattgaattgattactaatttaaaaaaaaaccttaattaaa

SEQ ID NO: 273797 - DNA, 877 bp, Unknown
  Bacterial polypeptide expressing nucleotide sequence isolated from the Sargasso Sea
atggcaagtctagatgatttaaaaaaaaggatagtgagtgttaaatcgacacaaaagattaccaaagcaatgaaaatggttgcggctgcgaaacttaagagagcacaagataatgcagagaaaggaagaccttattcagaaaaaatgaataacataatactaaatttatcaaatggtatctcagataaagaaaatgctcctaaattattatctggcactggtgatgaaaaaacacatttatgtgtaattttaacttctgatagagggctatgtggaggctttaatacaaatattgtaaaaaaagcaaagtcatatttcgataagattgaaaaagatggaaaaattttaaaaatagtcactgttggctctaaagggaatgatcaacttaaaagaatttatggggaaaaaataattgaaaaaatatcatttaaagactcaaaaaatattaatttttttgatgcagataaagttggcaaaatgattatagaaatgtttgaaaaaaaagaatttgatgtatgtactattttttataataaatttaaaaatgtaattactcaaataccacaagcacaacaaattattcctttaaaaacatcggagtccgagggcaattcatctgaagataattatgaatttgaacctgaggaagatgagattttaagtaatttattacctaaaaatatatcaactcagatttttaaagcgatgttagaaaattcagcaagtgaacaaggatcaaggatgagtgcaatggataatgcaacaagaaatgctggagaaatggttgataaacttactattgagtacaatagaagtcgtcaagcagcaattactaaagaactaatagaaataatatcaggagcagaaagtttataat

SEQ ID NO: 273798 - DNA, 667 bp, Unknown
  Bacterial polypeptide expressing nucleotide sequence isolated from the Sargasso Sea
tctgcactcgcgattgcttgagagagccgctcgtgtaaattctgaatatgttgaaaaactaaccaacggagaggtaaaaggtaaaactggctcactcacagctctgccaattattgaaacacaagctggggatgtttcagcctttgttcctaccaatgtaatctcaattaccgatgggcaaattttcttagaaactgatctttttaactctggagttaggcccgccatcaatccaggtatcagtgtatctagggttggtggtgcagcacaaacaaagattatcaagaaacttggaggcggtgtaagacttgccttagcacaatttagagaattggcctcatttgctcagtttgcctccgaccttgatgatgcaaccaaagaacagttggcacacggtcaacgtataaccgaactgttaaaacaaaagcaatacgcccctttaagcgttgctcaacaagctattacgctttttgccgccgacagaggctatctgaaagaagtagatgttgagaagttgggtgcttttgaaaatgcactccattcattctttactgcagattattcagacctagaatctaggattaatgaaactggtgactgggacgacgacattgaaaaacaatttgtaaaagtattagagagctttcttaaaacgcagacatattaa

SEQ ID NO: 273799 - DNA, 530 bp, Unknown
  Bacterial polypeptide expressing nucleotide sequence isolated from the Sargasso Sea
aatgagtatccaagcatctgaaatatcttcaattctaaaagatcagatcaaaaactttgggcaagaagccgaagttgcggaagttggtcgagtattatctgtgggggacggaattgcccgggtatatggtcttgacaatgttcaggctggggagatggttgagtttcctggtggaatacaaggcatggctctgaacttagaggctgacaatgttggcgttgttatatttggttccgatagagatatcaaagaaggtgatgtggttaaaagaacaaactcaattgttgacgtgcctgttggtcccagtctgttgggtcgagtggttgatggtttaggtaatccactcgatggcaaaggacctattaaatcaaaagacagaagtgtggcagatgttaaagcgccaggaattatacctcggaaatctgttcacgagccaatggctactggactgaaatcagttgatgccatgatcccaataggaaggggtcagcgcgagcttatcattggtgacaggcaaaccggcaaaactg

SEQ ID NO: 273800 - DNA, 1423 bp, Unknown
  Bacterial polypeptide expressing nucleotide sequence isolated from the Sargasso Sea
aatgagcaaaaatggaaaaattatacaggtaatcggagcagtagttgatgttcaatttgatggtgatttacctgagattttaacagcactagaagtagataattctggaaacaaattagttttagaagtagcacagcatcttggagaaaacagtgtaagaacaatcgcgatggatagtactgaaggattaaaaagaggggatgttgttcaaaacactggtgcaccaattagtgttcctgttggtcctgaaactttaggaagaataataaatgttataggtcagccaattgaccaaaaaggagaagttaaaacaaaagaaaaatggccaatacacagagaagcaccaaaatttacagatcagtccactgaaacagaaattctagaaactggcattaaagttatagatcttctggcgccatactcaaaaggtggaaaaattggattatttggaggagctggagttggcaaaacagtaattattatggaattgataaacaacattgcaaaagctcatggaggattttctgtttttgcaggtgttggggagagaacaagagagggaaatgatttgtatcatgaaatgattgagtcaggtgttattaaacctgaaggtaaaggttcaaaagctgctttagtttatggtcaaatgaacgagcctccaggagctagagccagagtaggtttaacaggtttaacggtagcagaatattttagagataaagaaggccaagatgttttattttttgtagataatatttttagatttacgcaagcaggatccgaagtttctgctttgctaggtagaataccatctgctgtaggatatcaaccaactttagcaaccgatatgggtaacttacaagaaagaattacgacaacaggaaaaggatctataacttcggtccaagcaatttatgttcctgcagacgatttaacagatccagcaccagcaacatctttttcacacctagacgccacaaccgttttatctagacaaattgcagagttaggtatttatcctgcggtggatccattagactctacatctagaattttagatccaagaattgtaggtgaagagcattatcgcgtagccagggaagttcaaaaaattttacaaacctataaatctttacaagatatcatagctatacttggtatggatgaactatcagaagaggacaaattaacagtagctagggcaagaaaaatacagagatttttatcacaaccgttctttgttgctgaagtttttactggaacaccaggtaaattagttaatttggactctacaattaaaagttttgatgccatatgtaaaggtgagtacgatcatttacctgaagcagcattttatatggttggctctatcgaggaagctattgaaaaggctgaaaaaatggcaaaagaagctgcagcataa

SEQ ID NO: 273801 - DNA, 1039 bp, Unknown
  Bacterial polypeptide expressing nucleotide sequence isolated from the Sargasso Sea
attgggagacaggcaaactggaaaaacagcagttgctatagatactattataaaccaaaaaaaaataaatgagtcagacgatgaaaaaaagaaactctattgtatttatgttgcgattggtcaaaaaaggtcaaccgtagctcaaattgtaaaaactttacaagacgcaggtgcaatggattatacaattgtagtttctgctacagcatctgaccctgctccattacaatttttagcaccatatacaggatgtacttttggtgaattttttagagacaatggaatgcacgctctaataatttatgatgatttatctaaacaagctgttgcatacagacaaatgtctcttttattaagacgacccccgggtagagaagcatatccaggagatgtattttatttgcacagtagattacttgagcgatcagcaaaattaaatgatgacaatggtggtggttcattaacagctttacctattattgaaacacaagccggtgacgtatctgcatacattccaacaaacgtaatttcaataactgatggtcaaatttttttagaaacagaactttttaatcaaggaataagacctgcagtaaacgttggtctatctgtttctagagttggttccgcagcccaaaccaaagccatgaaaaaagtagcaggttcaatcaaattagaattagcacaataccgtgaaatggcagcttttgctcaatttggatctgatttagatgcttcaactcaaaaattattgaatagaggatctaaacttactgagttattaaaacaagatcaatatagtccaatgacagtagcagaacaggtagtgtcagtttattctggtgtaaaaggttatttagatactattgaaaataatcaaattcgatcattcgaaaaaggtttattagatttaattaaaaatgaaaaacctgaaatactagagtcaattcaaaaaagtggaaagatcgaagaggatactgaaaagcttttaatagaagttataacaaattataaaaagtcaaattttgagaaaaaataa

SEQ ID NO: 273802 - DNA, 880 bp, Unknown
  Bacterial polypeptide expressing nucleotide sequence isolated from the Sargasso Sea
aatgccaagtttagatgatttaagaaaaagaattgctagcgttaaatctacgcaaaaaataacgaaagcaatgaaaatggtggctgctgctaaattacgtaaagcgcaggaaatggctgagaaaggaaggccttatagtgataaaatggatttaataattcaaaacttaagtaaagcgatcaatgacccgtctaatgcaccaaaacttttagttggaacaggagaggataaaatacatctatgcgttgttatgacagctgatcgaggtctttgtggtggatttaacacaaacatatgtaaattagctaagaaatattttgatgaggctattaaatcctctaaaaacttaaaaataatcactgttggcacaaagggtcttgatcaattaaaaagggaatatgggaaatacattattaaaaaaataaatttaaaggataaaaaaaaattaacatttttagatgcagaggagattggtaaacaaatcgttgatttatttaaaaataaagaatttgataaatgctttattttttataataaatttaaaaacgttatctcacaaattccacaacaacaacaagtaatacctgctaagatagaagaaaaagataaaaaacaggaagaaatgtcttcatatgaatttgaacctgaagaagatgaaatcttagatgatttattaccaaaaaatatatctactcaaatatttaaagcttttttggaaaattcagcaagcgaacaaggttcaagaatgacagcaatggataatgcgacaagaaatgcaggagatttagtagataagttgacaattaactacaatagaagcagacaagcttctatcacaaaagaattaattgaaataatatctggagctgaaagtttataa

SEQ ID NO: 273803 - DNA, 1537 bp, Unknown
  Bacterial polypeptide expressing nucleotide sequence isolated from the Sargasso Sea
aatggaaattaaagctgcagaaatatcttctgtaattaaagaccaaatagctaattttgaaactaaagcggatgttgctgaggttggaacagtactaagtgttggagacggaattgcacgtgtgtatggtcttgatcaagtacaagctggagagatggtagaattcccaggcggcattaaaggtatggccctcaaccttgaaatggataacgttggtgtttcaatcttcggtgatgatactggaattaaagaaggtgatacagttaaacgtacaggagaaattgttgacgttcctgttggaaaagaattgttaggacgtgttgttgatggtttaggaaatcctattgatggtaaaggtcctattcaatcttctgaaaagagaagaattgaattaaaagccccaggcattattcctcgtcaaagtgtatctgaacctatgcagacaggtattaaagcacttgatgctcttgttccagttggaagaggacaacgtgaattaatcattggtgacagacaaacaggtaaaactgctgttgctattgatacaatcttaaatcaaaaatctgtaaatcaatcagataatgaaaaagaaaagttatattgtatctatgtcgcaattggtcagaaaagatcaacagttgctcaaattgtaaaaacactagaagataatggtgcaatggaatatacaattgttgtatctgcaactgcatcagagcctgcaccgttgcaatttttatctgcttatactggctgtacaatgggtgagtattttagagataacggtatgcatgcattaattgtttatgatgatttatcaaagcaagctgttgcttacagacagatgtctctattattaagaagacctccaggacgtgaagcatatcccggagatgtattttacattcatagtcgtcttttagaaagagctgccaaaatgagtgatgaacatggtggtggaagtttgaccgcccttccaattattgaaactcaagcaggagatttatctgcttatattccaacaaatgttatttccattactgatggacaaatatttttagaaacaaacttattttttgctggtattcgtcctgcgattaacgttggtctttccgtaagtcgtgttggttctgcagctcaaacaaaagcaatgaaaaaaattgctggtcctgtaaaacttgaattagctcaatatcgtgagatggctgcttttgcacagtttgcatcagacttagacgcttcaacgaaacaattacttgatcgtggtgcaagactagttgaaatcttaaaacaaggtcagtattcaccactaacggtttcagagcaagttgtatctatttatgctggtgtgcgcggatatcttgataaagttgcagtaggcgatgtagtcaagtttgaagcagaagttttaaatgagattagaactaagcatagtgatttattagatgcaattgccaatgaaaaagaattatctaaagaaaatgatgataaattaaaatcaatcttagatgatttggttggaaagtttgcaagtaactaa

SEQ ID NO: 273804 - DNA, 487 bp, Unknown
  Bacterial polypeptide expressing nucleotide sequence isolated from the Sargasso Sea
tgatcctgcaccagctacatcattttcacatttagatgcaactactgttttatctagacaaatagctgaactgggtatttacccagctgtagatccactagactctacttcaagaattctagaccccagagtagttggtgatgaacattatagagttgccagagaggtacaaagaattttgcaagcttataaatctttacaagatattattgcaattttaggaatggatgagctttcagaagaagataaattaactgtagcaagagctagaaaaatacagcgttttttatcacaaccattttttgttgcagaagtatttaccgggtcccccggaaaactcgttgatctagagtctacaataaagggatttgatgccatttgcaaaggcgaacatgataacttacctgaagcagctttttatatggttggatcaatcgaggaggtaattgaaaaagctgaaaagcttgaaaaaggaaacaaatcgtag

SEQ ID NO: 273805 - DNA, 742 bp, Unknown
  Bacterial polypeptide expressing nucleotide sequence isolated from the Sargasso Sea
tatgagaaaaggaaaaataacacaagttattggagcagtagttgatgtaaagtttgaaggtgaactaccagagatactaacggcactagagtgtaataatgcaggaaataggcttgttttagaagttgcccaacatcttggagagtcaagtgtaagaacaatagcgatggatgcaacagagggattaaaaagaggtgatgatgtttcagatacgggggcaccaataaaagtacctgtaggacctgaaacacttggaagaattattaatgttattggtgaaccgatagatgaaaaaggaaaagttcaaaacaaagaaaattggccaattcatagatctgctccagagtttaatgatcaatcgactgaaactgaaatattggtcacaggaattaaggttatagatcttttagccccttatgcaaagggtggaaaaattggattatttggcggcgcaggtgttggaaagacagttttaattatggagttaatcaataacgtagcaaaagcccatggcggcttctcagtttttgcgggtgttggagaaagaacaagagaaggaaacgatctctatcatgagatgatagactctggagttataaaaactgacggaccaggttcaaaagctgcattagtttatggacaaatgaacgaacctcctggtgctcgtgcaagagtagcattaacaggtcttacagtagcagagtattttagagatcaggagggacaagatgttttgtttttt

SEQ ID NO: 273806 - DNA, 877 bp, Unknown
  Bacterial polypeptide expressing nucleotide sequence isolated from the Sargasso Sea
aatggcaagcttagacgatttaaaaaaaagaatatcaagcgtaaaatcaacgcaaaaaattaccaaagcaatgaaaatggtagctgctgcaaaacttagaaaagctcaagaaagtgctgagaaaggtagaccttattcagataaaatgaataacattattcttaacctttcaggcagtataacagataaagaaaatgcatcaaaactgcttattggaaccggtgaagaaaaagtttatttatgcgtagttttgacatcagatagaggtttgtgtggaggttttaattcaaatataattaaaaaagcaaaaacatattttaacaaaattcaagctgaaaataaaaaattaaaaatcataacagtaggttccaagggctatgaccagttaaaaagattgtatagagaaaatataattgagaaaatttcatttaaagaatctaaaaatgcaaattattttgatgcagagaaagttggaaaaataataattgatagatttgaaaaaaaagaatttgatgtatgtactattttttataataaatttaaaaatgtaattacgcaaatacctcaagaacaacaaattattccattaaaatctcagaatgaaaataaagatgagactatcgtttcgtatgagtttgaaccagaggaagatgaaatattaagtaatttacttcctaaaaatatatctacacagatttttaaggctatgttagagaattctgctagtgagcaaggttcaagaatgagcgcaatggataatgcaaccagaaatgctggtgaaatggttgacaaattaactattgaatacaatagaagtcgtcaagcagctatcactaaggagttaattgaaataatatcaggagcggagagtttataa

SEQ ID NO: 273807 - DNA, 235 bp, Unknown
  Bacterial polypeptide expressing nucleotide sequence isolated from the Sargasso Sea
tccgaagaagataagttggcagtagcaagagctagaaaagttgaaaggttcctatctcaacctttcactgttgcagaggttttcactggttctccaggtaaatacgttaaacttgaagacaccatcaagtcatttaaaggtattcttgctggagactatgacgatctccctgagcaagccttttacatggttggaacaattgaagaagccgtagaaaaagcaaaaactttataac

SEQ ID NO: 273808 - DNA, 1537 bp, Unknown
  Bacterial polypeptide expressing nucleotide sequence isolated from the Sargasso Sea
atggaaataaatccttcagaagtaactaaaatattaaaacaacaaataaataaatttggagataaagctgaaatttcagaagttgggcaagtactttcggtaggcgatggtattgcaaggatatatggtttagacaatgtccaggctggagaaatggttgaattttcagatggatctaaaggtatggctttaaacttagaaagcgataacgtcggtgttgtaatttttggtgaagacagatctattaaagaaggagatacagtaaaaagaactggtgcaattgtagatactcccgtaggcaaggaattattaggaagagtggttgatggtcttggaaatcctattgatggaaaaggaaacttagataaaagtgttaaaagaagtagagttgaagttaaggctccaggaattattcctcgtaaatcggtaagtgagccaatgcaaacaggacttaaatctattgatagtctagttccaattggaagaggtcaaagagaattaattattggagatagacaaactgggaaaactgcagttgctattgatgcaattattaaccaaaaaaaaataaacgattcagatgatgagaagcaaaaattatattgtgtatatgttgcaattggtcaaaaaagatcaacagtgagacaaattgaaaaaactttagaagaagctggggcaatggaatatacaacaatcgttgctgcaacggcatcagacgcagctcctcttcaattcttagcaccttataccggatgtgctatgggagaatattttagagacaatggcatgcatgctttaatcatatatgatgatctttcaaaacaagctgttgcatatagacaaatgtcactattactgagaagacctccaggaagggaagcttatccaggagatgtattttacctacatagtagattgcttgaaagagctgctaaattaagcgatgagcatggaggagggtcattgactgctcttccaataattgaaacacagggtggcgatgtttctgcatttatacccactaatgtaatttcgattacagatggccaaatctttttggaaactgaattatttaaccaaggtataagaccagcaattaatgtaggactatcagtatctagagtgggatcatcagctcaaacaaaagctatgaaaaaagtttctggatctatgaaacttgaacttgctcaatatagagaaatggctgcatttgctcagtttggatcagacttagatgcttccacacagaaacttttaaatagaggttcaaaattaacggaactgctaaagcaaaaacaatactcaccaatgacagtagccgaacaagtaatttcagttttttgtggtgtaaaaggccatttagatgatgttgatcaaaaaaatattgctgaatttgaaaataaaattatagaaaaatgtaggtcagaaaaaccagaaattttagactcaatagcaagttcaggtaaacttgaagaggattctgaaaaatctttaaccgaagttattactgaacttaaaaaaaattttaattcttaaa

SEQ ID NO: 273809 - DNA, 1252 bp, Unknown
  Bacterial polypeptide expressing nucleotide sequence isolated from the Sargasso Sea
atggaaataaatccttcagaagttacaaaaatattaaaagaacaaattaaaaagtttggagataaagctgaggttacagaggttggtcaagttttatcagtaggagatggtatagcaagaatttatggattagataatgttcaagctggagaaatggtagaattctctgatggttcgaaaggaatggcattaaacctggagagtgaaaatgttggtgttgtaatttttggtgatgatagagcggttaaagaaggtgatactgtaaaaagaactggtgcgattgttgatacaccagttggaaaagaattactcggtagagtagttgatggtttaggaaatccaattgatggaaaaggtgcgttagataaaagtttaaaaagaagtagggttgaggttaaggctcctggtataattccacgtaaatctgtaagtgaaccaatgcagactggtctaaaatcaattgacagtctagttccaattgggagaggacaaagagaattaattattggtgatagacaaactggcaaaacagcagttgcaattgatgctattataaatcagaaaaaaattaacgagtcaggcgatgagaagaaaaaattatattgtatttacgtggctgttggccaaaagagatctacagttagacagattgaaaaaacattagaagaagctggtgctatggaatacacaacaatagttgcagcaactgcatcagatgcagcacccttgcaatttttagctccttatactggatgtactatgggtgaatattttagagataatgggatgcatgctttgattatatatgatgatttatcaaaacaagctgttgcatatagacaaatgtcacttctattaagaagacctcccggaagggaagcgtatcctggagatgtattttacttacatagtagattattagaaagagctgcaaaattaagcgatgagcatggcggaggatcattaacggctcttccaatcatcgaaactcaaggtggagatgtttctgcattcataccaacaaatgttatttcaattactgatggtcaaatatttcttgaaacagaactttttaaccaagggataagacctgctataaatgttggattatctgtatcaagagttggatcatctgcacaaactaaagcaatgaaaaaagtctcagggtctatgaaattagagctcgcgcaatatcgtgaaatggctgcgtttgcacaatttggttcagaccttgatgcgtctactcaaaaat

SEQ ID NO: 273810 - DNA, 1462 bp, Unknown
  Bacterial polypeptide expressing nucleotide sequence isolated from the Sargasso Sea
aatggtatcaactccatcaacttcttcacaaactaaaggcgtagtacgtcaggtaattggtccagttctagatgtggaatttccagccggaaaattgcccaaaatattaaatgctttaagaattgaagctaaaaatccagctgggcaagacatagcgctcactgcagaagtccaacagctcctaggtgaccatagagttagagcagtggcaatgagcggcacagacggccttgtaagaggtatggaggcaatcgacacaggagcgccaatatctgtacccgtaggagaagcaactttaggaagaatatttaatgttttaggagaaccagtagatgaacaaggtccagtaaatactaaagatactgctccaattcatagatctgcaccaaagttaactgacctagaaactaagccaaaagtttttgaaactggtattaaagttatcgaccttttggctccttacagacaaggaggtaaagttggattattcggaggtgctggtgttgggaagacagttcttattcaagaattaattaataacatcgcaaaggagcatggtggagtttccgtttttggcggtgtaggagaaagaactagagaagggaacgacttatatgaagaatttaaagaatctggagttatcaatgcggatgatctaactcaatcaaaagttgccttgtgttttggacagatgaatgagccacctggtgcaagaatgagagtaggcttatcagcacttacaatggccgaacattttagagatgtgaataagcaagacgtcctactttttgttgataacatttttagattcgttcaagctggttctgaagtatctgcattacttggaagaatgccttcagctgttggataccaaccgactctaggaactgatgttggtgaattgcaagaaagaattacatctacattagaagggtcaataacatctatccaagctgtttacgtacctgctgatgacctaacagaccctgctccagctacaacttttgcccatttagatgcaactaccgtgcttgctagagctcttgcagctaagggaatttatccagcagttgatccattagactcaacaagcactatgctacaaccatcagttgttggcgatgagcattacaaaacagccagagctgttcaatcaactttacaaagatacaaagagcttcaagatattattgcaattcttggtttagatgagctttctgaagaagataggttaacagtcgacagggccagaaaaattgaaaaattcctctcacaacctttcttcgtagcagaaatatttacaggaatgtctggtaaatatgtaaaattagaagataccattgctggtttcaacatgattttgtcaggggaattagatgatttaccagagcaggcattttacttagttggtaatattgatgaagttaaagcaaaggctgaaaaaataaaatcagaaaaataa

SEQ ID NO: 273811 - DNA, 1208 bp, Unknown
  Bacterial polypeptide expressing nucleotide sequence isolated from the Sargasso Sea
tatgaaaaaaggaaaaattacacaggttattggggcagtagtagatgttaaatttgatggagagttgccagagattttaactgcattggaatgtaataatgccggcaacagacttgtattagaagttgcgcagcatttaggagaatcaagtgtacgaacgattgcaatggatgcaaccgaaggattaaaaagaggagatgaagttacagatactggttcaccaatcaaagtcccagtaggtcccgaaacattaggaagaattgttaatgttataggtgaacctattgatgaaaaaggcgaggttaaaactaaagaaagttggcctatacatagagcagcaccagagtttaatgaccaatcaactgaaactgaaattttagtaactggaatcaaagtagtagatttattagcaccttatgcaaaaggtggtaaaattggtctatttggtggtgcaggagttggaaaaacagtaatcataatggaactaattaataacattgcaaaagcacatggtggtttttctgtatttgctggagttggggaaagaactagagaaggaaatgatctttatcatgaaatgatagagtccggagtaattaaacctgaaggacccggatcaaaagctgcattagtttatggtcaaatgaacgagcctcctggagcaagatcaagagttgctctaacaggattaacagttgcagaatatttcagagaccaagaaggtcaggacgtactttttttcgtagataatatttttagatttacacaagcaggttctgaagtatcagccttactaggaagaattccctcagcagttggttatcagcctactctagcaactgacatgggtaatttacaagaaagaattaccacaactaataaaggatctattacatcagtacaggctatatatgtccctgctgacgacttaactgatccagcacccgcaacatcatttgctcacttagatgcaacaactgtgttgtcaagacaaattgcagaacttggaatatatccagctgttgatcctttagactcaacttctagaattttagatccaagaattgtaggtgatgaacattatagagttgcaagagaagttcaaaaaattcttcagacatacaaatctttgcaagatattattgcaattttaggtatggatgaattatccgaagaggataaactaattgttgcaagagcaagaaaaa

SEQ ID NO: 273812 - DNA, 661 bp, Unknown
  Bacterial polypeptide expressing nucleotide sequence isolated from the Sargasso Sea
aactggagaagaaaaaactcacctatgtgttgttatgacatcggatagaggtttatgtggaggctttaatacaaatattattaaaaaagcaaagcagtattttcaaaaaatattaaaagaaaataaaatattaaaaattataactgttggatcaaaaggttatgatcaattaaaaagacaatataaagaaaatataattgaaaaaatttcattcaaagattctaaaaatatcaattattttgatgcagataaagttggtaaaattataattgatagatttgaaaaaaaagaatttgatgtatgtgcaattttttataatcagtttaaaaatgttattactcaaataccacaagaacagcaaattattcctttaaaatctaacgaagaaaaagaaactagttccaatgatagttatgagtttgaaccagaagaagatgaaattttgagcaatttattacctaaaaatatttctacacagatttttaaagcaatgttggagaattcagcgagcgaacaaggttcaagaatgagtgccatggataatgcaactagaaatgcaggagaaatggttgataagcttacaattcagtacaacagaagtcgccaagctgcaatcactaaagaactaatcgaaataatatcaggagcagaaagtttataa

SEQ ID NO: 273813 - DNA, 1543 bp, Unknown
  Bacterial polypeptide expressing nucleotide sequence isolated from the Sargasso Sea
tatgcaaataaatccctccgaagtaacaaaaattttaaaagaacaaataaaaaaatttggggaaaaggcagagatatccgaagtaggacaggtcctatccgttggtgatggtattgctagagtctatggcttggataatgttcaggctggtgaaatggtagaattttcaggcggaataaaaggtatggctttaaatttagaaaatgacaacgtgggtgtagttatatttggagatgatagatccataaaagaaggagatgttgtaaaaagaacaggtgcaattgttgatgcaccagttggtaaaaatttgttaggtagagtagttgatgcactaggtaatccaatagatggaaaaggtgatttaaataaaaaaatagaaagaaaaagagtagatgttaaagccccaggaataattcccagacaatcggtgaatcaaccgatgcaaacaggactcaaagctattgatagcttaatacctgttggaagaggtcaacgggaactaattattggtgataggcaaacaggaaaaactgcagtagctattgatacaattataaatcaaaaagaaataaataaatctggaaaagaaaaagataaactttattgtatttatgtagcgattggtcagaaaagatcaaccgttgctcaaattgtaaagtctcttgaagaagcgggagctatggaatacacaactattgtttctgcaacggcttcagatcccgctccattgcaatttttagctccgtacacgggttgtacaatgggagagtacttcagagataatggtatgcatgcgttaattatttatgatgatttgtctaaacaagcagttgcttacagacaaatgtcacttttattaagaagaccaccaggcagagaagcttatcccggagacgttttttatttacatagtagacttctagaacgtgctgctaaacttaatgatgacaatggaggtggctcactaacagctttaccaattattgaaacgcaagcaggtgatgtttctgcctatataccaactaatgtaatttcaattacagatggtcaaatatttttaggaacggaactttttaatcagggtataagacctgcggtaaacgttggtctttctgtttctagggttgggtctgcagcgcaaacaaaggcaatgaaaaaagtagctggatctataaagcttgaacttgcgcaatatcgtgaaatggctgcattcgctcaatttggatctgacctagatgcttcgacacaaaagcttttaaatagaggttcaaaattaacagaattgttaaaacaagatcaatacagcccaatgacagtggccgaacaggttgtaacaatttatgctggagtaaaaggttatttggatagtattgagataagtcaaattcgttcttttgaaaaaggtttactagaattagtaaaaaacgaaaagcctgagttactagactctattcaaaagagtggaaaaatagatgaaaatattgataagactttgtctgaaataattacaaattttaaaaaaaacaactttgagaagaaataa

SEQ ID NO: 273814 - DNA, 1051 bp, Unknown
  Bacterial polypeptide expressing nucleotide sequence isolated from the Sargasso Sea
attggtcgcggtcaacgtgagcttattattggagaccgccaaactggtaaaacagcgattgcaattgatacaattttgaatcaaaaatctattaatgagtcaaacgatgaatcaaaaaaactgtattgtgtttatgtagctgtaggacaaaaacgttcaactgtagcccaacttgtaaaagttcttcaagatagaaatgctttagactactcaattattgtagcagcgacagcatcggatcctgccccacttcagtttcttgcaccttattcagggtgcgcaatggcagaatattttagagataatgggatgcacgctttaattatttatgatgatttaagtaaacaatccgttgcgtacagacaaatgtctcttctgcttagaaggccgcctggtcgtgaagctttcccaggggatgttttctatttacactcacgtttactagaacgatcagcaaaaatgtctgatgaagtaggtggtggatcaatgacagctcttccagttgtagagacacaaggaggtgacgtatctgcttatattcctacgaatgtaatttcaattactgatggacaaatctttttagaaacggaattgtttttcaaagggattcgaccagcgattaacgtaggtttatctgtaagtcgagttggatcagctgctcaacttaaagctatgaagcaagtgtcaggttcattaaaacttgaactcgcccagtaccgtgaagttgcagcatttgcccaatttggatcagatttagatgcagcaacccaatatttattaaatcgtggatcaaggttgactgaagttttaaagcaaggccaatttgtgccaatgagtgtagaacaacaagttgtagttatttttgctgcaactaaagggtatttagactcattagaagtgtcacagattgcttcatatgaagaagggttattaaaaactgttgattcttctttattacaaacaattaaatctgaaggatcgttatctgatcaaacaatgtcgaaacttgctgagttatgcgataaatttactaaacaatttaaagcataaa

SEQ ID NO: 273815 - DNA, 833 bp, Unknown
  Bacterial polypeptide expressing nucleotide sequence isolated from the Sargasso Sea
agaatattatagagacatgggatatgacgttgtacttgtagcagactcaacaagcagatgggcagaagcactacgagaaatgtctggtagattagaagaaatgccagcagaagaaggttatccatcatacttggcatctagattagcagaattttatgaaagagcaggacgagttagagcatccggaagtccagaacgtgatggttctgtatcgctggtaggtgcagtatctccatcgggtggtgactttactgaacctgttacaacacatacaatgagattcatcaaaactttctgggcacttgatgccaaacttgcctattccagacactatccatcaattaactggatgaacagttattcgggatatcttgcagatattgcaaaatggtggtctgagaatatcagtgatgactggctaaagttaaggggtgaaacttacggaattctacaaagagaagatacactaaaagaaattgtaagacttttaggaccagaagcacttccagatgaagaaaaactaatcttagaagttgcaagaatgattaagattggaattttacaacaaaactcatttgacgatgtagatacatactgtagccctgaaaagcaattcaaattaatgaaattactagttgacttttacaatcaaggacaacaagcactaaaagatggtgcagcactagcagatatccgtgcaatgcctgtgattgcttctttactaaaagcaagaatggaagtaaaggatgatgaaatggataaactagaaaaagtacaaaacgaaatggctgaacaattcaaaaatgttacaggagtaaaggtttcaaattgag

SEQ ID NO: 273816 - DNA, 838 bp, Unknown
  Bacterial polypeptide expressing nucleotide sequence isolated from the Sargasso Sea
aatgagtcaactaaacccatccgagatatccagtgttcttaaagagaaaattgctggactagatttaagtgcagaaagaaagaatgaaggggtaatagtgagcgtttctgacggcattgtcagaattcatggcatgggcgaagtcatgtatggagagctcattgaatttgaaaatggcgtgttcgggttagcccttaaccttgaacaagattctgtgggtgcggtggtgttgggagactaccttgacttgattgaaggccaaaaagcaacatgtactggaaaaattcttgaagttccagtaggaaatgaacttttaggtagggtggttgacgcgctcggaaacccaatcgatgggggcggcgaaattaatgcaccacttacagctccagttgaagttgttgcgcctggagtaattgcaagacaatctgttgatcagcctgtgcagactggtctaaaagctattgatgctatggtgccaataggcagaggacaaagggaacttattattggagacaggcaaactggtaaaacagctgttgcaatcgataccattattaaccaaaaaggtactggtattaagtgtatctatgtagccattggtcagaaacaatccaccattgcaaatgttgtaagaaaacttgaagagtatgatgcgcttgcacacactataattgtttctgcatctgcttcagatcctgctgcaatgcaatatctgtcagcctactcaggttgtgcgatgggagaattttttagagataggggtgaagacgctttgattgtatatgatgatctctcaaaacaagctgttgcgtacagacaaatatccctcttactcaaa

SEQ ID NO: 273817 - DNA, 991 bp, Unknown
  Bacterial polypeptide expressing nucleotide sequence isolated from the Sargasso Sea
atggatattcgtgcagcagaaatatcaacaatattaaaagatcagattgaaaatttcggcgctgatgctgaagtcacagaagttggtaaggttttatcggtaggagatggaattgctcgtgtttacgggcttgatcagattcaagctggtgaaatggttgagtttcctggtggtattgctggcatggccttaaacctagaaagagataatgtcggcgtagttatatttggtagtgataaaacaataaaagaaggtgacgttgtcaaaagaacaggttcaattgttgacgttccaataggtaaaggactcttaggaagagttgttgatggtctcggcaatcctatagatggaaagggtgctcttaaaaacgttaaaagatcaagagttgagactaaagccccaggtattatgccaagagaatcagtaagcgaacctatgcaaactggtttgaaagcaatcgattctcttattcctgtagggagggggcagagagagcttattattggagacagacaaacaggtaaaacagctattgcaattgatacttttttaaatcaaaagagtactaatgataaagctggtaaagatgatactaagaagttgttctgtatttatgtggcagtaggtcaaaaaagatcaacagtagcacaaattgttaaaacattagaggaaagaggagctttagagtattctattgtggttgcagctacggcatctgatccagctccaatgcaatttcttgcaccttattctgccgctgctatgggagaattttttagagataatggaatgcatgcggttgttgtttatgatgatttatcaaaacaagcagttgcctacagacaaatgtctctccttttaaggagacctccaggaagagaagcttatcctggtgatgtgttttatttacactcccgtttactcgaaagagccgcaaaattaaatggagaaaatggatctggttctctaacagcccttccaataatcgaaa

SEQ ID NO: 273818 - DNA, 1399 bp, Unknown
  Bacterial polypeptide expressing nucleotide sequence isolated from the Sargasso Sea
aatggaaataaatccttcagaagtaacacaaatattaaaagaacaaattaaaaagtttggagataaagctgaggttacagaggttggtcaagttttatcagtaggtgatggtatagcaagaatatatggattagataatgttcaagctggagaaatggtagaattttctgacggctcgaaaggaatggcattaaacctagagagtgaaaatgtaggtgtagtaatttttggtgatgatagagcagtaaaagaaggtgatactgtaaaaagaactggtgcaattgttgatacaccagttgggaaagaattgcttggtagagtagttgatggtttaggaaacccaattgatggaaaaggtgcgttagataaaagtttaaaaagaagtagggttgaggttaaagctcctggtataattccacgtaaatctgtaagtgaaccaatgcagactggtcttaaatcaattgatagtctagttccaattggaagaggacaaagagaattaattattggtgacagacaaacaggcaaaacagcagttgcaattgatgctataataaaccagaaaaaaattaacgagtcaggtgatgagaagaaaaaattatattgtatttatgtggccgtaggccaaaagagatctacagttagacagattgaaaaaacactagaagaagctggtgcgatggaatacacaacaatagttgcagcaactgcatcagatgcagcacctttacaatttttagccccttatactggatgtactatgggtgagtattttagagataatgggatgcatgccttgattatatatgatgatttatcaaaacaagctgttgcatatagacaaatgtcacttctattaagaagacctcccggaagagaagcatatcctggagatgtgttttacttacatagtagattacttgaaagagctgcaaaattaagtgatgagcatggtggaggatcattaaccgctcttccaataatcgaaacccaaggtggtgatgtctctgcatttataccaacaaatgttatttcaattactgatggtcaaatatttcttgaaactgaactttttaaccaaggtataagacctgccataaatgttggattatccgtatcaagagttggatcatctgctcaaactaaagctatgaagaaagtttcagggtccatgaaattggagctcgcgcaatatcgagaaatggctgcatttgcacaatttggttcagacctcgatgcgtctactcagaaattacttaacagaggatcaaagttaactgaacttttaaagcaaaatcaatattctcccatgacagttgcagaacaagtcatttctgtattttgtggagttagaggacatcttgatgatattgaacaaaaaggatatttcaagttttga

SEQ ID NO: 273819 - DNA, 441 bp, Unknown
  Bacterial polypeptide expressing nucleotide sequence isolated from the Sargasso Sea
aatggctagtttagacgatctaaaaaaaagaatatcaagtgttaagtctacgcagaagattacgaaggcaatgaaaatggtcgctgctgcaaaattgcgaagagctcaagagagcgctgagaaaggaagaccttactctgataaaatgaatagtattattttaaatttatcaaatggtatctcagacattgaaaatgctccaaaacttttatcaggtaatggtgaagacaaagtacatttgtgtgttgttatgacatcagacagaggtctttgtggtggttttaacacaaatattattaaaaaggctaaacagtattttcaaaaagttttagatgagggaaaaaccttaaaaattattacggtaggagctaaaggttatgaccaactaaaacgtctatatggtgataatattatagagagaatatctttaaggactctaaa

SEQ ID NO: 273820 - DNA, 837 bp, Unknown
  Bacterial polypeptide expressing nucleotide sequence isolated from the Sargasso Sea
ttgagtcaggaataattgacttaaaaggcaaggattcaaaagttgcacttgtttatggtcagatgaacgaaccaccaggagcaagagctagagttgctctttcaggattaacacaagcagaatattttagagatgaagaaggacaggacgttttattttttgtagataatatctttagatttactcaagctggatctgaagtgtcagctctcctaggacgtattccatctgcagttggatatcaaccaacacttgcaactgatatgggtgccctgcaagagcgaattacaactacaaaaaaaggatcaatcacatcggtgcaagcaatctatgttcctgcggatgacctaacggatcccgcacctgctacatccttttcacacttggatgcaacaacagttttaaatagggccatttctgaaaaaggcatatatccagcagttgacccactagattctacttcaagaattttagacccacaagttgttggtgatgaccattacagagtagccagagaagtgcagagagtcttacaaacatataaaagtcttcaagatattattgctattttaggaatggatgaactttcagaagaagataagctaacagttgctagagcaagaaaaatagaaaagtttttgagccaaccttttttcgtagcagaagttttcacaggttcagctggtaaatatgttgatcttgaagataccattaagagttttgatggattagtaaaaggagaatatgatcatatgccagaagctgcattttatatggtaggtggcatagatgaagcaattgaaaaagctaaaaaattagaagctgaagccgcataat

SEQ ID NO: 273821 - DNA, 513 bp, Unknown
  Bacterial polypeptide expressing nucleotide sequence isolated from the Sargasso Sea
tatggaaattaatccgtctgaagttacaaaaatattaaaagaacaaataaaaaattttggagaaaaagctgaaatttctgaggtaggacaagttttatctgtaggtgatgggatagcaagaatttatggtttagataatgtccaggctggagagatggttgaattttcagatggttctaagggtatggctttaaacttagagagtgaaaatgttggagtagttatttttggagatgatcgaaatataaaagaaggagatgttgtaaaaagaacaggaagtattgttgatacgccagttggaaaagagttattaggtagagttgtagatggactaggaaatccaattgatggaaaaggtgctttagataaaggagttaagaaaagtagggttgaggtaaaagctcctggaattattccaagacagtcagtcagtgagccgatgcaaactggattaaaatcgatagacagtcttgttccaattggaagaggccaaagagaattaattattggtga

SEQ ID NO: 273822 - DNA, 553 bp, Unknown
  Bacterial polypeptide expressing nucleotide sequence isolated from the Sargasso Sea
atgacagctcttaaaacagaacagaacattggtcgtattacacaaattattggaccagttattgacgcagttttcccaccaaacaaaatgccaaacatttacaactcagttgtaattgaagggaaaaatgaagttggtgagccaattaaatgtgtagcagaagtacaacaacttcttggagacaacgtagtacgtgcagtatcaatgagtgcaactgacggtttaatgcgtggtatgacagtagtagatactggatcagcacttgcagtaccagtaggtaaaaacactcttgggcgtatttttaatgttctcggtgagccagtagacgaacttggaaatgtagagactcctgaaggaactctcccaatccaccgtccagcacctgcattcgtagaccttgatacaaacctttcaatttttgaaactggaattaaggtagtagaccttcttgctccttaccgtcgtggtggaaaaattggtctttttggaggagctggtgttggtaagacagttcttattatggaactcattgtgcgacccattcttgcttaag

SEQ ID NO: 273823 - DNA, 1426 bp, Unknown
  Bacterial polypeptide expressing nucleotide sequence isolated from the Sargasso Sea
tatggctaataatttaactggaaaaatatcacaagttcttggagctgttgtggatgtagagttcgatggtgaacttcctgcaattatgaatgctctagaagttgataataacggaacaagattaatgctagaggttgctcagcacttaggtgaaaatgctgttcgtacaattgcaatggatacaactgatggattagtaagaggtcaaacagcgacggatacaggctcccccatttctatgcctgtaggtccagaaacacttggtcgtattatgaatgttgttggtgagcctgttgatgaaagaggcgaaatcggcacaacaaaaacttatccaattcatcgacctgctccagagtttgttgatcagtctacagaaacagaggttcttgtaaccggaattaaggttgttgatttattagcgccttatgcccgaggtggtaaaattggattatttggtggtgctggtgttggtaaaacagttttaattatggaacttattaataatattgccaaagcacacggtggttactcagtttttgctggagttggtgaaagaacgcgtgaaggtaacgatctgtatcatgagatgattgagtctggtattattgaccttaaaggaaaagattcaaaagttgctctagtttacggacaaatgaatgaacctccaggagcaagggcaagagtggcattatcaggcctaacacaagcagaatattttagagatgaagaaggtcaagatgtgttattctttgttgataatatctttcgatttactcaagctggatctgaggtatcagcacttcttggacgtattccatcagccgttggatatcaaccaacattggctactgatatgggcgcattgcaagagcgtataacaacgacaaaaaaaggatccatcacttcagttcaagcgatttatgtgcctgcagatgatttaacagaccctgcgcctgcaacatctttttctcacttggatgctacaacagtcttgaatagagcaatttctgaaaaaggaatttatcctgcagttgaccctcttgattcaacatcaagaattttagatccacaagttgttggtaatgatcactacagagtggcaagagaagtgcaaagagttctacaaacttacaaaagtcttcaggatatcattgctattcttggaatggatgaattatcagaggaagataaattgacagttgcaagagcaagaaaaattgagaaatttttaagccaacctttctttgttgctgaaatctttactggatcaccaggaaagtatgttgatcttgaagatacaattaaaagttttgatggacttgttaaaggtgaatatgatcatatgccagaagcagccttttatatggttggtggtatggatgaagctattgaaaaagctaagaaattagaagctgaagcagcataa

SEQ ID NO: 273824 - DNA, 586 bp, Unknown
  Bacterial polypeptide expressing nucleotide sequence isolated from the Sargasso Sea
atgagtcaattaaatccatcagaaatttccagcgttctaaaagaaaaaattgctggtcttgatctttcagcagaaagaaaaaatgaaggcattgtagtgagcgtctcagacggtattgtaaggatacatggcatgggagatgttatgtatggtgaggttatagagtttgaaaacggaacaaaaggcatggctctgaatctagaacaagactctgttggtgctgttgtgcttggagattatctcgagattattgaggggcaaaaagcagtatgcactggaaaggttctagaagtacctgttggtgaagggttgttgggtagagtagtaaatacactgggcactcctattgatggaaagggagaaattaaagctgaaagcagttcaccagttgaggtggttgctcctggtgttattgctcgtcagagtgtggatcaaccagttcagataggcctcaaagcggttgatgctatggttccaattggaaggggacaaagagagctaataattggagacagacagacaggaaaaaccgccgtggcaatcgatgcaattattaatcaaaaaggcacaggaattaaatgtatat

SEQ ID NO: 273825 - DNA, 574 bp, Unknown
  Bacterial polypeptide expressing nucleotide sequence isolated from the Sargasso Sea
gatgggggctatgcaggaaagaattacatcaacaaaaaatggatcgataacttcagttcaagccgtatatgttccggcagatgatttaactgatccagcacctgcaactacttttgctcatcttgatgctacaaccgttttatcaagaaaaattgctgagcttggaatttatcctgctgttgatccacttgattctacatctagaatattgactcctgaaattttaggagatgatcattataattgtgctcagagagtaaaagagttacttcagagatataaagagcttcaagatattattgcaattttaggtatggaggagctttcagaggaagacaaattagcagttgctagagcaagaagagttcaaaggtttttatctcaaccattccatgttgctgagcaatttacaggaatcccaggagctcttgttgatattaaggatacgataaaaggatttaatatgattatggatggtgagcttgatcatattccagaagctgcatttaacttaaaagggactattgaagaagccatagaggctggagagaaaatgttggctgaaactaaataa

SEQ ID NO: 273826 - DNA, 1177 bp, Unknown
  Bacterial polypeptide expressing nucleotide sequence isolated from the Sargasso Sea
atgagccaattaaatccatcagaaatttccagcgtattaaaggaaaaaatttcaggccttgatctttcagcggaaagaaaaaacgaaggtattatcgtcagtgtttcagacgggattgtccgaattcatggcatgggcgatgttatgtacggtgagttaatcgagtttgaaaatggggttcttgggctagctctaaatctcgaacaagattctgtaggtgctgtggttcttggtgactacctgggcttaattgagggccaaaaagctgtttgtactggaaaaatcttagaagtacctgttggtgaggagttattgggaagggttgtggatgctctgggaaatccaattgatggcaagggcgaaattaaaacagagtcaacagcgccagttgaggttgtggctccaggagttattgccagacagtctgttgatcaacccgtacagattggtctcaaggctgttgatgcgatggttccaattggccgaggtcaaagagagcttattattggcgacaggcaaacaggcaagactgctgttgcggttgatgcaatcatcaaccaaaaaggcacaggcattaagtgtatctatgttgcgataggacaaaaacaatcaactgtagtaaatgttgttaaaaagcttgaggagcatggagctctggaacatacaattattgtctccgcttcagcatctgatccagctccaatgcaatatctgtctgcatactcaggctgctcaatgggcgaatacttcagagacaaaggagaagacgccctgattgtgtatgatgatctctccaaacaagcggttgcatacagacaagtttctttgcttttgaaaagacctccaggaagagaggcatatccaggtgatgtgttttatcttcattcaagactattagaaagagctgcgagagtaaacgcagactacgtagaaaaagttacaaacggaaaggtaaaaggcaaaacagggtctttaaccgcgcttccaattattgaaacacaagctggcgacgtatcagctttcgttcctacaaatgttatttcaattactgatggccaaattttcctagagactgatttatttaattcaggtatcaggcctgctattaatccaggcatttctgtttctagggtgggtggtgctgctcaaaccaagatcatgaaaaaacttagtggcg

SEQ ID NO: 273827 - DNA, 874 bp, Unknown
  Bacterial polypeptide expressing nucleotide sequence isolated from the Sargasso Sea
tatggcaagtttagacgacctaaaaaaaagaatagccagtgtaaagtctacacaaaagattactaaagctatgaaaatggttgcagctgcaaaattaagaaaagcacaagaaagtgcagaaaaaggacgaccttattctgaaaaaatgaacaatgtaattttaaacctttctagtggaatttcagataaagaaaatgcaccaaagttgttagctggtactggacaagacaaagttcatctttgcgttgttatgacatcagatagaggtctgtgtggtggttttaattccaatataactaagaaagcaaaaagttatttttctaaaattttagatgagaataaagaacttaaaattattactgtaggttcaaaaggtaatgaccaacttaagagaacttatggtgataaaataattgaaaacatctcatttaaagagtcaaaaaatgctaattattttgatgcagacaaagtaggaaaaattattattgaaaaatttgaagcaggtgagtttgatgtatgtacaattttttacaataaatttaaaaatgtaattacacaaatcccacaagctcaacaaataattcctttaaatgatgaaggaaatgaaaatagttcagatgaaagttatgaatttgaaccagacgaagatgaaattttaagcaatttgttgccaaaaaatatttcaacacaaatatttaaggcaatgttagagaattcagctagcgaacaaggatccagaatgagtgcaatggataatgcaacccgaaacgcaggtgaaatggttgacaaacttactatcgagtataatagaagtcgtcaggcagcaattactaaagaactaatagaaatcatatcaggagcagaaagtttataa

SEQ ID NO: 273828 - DNA, 1231 bp, Unknown
  Bacterial polypeptide expressing nucleotide sequence isolated from the Sargasso Sea
attattaggacgtgttgttgatggtttaggaaatcctattgatggtaaaggccctattcaatcttctgaaaagagaagaattgaattaaaagccccaggtattattcctcgtcaaagtgtatctgaacctatgcagacaggtattaaagcacttgatgctcttgttccagttggaagaggacagcgtgaattaataattggtgacagacaaacaggtaaaactgctgttgctattgatacaatcttaaatcaaaaatcagtaaatcaatcaggcaatgaaaaagaaaagttatattgtatctatgttgcaattggtcagaaaagatcaacagttgctcaaattgtaaaaacgctagaagataatggtgcaatggaatatacaattgttgtatctgcaactgcatcagagcctgcaccgttgcaatttttatctgcttatactggctgtacaatgggtgagtattttagagataatggtatgcatgcattaattgtttatgatgatttatcaaagcaagctgttgcttacagacagatgtctcttttattaagaagacctcctggacgtgaagcatatcccggagatgtattttatattcatagtcgtcttttagaaagagctgccaaaatgagtgatgaacatggtggtggaagtttgaccgcccttccaattattgaaactcaagcaggggatttatctgcttatattccaacgaatgttatatccattactgatggacaaatattcttggaaaccaatctattctttgctggtattcgacctgcaattaacgttggtctttctgtaagtcgtgttggttctgctgcgcaaacaaaagcaatgaaaaaaattgctggtcctgtaaaactagaattagctcaatatcgtgaaatggctgcttttgcacagtttgcatcagacttagacgcttcaacgaaacaattacttgatcgtggtgcaagactagttgaaattttaaaacaaggtcaatattcaccactaacggtttctgagcaagttgtatctatttatgcaggtgtacgcggatatcttgataaagttgcagtaggcgatgtagtcaagtttgaaacagaagttttaaatgagattagaactaagcatagtgatttattagatgcaattaccaatgaaaaagaattatctaaagaaaatgatgataaattaaaatcaatcttagatgatttggttggaaagtttgcaagtaactaa

SEQ ID NO: 273829 - DNA, 1378 bp, Unknown
  Bacterial polypeptide expressing nucleotide sequence isolated from the Sargasso Sea
atgagcacaggaaatatcgtacaagtaatcggagcggtagtggatgttgagtttccaaaagaagcaataccaagcgtatatgatgcactctcactcaaggacggagatttagtatttgaggtccaacaacaacttggtgacggcatagtcagaaccattgcaatgggagcgagcgagggcttaaagagaggccttgaggttgaaaacacaggcgctccaatcagtgtcccagtaggacaggaaaccctcggacgggttttggatgtccttggtaatccaatcgatgaaaaaggacctgttggcgccaaatcaagcaggccgattcacgcaaaagcaccctcgtttgatgaacaatcaaccgaagccgatgtattagaaacaggaattaaagtcattgaccttctttgcccgtttgcaaaaggtggtaaagtcggtttgtttggcggagctggtgtcggtaaaacagttactgtgatggagcttatcagaaacatcgctgcagaacatgacggcttctcggtttttgctggagtgggagaacgaacaagagaggggaatgatttttaccatgaaatgatggagtcaaacgtcctcgataaagtcgcacttgtatacggacaaatgaatgagcccccaggaaacagactcagagtagcgttgactggactaacgattgctgagaactttagagatgaaggaagagatgtattgatgttcattgacaacatctacagatacacgcttgcaggcacagaggtatcagcattacttggaaggatgccatctgcggttggatatcaaccaaacctcgcagaagagatgggcgtacttcaagaaagaattacctctactaaaacggggtcaatcacatcaattcaagcggtctatgttccagcagatgatttgacagacccttcgccagccacaacatttgcccatctggacgcaaccgttgtattggcaagatcaattgcagagcttggtatttatccagcggttgacccgcttgactcaaacagtcgtcaattagaccctggtattgtgggccaggagcactatgataccgcaaggtcagttcaacaagtcctacagcgctacaaagagttgcaagatatcatagcaatcctcggcatggacgagctttctgaagaggacaagctcaccgttcagagagcaagaaagatccaaaggttcttgtcacaaccattctttgttgccgaggtctttacaggatcaccaggtcagtatgtgtctcttagagattcgatcaaggcgttccaaggaattgttgcaggtgagtatgatgatcttccagagcaagcattctacatggttggcaccattgaagaagcggtagaaaaagcaaaaagtatgtaat

SEQ ID NO: 273830 - DNA, 862 bp, Unknown
  Bacterial polypeptide expressing nucleotide sequence isolated from the Sargasso Sea
atggcaaacgaaaaggaaattcgaacaaaaattgggagtgttaaaaacacccagaaaattacgaaggccatggaaatggttgcggcaagtaagatgcgtagaacacaagaaaccatgaaaaaagcgttgccatatgcagacaaaatcagagctgtgataggacatatctataaagcgaatccggactacaaacacccctttcttgaaaaacgtgaagtcaaaacagccggctacattgttgtcagttctgacagagggctttgtggcggactcaatgtaaacatgttcagaggactaattgccaagctcaaggagaacaatagcaatcagattgactcaaagctttgcctcgttggagcaaaggcggtccagttttttaggtctgtggatgttgatgtcatagcagcagcatcacatcttggcgaagaaccacaagttgaagatttggttggggcaatcaaaaccatgttggatgaatacaatgaaggcaaaatcgaccagctttttatcgtccacaatgattttgtaaacacaatgacacaaaagccagagatcaaaacactgctgccaatagacccagaagatagtgagcaaatgcaagaacattgggattatatttatgagccagactcgaaagagcttttggattatatcttgatgaggtacatcgagtcacaagtctatcgagcagtggttgaaaatgtagcatgtgaaatggcagcaaaaatggttgccatgaaaagtgcaacagacaacgcaggaaaattaatagaccagcttgagcttgattataacaaagcaagacaagcagcaatcacacaagaaatttcagaaatagttggcggcgcagctgcagtttaaa

SEQ ID NO: 273831 - DNA, 1174 bp, Unknown
  Bacterial polypeptide expressing nucleotide sequence isolated from the Sargasso Sea
gatgcaaaaaataaaaccagctgaaatatcagctttacttaaacaacaattagattctgcaaacatccactctgagtttgatgaaataggaacggtcctagaagtaggtgatggaatagcacgagtatatggactatccaatgcagagtatggggaattagtatcatttgaaaatggacttcaagggatggttcttaatctggaagaagatcacgtgggtgttgttttatttggttcatcacgagaaatacaagaaggacaaacggtaaaaagaacaaaacaaatagcatcaataaaagttggagatgggattctaggaagagttgtggacactttgggaaatccaattgatggaaaaggtccaataaaaggagaactatttgaaatgccaatagagagaaaagccccaggggtaatatatagacaaccggttaatgaacccctacaaactggaattaaatcaattgatgctatgatacctattggaagagggcaaagggaattagtaattggagatagacagacaggaaaaactacagtatgtattgatacaattttgaatcaaaaagaattttatgatgcaggggttccagtattttgtatttatgtagctattggacaaaaagcttctactgttgcaggtattacaaaaacactggaagaaaaaggtgctttggcttatacggtagttgtagcagcaaatgcctctgatccagccccaatgcaggtttatgctccatttgcaggagcttgtattggagaatactttagagatacaggaagacctgctttaataatttatgatgatttatcgaaacaggcggttgcatacagagaggtttcattattattaaggagacctcctggaagagaagcatatcctggtgatgtattttaccttcactctaggctattagaaagatcagccaaagttgtagaagacgataaggttgctaaagatatgaatgatcttccagaaacattaaaatctaaagttaaaggcggagggtcattaacagcgctcccaattatagaaactcaagctggagatgtttcagcttatatcccaacaaatgttatctctattactgatggtcaaattttcttagaatctgacttgtttaactctgggggtaggccagcaattaatgttgggatctctgtatcaagagtt

SEQ ID NO: 273832 - DNA, 640 bp, Unknown
  Bacterial polypeptide expressing nucleotide sequence isolated from the Sargasso Sea
ttttatttacacagtagattactcgaaagagcagcaaaattaagcgatgatcatggcgggggctctttaacagctcttccaataattgaaacacaaggtggcgatgtttcggcatttatacccacaaatgttatttcaattacagatggacagatttttttagaaacagaactatttaatcaaggtataagacctgcaatcaatgtaggattatccgtatctagagttggatcatcagcacaaactaaagccatgaaaaaagtatcaggatctatgaaacttgaactagctcaatatagagaaatggcggcttttgcacaatttggatcagatttggatgcttcaactcaaaaacttttaaatagaggttctaaattaactgaattacttaaacaaaaacaatactcaccaatgacagtatcagaacaagtgatttcaatattttgtggagttaaaggtcatttagacgatattgagcaaaaaaatattgctgattttgagaataaaatcatagaaaaatgtaaatccgaaaaacctgaaattttggactcaataaaaacttcaggtaagttagaagaagattttgaaaaatccttaaccgaagctattactgagcttaagaaaaattttaaatcataga

SEQ ID NO: 273833 - DNA, 477 bp, Unknown
  Bacterial polypeptide expressing nucleotide sequence isolated from the Sargasso Sea
tatggcaagtttagacgatttaaaaaaaagaatatcgagtgttaagtctactcaaaagatcacaaaagcaatgaaaatggttgcagcatctaaattaagaagagcccaagaaaatgcagaaaaaggtagaccttactcagataaaatgaacaatattattcttaatctttccaaaagcatctcagacaaagaaaattctcctaaattattgattggatcaggagaagacaaagttcatttatgcgttgttatgacctctgatagaggactttgtggcgggtttaatacaaatataattaaaaaagctaaatcatattttcaaaaaatactagatgaaggaaaaaatttaaaaattattactgtaggatcaaaaggttatgatcaattaaagagagtctataaaaacaatataattgaaaaaatttcatttaaagaatctaaatatactaactattttgatgctgataaagtggaaaa

SEQ ID NO: 273834 - DNA, 948 bp, Unknown
  Bacterial polypeptide expressing nucleotide sequence isolated from the Sargasso Sea
aatggaaataaatccttcagaagtaacaaaaatattaaaagaacagataaaaaaatttggagataaagcagaagtaactgaagtcggacaagttttatccgtaggtgatggtattgcgagaatatacggtctagataatgttcaagcaggagagatggtcgaattttctgacggttcaaaaggtatggctttaaatttagaaagtgacaatgttggcgttgtaatttttggtgacgatagagctgtaaaagaaggtgatacagtaaaaagaacaggagcaattgttgatacccctgtgggaaaagaattattaggaagagtagttgatggattaggaaacccaatagatggcaaaggtgcactagataaaagtattaaaaaaagtagagttgaagttaaagctccaggaataattccaagaaaatctgtaaatgagccaatgcaatcaggacttaaatcagtcgatagtttagttccaattgggagaggtcaaagggaattaataataggtgatagacaaactggaaaaactgcagttgccatcgatactattattaatcagaaaaaaataaatgaatctaatgatgaaaaacaaaagttatattgtatttatgttgcaattggccaaaaaaggtcaactgtaagacaaatagaaaaatctttggaagaagctggagctatggaatatacaactatagttgcagcaacagcatcagatgctgccccacttcaatttttagctccctatactgggtgtgctatgggagaatatttcagagacaatggaatgcatgcattaattatttatgacgatttgtctaagcaagcagttgcatatagacaaatgtcattattattaagaagacctcctggaagagaggcttatcctggagatgttttttatttgcatagtaggcttttagaaagagcggcaaaacttagtgatga

SEQ ID NO: 273835 - DNA, 877 bp, Unknown
  Bacterial polypeptide expressing nucleotide sequence isolated from the Sargasso Sea
tatggcaagtttagacgacctaaaaaagagaataatgagtgtaaaatctactcaaaagattactaaggctatgaaaatggttgcggcagctaaattaaaaagagcacaggagagtgcggaaaaagggcgaccatattctgagaaaatgaacaatataattttgaatttatcacttggtatagcagataaagaaagtgcccctaaactattatctggttcagggaaaaaccaaattcatctgtgcgttgtaatgacttcagatagagggttatgtggtggttttaatgccaacataatcaaaaaggctaaaaattattttagtgatgtgacaaaagagggaaaagaaattaaaattatcactgttggctcaaaaggaaatgatcagttaaaaaggttatatggagataaaataatagaaaatatttcttttaaagagtcaaaaaatgccaattttttcgatgcagaaaaagtaggtaaaattataattgaaaagtttgataaagaggaatttgatatatgtacaattttttttaatcaatttaaaaatgtaattactcaaatacctcaagcccaacaaattattccattaaatgcagttaatgaaaatcaagaaaatctaaatgaaagttatgaatttgaacctgacgaagatgaaattttaaacaatttattgccaaaaaatatttcaacacaaatattcaaagcgatgttagaaaattcagctagcgagcagggtgcaagaatgagcgcaatggacaatgctactcgtaacgcaggtgaaatggttgacaaactcactatagagtataatagaagtcgacaagcggcaattaccaaagaattaatagaaattatatcaggagcagaaagtttatag

SEQ ID NO: 273836 - DNA, 1138 bp, Unknown
  Bacterial polypeptide expressing nucleotide sequence isolated from the Sargasso Sea
atgagcggactaaacccatctgaaatttcaagtgttctcaaggacaaaatttcagggcttgatcttaaggctgaaaccaaaaacgaaggaaccatcgtcaatgtttctgatgggattatcagaatacacggaatgggtgatgttatgtatggtgagctcgtagagtttgaaaatggtgtctttggacttgcgcttaacttagagcaagactctgttggagttgttgtgttgggtgattaccttgggctaagtgaaggacaaaaagttacatgcacaggtaagatcttagaggttcccgtcggcgaggaaatgcttggtcgagttgttgacgccttaggaaatccaatcgatggtaagggcgaacttaaaacaaaacaaaccgctcctattgaagtagttgcaccaggagttattgccaggcaatcagttgatcaaccagtgcaaattgggcttaaatcaatcgacgcaatggttccaataggaagaggtcaaagagagcttattattggtgacagacaaaccggaaaaacagctgtagcaatcgacgcaataattaatcaaaaaggtacaggaattaaatgtatttatgtagctattggtcaaaaacaatcaacaatagctaatgtcgtagcaaaacttgaagagtatggagcaatggagcacacaattgttgtttcagcggcagcagctgatccagctgcgatgcaatacctctcagcatattcaggttgtgcaatgggagaatattttagagacacaggtcaggatgcattaattgtttacgatgatttgtcaaagcaagcagttgcttacagagagatatcactattacttagaaggcctccaggtagagaagctttccccggagatgttttttatcttcactcaagacttttagagagagcagctagagtaaatgcggaatacgtagaaaaaattacagaaggaaaggtaaaaggcaaaacaggatctttaacagccttgcctattattgaaacacaagccggagatgtatctgcttttgttccaaccaatgtaatctcaattactgacgggcagatatttttagaaacggatctttttaattcaggtgtcagaccagctatcgatccaggactttctgtatcaagagttggtg

SEQ ID NO: 273837 - DNA, 276 bp, Unknown
  Bacterial polypeptide expressing nucleotide sequence isolated from the Sargasso Sea
ctattcttggtatggacgagttatctgaagaagataaactagttgtagcaagagctagaaaaatccagagatttttatctcaaccattcttcgttgcagaagtatttactggttctccaggaaaacttgttgatcttgactcaacgatcaaaggttttgatgcaatctgtaaaggtgagtatgatcacttacctgaagctgctttttatatggttggaacaattgaagaagctatagaaaaagctaagaaaatggaacaagaagctgctgcttaat

SEQ ID NO: 273838 - DNA, 762 bp, Unknown
  Bacterial polypeptide expressing nucleotide sequence isolated from the Sargasso Sea
ctgtcgattctcctctattatccaagagagaagtaaagagcatcgatttggtgtgcataactgctgatagaggtttatgcggtggttacaacacaaatataataaaaaaggtagaaataagatatgcagaattactgaaacaggggtttcagccaaatttaattttggttgggaagaaagctattggatattttcaaaatagaaaggatagatatttaattaaaagtactttcaaagaactagaacaggtacccacagtcaaggactctgaaggaattacaaatgagattttagctgaatttctttcagaaaattcagatagggtggaaattatttatacgaaattcatcactctagttagctgtgcccctgtagttcaaacacttttgccacttgacccccaaggaattgctgaggaaaacgatgaaatttttaggttgactacaaaagatagtaagttacttgtagaaaaatcaaatatggaaaaaagtgattctgagaagttgccatcagatattgtttttgaacaaagtcctgatcaactattggtttctttattaccattatatttacagaatcaggtactaagagctcttcaagagtcggcagcttcagaattagcatgcagaatgactgctatgaataatgcgagtgataatgctaaagaattagcaagtactttgaatctaacttataacaaagccagacaagcagctattactcaagaaatattagaagttgtaggaggttcagcagtctagc

SEQ ID NO: 273839 - DNA, 1576 bp, Unknown
  Bacterial polypeptide expressing nucleotide sequence isolated from the Sargasso Sea
aatgcaaaaatttaaaccagctgaagtatcagcattattaaaaaaacaattagattcagcagacattcaatcttcctttgatgaaattggaactgtacttgaggtaggagatggaatagctagggtatatggtctaacaaatgcccaatatggagaacttgttgcttttgaaaatggtctacaagggatggtattaaatcttgaggaggatcatgttggtgttgtattgtttggaccttcaaaagaaattaaggagggagataatgttaagcgtacgaatcaaattgcatcaattaaggtcggggaaggaatattaggaagagttgttgatacacttggaaatcctatagatggtaaaggccctattgaaggagaattatttgatatgccaattgaaagaaaagctccaggtgttatatatcgtcagccagtaaacgagcctttacaaacgggaataaaatcaattgatgctatgatcccaattggaagaggtcaaagagaattagttatcggtgacagacagacaggtaaaacaactgtttgtattgatacaattttaaatcaaaaagagttttatgatgcaggagagcctgttttttgtatttatgttgcgattgggcaaaaagcatcaactgtagcatcaattgctaaaacactagaagataaaggagcacttgcttatacagtaattgttgcagctaacgcatcagatcctgctccaatgcaagtttttgctccattttcaggagcttgtataggggaatattttagagacacgggaagacctgctttaattatttacgatgatttatctaaacaggcagtggcatatagagaggtttcattacttcttagaagacctcctggaagagaggcttatcctggagacgttttttaccttcattcaagattattagagaggtcagctaaagttgtaaacgatgataaggtagcaagtggaatgaacgatttaccagattcattgaaatcaaaagtaaaaggtggaggatcattaacggcattaccaataattgaaacacaagccggagatgtgtcagcctatattccaacaaatgtaatttcaataactgatggtcaaatatttttggagtcagacttatttaactcaggtgtaagacctgcaattaatgttggaatatctgtatcaagagttggaggttctgctcaaattaaatcaatgaaaaaggttgcaggtacattaaaattagaccaagcacaatatagagaacttgaagcattttctaagtttggttcagatctagatgcagcaactctaaacgttattgaaaaaggtagaagaaatgttgaaatccttaaacaaaatcagaatgatccattccaagtggaagaccaagtagcaataatatatgcaggatctcaaaaccttcttaaagatgtgccagttgaaaaagtcaaggcttttgaagagacattcctacaggaacttagaaaaaatcataagaaacttttaagtgaattaaaagctggaaaaatttcagataaagaaactgatgagattaaaaaagtagctgagaaaattgcaaaatctttttaa

SEQ ID NO: 273840 - DNA, 883 bp, Unknown
  Bacterial polypeptide expressing nucleotide sequence isolated from the Sargasso Sea
aatgcctagtttagatgatttaagaaaaaggatttcgagcgttaagtctactcaaaaaataacaaaagctatgaaaatggtagctgcggctaaacttcgtaaagcacaggaaatggcagagaaaggtaggccttatagtgataaaatggatactataattcaaaatttaagcaaatcaatcaatgacccctccaatgcacctaggcttttagttgggacaggtgacagcaaaactcatttatgcattgtaatgactgctgacagagggctttgtggaggttttaatacgaatatttgtaaattagccaaaaatcgatttaaaaaaattttacaatcatcaaaaaatctcaaaattattaccgtaggttcaaaaggacttgaccagcttaaaagagattatagcaaacacattataaaaaaaattaattttaaggataaaaaacaattatctttcgaggatgctgacataattggaaaagagattgtagaattgtttaaaaataatgagtttgatacatgtacaattttttacaataaatttaagaatgtaatgactcaaatacctcaagcacaacaaataattccaacaaaaagacaagaagtgtcaaaacaaaaaaatgaagaattttcatcttatgaatttgaacctgaagaggacgagatattggatgatttattaccaaaaaatatatcaactcaaatatataaaggttttcttgaaaattcagctagcgaacaaggatcaagaatgactgctatggataatgcgacaagaaacgcaggagatttagttgaaaaattaacaataaattacaataggagtagacaggcggctataacaaaagaattgattgaaataatatcgggggcagaaagtttataa

SEQ ID NO: 273841 - DNA, 1543 bp, Unknown
  Bacterial polypeptide expressing nucleotide sequence isolated from the Sargasso Sea
aatgcaactcaatccctctgagatcagcgagctgatcaagagccggatccagggccttgaagcgagcgcagacgttcgcaaccagggcaccgtgatctccgtgaccgacggtatcgtgcgtatccacggcctgtcggacgtgatgcagggcgaaatgctcgagtttccgggcaacacgttcggcctcgcgctgaacctcgagcgcgactcggtcggcgcggtgattctcggcgaatacgaacacatctcggaaggcgacatcgtcaagacgacggggcgcattctcgaagtcccggttggcccggaactcgtcggccgcgtggtcgacgcgctcggcaacccgatcgacggcaagggcccggtcaacgcgaagctgaccgacgcgatcgaaaagatcgccccgggcgtgatctggcgtaagtcggtgtcgcagccggtgcagacgggcatcaagtcgatcgacgcaatggtgccgatcggccgtggccagcgtgagctgatcatcggcgaccgtcagtgcggcaagaccgcggtggcgctcgacgcgatcatcaaccagaagggcaaggacctgatctgtatctacgtcgcgatcggccagaaggcttcgtcgatcatgaacgtggttcgcaagctcgaagaaacgggcgcgatggaatacacgatcgtcgtcgccgcttcggcttcggattcggcagcgatgcagtacctcgcaccgtacgccggctgcacgatgggcgaatacttccgcgaccgcggtcaagatgcgctgatcatctatgacgacttgaccaagcaagcgtgggcataccgtcagatctcgctgctgctgcgccgcccgccgggccgtgaagcgtacccgggtgacgtgttctatctccactcgcgtctgctcgagcgtgctgctcgcgtgtcggaagagtacgtcgagaagttcacgaacggcgaagtgaagggcaagagcggttcgctgacggcactgccggtcatcgaaacgcaggctggcgacgtgaccgcgttcgttccgacgaacgtgatctcgattaccgacggccagatcttcctggaaaccgacctgttcaacgcaggcatccgcccggcaatcaacgccggcgtgtcggtgtcgcgagtcggtggcgccgctcagacgaaggtcgtgaagaagctgtcgggcggtatccgtaccgacctcgcgcagtaccgtgaactggccgcattcgcgcagttcgcatcggacctcgacgaagcgacccgcaagcagctcgagcgcggccgccgcgtgacggaactgctgaagcagccgcagtaccagccgctgcaggtgtgggaactggccgtgtcgctgtacgccgcaaacaacggctacctcgacgacctcgacgtcaagcaagtgctgtcgttcgagaagggcctgcgcgaaaacctgaagaccagccacgctgacctcatcaagcgcatcgaagacaccaaggatctctcgaaggacgacgaaggcgcactgcgctcggcgatcgaatccttcaagaagtccggtgcctattga

SEQ ID NO: 273842 - DNA, 727 bp, Unknown
  Bacterial polypeptide expressing nucleotide sequence isolated from the Sargasso Sea
aatgttttttaattccttgctaacaaattttgcagcattagaagttggtcaacatctttattggcaaattggaaatatcagacttcatgggcaggtatttttaacatcttggattttattaggagcgttattagtttttatttctttaggaactaaaaaaatggaaaatgatcctaaaggccttcaaaacctgcttgagttcctctgggattacataagagatcttgctaggacgcaaataggtgaaaaagtatatagagattggatgccatttataggtactttatttttattcgtctttgttagtaattggggaggagctttaattccttggagattgattaagttaccaagtggagaattaggagcacctactgcagatattaatacaactatagccttggctttattggtttcactttcttatttctatgcaggtttaagcaataagggttggagatacttcgaatattatgttcacccaactcctattatgcttcctttcaaaattctagaggactttacgaaacctttatcactctctttcaggctatttggaaatattttggctgatgaacttgttgttggtgttctagtctttttagttccgctaattctcccaatacctgttatgttcctaggattatttactagtgcaattcaggcattgatttttgcaactctagcggcctactacattggagaagctgttgaagaacatcattag

SEQ ID NO: 273843 - DNA, 254 bp, Unknown
  Bacterial polypeptide expressing nucleotide sequence isolated from the Sargasso Sea
catggtatctatacgccctgatgaaatcagttcaatcttaaaacaacaaataactgattatgaccaatctgtaagtgttagcaatgtaggaactgttctgcaaatcggtgatggcattgcaagaatatatggcttagatcaggtcatggcaggtgaattattggaatttgaggatggcaccgaaggtatagctttaaatcttgaagatgataatgttggagccgttttaatgggagaggcacttggtgtcaaag

SEQ ID NO: 273844 - DNA, 1537 bp, Unknown
  Bacterial polypeptide expressing nucleotide sequence isolated from the Sargasso Sea
aatggaaataaatccctcagaagtcactaagatattaaaagaacaaattaaaaaatatggggacaaagcagaaatctctgaagttggccaagttctttcggttggagatggtatagcaagaatttatggattagataatgtacaagctggtgaaatggttgagttttcagatggatctaagggaatggctcttaacttggaaagtgataatgttggtgtagtaatatttggagatgatagggctgttaaagaaggtgatacagtcaaaagaactggtgcaattgttgatactccagtaggtaaagagcttttaggaagagtagttgatggattgggaaatccaattgatggaaaaggcaacttagataaaggagttaaaagaagcagagttgaagttaaggctccaggaattattccccgtaagtcagtgagtgaaccaatgcaaactggattaaaatctattgatagtctcgtcccgataggtagaggacaaagagagttgataattggtgatcgacaaactggtaaaacagctgttgcaatagatgccataatcaatcaaaaaaaaataaatgaatccgacaatgaaaaagaaaaactttattgtatttacgttgctataggtcaaaaaagatcaactgtaaggcagattgaaaaaacattagaggaagcaggtgccatggagtatacaacaattgttgctgcaactgcttctgatgctgccccccttcaatttctagctccttatacaggttgcgctatgggtgaatattttagagacaatggtatgcatgccttgataatttatgatgatctttcaaaacaggcagttgcttatagacaaatgtcacttttattaagaagacctccaggtcgagaggcttatccaggtgatgtattttatttacacagcagattgcttgagagagctgcaaaattaagtgacgaacatggaggaggttctttaactgctcttccaattatagaaactcaaggaggtgacgtatcagcatttataccaactaacgtaatttcaattacagatggtcaaatatttttagaaacggaattatttaaccaaggaataagacctgcaattaatgtaggactatctgtatcaagagtaggatcctctgctcagactaaggcgatgaaaaaagtttctgggtcaatgaaacttgaacttgctcaatatagagaaatggcagcttttgcacaatttggatctgacctagatgcttcaactcaaaaacttttaaacagagggtctaaactgactgaattgttaaaacaaaagcagtattctccaatgactgttgctgaacaggtaatttcggtttactgcggagtaaaaggatatcttgatgacatagatcaaaaagatattgctgaatttgaaaataaaattatcgaaaagtgtaaatctcaaaaacctgagattttagactctataaaaagttcaggaaaactcgaggatgacatagaaaagttgttaaatgaagttattactgaacttaaacaaaattttaaagcatag

SEQ ID NO: 273845 - DNA, 214 bp, Unknown
  Bacterial polypeptide expressing nucleotide sequence isolated from the Sargasso Sea
ccgggctagaaaagtccaaagattcctgtctcagcccttctttgttgcagaaaccttcacgggaacttcaggtgagtatgtcgacatcaaggaaaccatccgaggatttcgtgaaatcctcgacggaaagcatgacgaacttccggagcaagccttctatatggtaggaaccatcgagcaggtcctggaaaaagccagtaaaatggcatcatga

SEQ ID NO: 273846 - DNA, 761 bp, Unknown
  Bacterial polypeptide expressing nucleotide sequence isolated from the Sargasso Sea
aatgagcacaggcaagatcgtacaggtaatgggaccggttgttgatgtggaattcgaaacagaggatcttcctcaaattttctcagcacttgaaatcaaactggacggagactctaaactaatttgcgaagtacagcaacatctcggcgaaagtactgtacgcacagtatcaatgggatcaacagacggtctttatcgaggaatggatgtaaaggatttaggtgaaactatatctacacctgtcggtaagggtgtacttggcagaattataaatgttacaggagatccagttgatgaagccggaccgataaaaacagacaaacgctggtcaatccaccgtgacgccccgacatttgctgaccaagaaacagatgcacaaatgttggtcactggagtaaaggttatggacctcctttgtcccttccttaaaggaggcaaaattggattgttcggtggggcaggggttggaaaaacagttgtgatcatggagctgatccgaaacattgctgcagaacatggtggcttctcggtttttgctggagtaggtgaacgtacacgtgaaggaaatgatctctggaatgaaatgaaggaatccggggtgctggacaaaacaagccttgtatatggtcaaatgaatgagcctccaggtgcccgtgcccgggtagccctgactggcttaaccgttgcagaatattttcgtgatgaagaggccgcagacgttctgatgttcatagataatattttccgatttactcaggcag

SEQ ID NO: 273847 - DNA, 799 bp, Unknown
  Bacterial polypeptide expressing nucleotide sequence isolated from the Sargasso Sea
catgaaaatggtttctgctgcaaaactaagacgtgcggaagaccacatacgggaagcgacaccctatgcacaaaagctgaaaagcattgtctcatcactcagtacacgttttgaaggcgaagagcaggataaaggctttggcagtctcttccggaattccagcggaaaaagaaccggtgttattttagttactagcgaccgtggactttgcggaggattcaattcaaatctttctaaggctttacttcaacaacttattgatgaaggagtggaatgtgctgagtttgcaatctttggacgaaaaggaaatgattttttcaaaagaactccgcataaaattcttgtcaatcattcaggaactcctccagatcaacatcttaacctggtcaatgaagttgtgggagactttactcagcgatttgagaatggtgaactagatcaggtgctcctcgcatacaatcattttgtaagtgtgatttctcagattccggtgattgaaccgcttctaccgatcaaacctatagaaacagaaaccgttgataaacgcgaaatattgtttgaaccctcaccggaagaaatactacaaactcttttgaaaaaatatgttcaaaaccaagtttacgtttcctggcttgatacaattgcaggagagcacgcggctcgtatgacttcaatggacgcagccacaaaaaatgctggagaaattattgataagctccagctacattataacaggacaaggcaggcagcaatcacaggcgaactgattgaaatcataagtggcgcagaaagtttataa

SEQ ID NO: 273848 - DNA, 1420 bp, Unknown
  Bacterial polypeptide expressing nucleotide sequence isolated from the Sargasso Sea
atgagcaaaggaataattacacaagttattggagcagtagtagacgtaaaatttgaaaaagaacttccagaaattttaacagcactagaatgtaaaaatggagataacaggctagttttagaagtagctcaacatttaggagagtctactgttagaacaatcgcaatggatgctaccgaaggattaaaaagaggggatgaagtaactaatactaatgcccctatacaagtacctgttggacctgaaacactaggaagaattattaacgtaattggagaaccaattgacgaaaaaggtgaagttaaaactaaagaaagttggcctatacatagacctgcaccagagtttaatgatcagtcaaccgaaacagaaatacttgttacaggtataaaagtaattgatttattagcaccctatgcaaaaggcggaaaaattggattatttggtggagctggagttggaaaaacagttttaattatggaattaatcaataacgttgcaaaagcacatggtgggttttcagtttttgcaggtgttggagaaagaactagagaaggaaatgatctttaccacgaaatgatggaatctggtgtgattaaaccagatggtccaggatcaaaagcggcactagtttatggacaaatgaatgaaccgccaggtgcaagagctagagttgctcttactggattgactgtagcagaatattttagagatcaagaaggacaagacgttctttttttcgtagataatatttttagatttactcaagcaggttctgaggtatcagctcttttaggaagaataccttccgctgttggttatcaacctacattagctaccgatatgggcaatcttcaagaaagaattactacaactaacaaaggatcaattacttctgtacaagcaatttatgtacctgctgacgatttaactgacccagcaccagctacatcatttgctcacctggatgcaactacagttctttctagacaaattgcagaaataggaatttatccagcggtagatcctttagactcaacatcaagaattttagatcctagaattgtaggtgatgaacattatagagtagctagagaagttcaaaaaatcttacaaacctataaatctcttcaagatattattgccattttaggtatggatgagttatctgaagaagataaattggtagtagcaagagctagaaaaatacaaagatttttatctcaaccatttttcgttgctgaagtatttacaggatcaccaggtaaactggttgatctagattcaacaataaaaggttttgctgcaatttgtaaaggcgattatgaccatttgcctgaagcagctttttatatggtaggaacgattgaagaagcaattgaaaaaggtgaaaaaatggagaaagaagctgccgcttaat

SEQ ID NO: 273849 - DNA, 1312 bp, Unknown
  Bacterial polypeptide expressing nucleotide sequence isolated from the Sargasso Sea
tatgagccaattaaatccatcagaaatttccagcgttctaaaagagaaaattgctggccttgatctatcagctgaaagaaaaaatgaaggcatagttgtaagtgtctcagacggtattgtaagaattcatggtatgggtgacgtcatgtatggtgaggttattgaatttgaaaatggcacaaaaggaatggcacttaacttagaacaagattctgttggtgcagttgttcttggtgattatcttgaaattattgaaggtcaaaaagctgtttgtactggaaaagttttagaggtgcctgttggggaggcaatgcttggtagagttgtaaatacattgggtgcacctattgacggtaagggtgaaattaatgctgaacactcttcaccagttgaggttgttgctcctggagttattgcacgtcagtcagtagatcaacccgttcaaattggcttaaaagctgttgatgctatggttccaataggaagaggccaaagggaattaattattggtgatagacaaactggtaaaacagctgttgcaattgacgcaatcattaatcaaaaaggcacgggtattaaatgtatttatgttgctattggtcaaaaacaatcaactgttgctaatgttgttagaaaactagaggaacatggagccatggaacacaccattgttgtttcagccacagctgcagatccagcacctatgcaatatctatcagcctatgctggatgcacaatgggagaatattttagagataaaggggaagatgctctaatagtatacgatgacctatcaaaacaagctgttgcatatagacaggtatcattgcttcttaaaaggcctccagggagagaagcatatcctggcgatgtgttctatcttcactcaagattgcttgagagggctgcgagagtaaatgccgactatgttgagcaagttactggtggtaaagttaaaggtaaaacaggctcattaactgcattgccgattattgaaactttggctggagacgtttcagcctttgttccaaccaatgtaatttctattacagacggacaaatatatttagaaacagaattatttaattcaggtgtaagacctgcaattaacccgggtttatccgtatcaagggttggcggatcagcgcaaacgaaaattatgaaaaaattagctggtggtgtgagaactgcgttagctcaatatcgtgaattagctgcattctctcagtttgcttctgatttagacgatgctaccaaacagcaacttgcaaatggtaaagcttttacagaacttctaaaacaaaaacaatag

SEQ ID NO: 273850 - DNA, 846 bp, Unknown
  Bacterial polypeptide expressing nucleotide sequence isolated from the Sargasso Sea
atgaaatgatagagtctggtgtaattaaaactgatggcaagggttcaaaagcagctttagtttatggacaaatgaacgagccaccaggagcaagagctcgagtagctctaactggattaactgtagctgaatattttagagataaagagggacaagatgtgcttttcttcgttgataatatctttagatttactcaggcaggatcagaggtttcagctttattgggaagaattccttcggctgttggttatcaaccaactttagcgacagatatgggtaatttacaagaaaggattacatcaacagataaaggttctattacatcagtacaggcgatttatgtacctgcagatgatttaaccgatcctgcacctgcaacatctttttcgcatttagatgcaactacagtgctatcgagacaaattgcagaaattggtatttatcctgctgtggatccattagactctacttctagaatattagatccaagaatagtaggagaggagcattacagagttgctagagacgttcaaagaattttacaagcttacaaatctctccaagacataatagcaatacttggtatggatgaactttcagaagaagataaattgacagttgcaagagctagaaaaatacaaagatttttatcacaaccattttttgttgctgaggtatttacaggctcccctggtaaattagtagatttagattctaccataaaaggatttgatgcaatttgtaaaggtgaatacgatcatttacctgaggctgcattttacatggttggcggtatagaagaagttcaggaaaaggctgataaattaaccaaagatagtaaatagt

SEQ ID NO: 273851 - DNA, 1420 bp, Unknown
  Bacterial polypeptide expressing nucleotide sequence isolated from the Sargasso Sea
tatgagaaaaggaaaaattacacaaattattggagcggtagtagatgtaaaatttgatggagaacttccagaaatattaactgcattagaatgtgataatggtggtaatagacttgttttagaagttgcacaacacttaggagagtctagcgtaagaactattgctatggacgcaacagaaggcttaaaaagaggtgatgaagttattgatacaggtgctcctattaaagttccagtcggacctgaaactttaggaagaattataaatgtcataggtgaaccaattgatgaaaaaggtatcgttaaatctaaagaaaattggcctattcacagagctgctccagaatttaatgatcaatcaactgaaactgaaattctagtaactggaattaaagttgttgatttattagctccatacgcaaaagggggaaaaattggattatttggaggtgcaggtgttggtaaaacagttcttattatggaattaataaataatgttgctaaagcacatggaggtttttcagttttcgctggagttggagaaagaacaagagaaggaaatgatctctaccatgagatgattgagtcaggagtaattaaaccagatggaacaggttcaaaagctgccttggtatatggtcagatgaacgaacctcctggagcaagagcaagagttgctctttcaggtttaacggttgcagaatattttagagaccaggaaggccaagacgtactattttttgttgataatatatttagatttacacaagctggatcagaggtttcagcattattaggaagaattccatctgctgttggatatcaacctaccttagcaacggatatgggaaatcttcaagaaagaattactacaacaaacaaaggatctataacatctgttcaagcgatttatgttcctgcagatgatttaacagatccagctccagcaacatctttttcacatttagatgcaacaacagtcttatcgagacaaattgctgaaattggaatttatccagctgtagatccactagattcaacttctagaatattagatccaagaattgttggtgatgaacattatagagtagctagagaagtgcaaaaaattttacaaacttacaaatctttacaagatataattgccattttaggtatggacgagttatcagaagaagataaattagtcgttgctagagcaagaaaaattcaaagatttttgtctcaacccttttttgtagctgaagtatttactggttccccaggcaaacttgtagatttagaatcaacaatcaaaggttttgatgctatatgcaagggagattacgaccatttgccagaggcagcattttatatggtaggtactatagaagaagctattgaaaaagctgaaaaaatggcaaaagaagcagccgcataa

SEQ ID NO: 273852 - DNA, 1531 bp, Unknown
  Bacterial polypeptide expressing nucleotide sequence isolated from the Sargasso Sea
ataaatccttctgaagtaacaaaaattcttaaagaacaaattaaaaaatttggagataaaacagaagtttcagaggttggacaagttctttccgtaggagatggtattgctagaatatatggtttagacaatgttcaagcaggagaaatggtagaattttctgacggatcaaaaggcatggctctaaatctagaaagtgataatgtaggagttgtaatatttggtgatgacaaagccgttaaagagggtgataatgtcaagagaacaggtgcaattgttgacactccagtcggtaaagaattattaggaagagtagttgatggattaggaaacccaatcgatggaaaaggagcattagataaaggagctaaaagaagcagggttgaggtaaaagctccaggtataattccacgtaaatcagtaagcgaacctatgcagacaggacttaaatctattgatagtttggttccaatcggtagaggccaaagagaattgattattggtgataggcaaactgggaaaactgctgttgcgatagatgcaatcataaaccagaaaaaaattaatgagtctaatgacgaaaaacaaaaattatattgtgtttatgtagcaataggtcaaaaaagatctactgtcagacaaattgaaaagactttagaagaagctggtgcaatggaatatactaccattgttgctgcaactgcgtctgatgcagcacctcttcagtttttagcgccatatactggttgtgcaatgggagaatattttagagataatggtatgcatgctttaatcatttatgatgatctatcaaaacaggctgtagcatatagacaaatgtcacttttattaagaagacctcctggtagagaggcatatccaggagatgtattttacttacatagtagattgcttgagagagcagcaaaacttggtgacgagcatggcggaggttctttgactgctttaccaataatagaaacacaaggaggtgacgtctctgcatttatacctacaaacgtaatatctattactgatggtcaaatatttttggaaacagaattatttaatcagggaattagaccagcaataaatgtaggattatcagtttcaagagttggatcatctgcacaaacaaaagcaatgaaaaaagtttctggatccatgaaacttgaacttgctcaatatagagagatggctgcatttgctcaatttggatctgatttagatgcctcaactcaaaaattgttaaatagaggttcaaaattaactgaactattaaaacaaaaacaatattcacctatgacagtagcagaacaagtaatttcagtttactgtggtgtaaaaggacatttagacgatattgagcaaaaaaatattgcagaatttgagaaaaaaataatagacaagtgtaagtctgaaaaaccagaaatattagactctataaagagctctggaaagcttgaggaaaatatagagaaattattaactgagattataactgaactaaaaaaaaactttaaatcttaaa

SEQ ID NO: 273853 - DNA, 880 bp, Unknown
  Bacterial polypeptide expressing nucleotide sequence isolated from the Sargasso Sea
aatggcaagtttagacgaattaaaaaaaaggatatcaagtgtaaagtctacacaaaaaatcacaaaagcaatgaaaatggtagcagcagctaaattacgaagagcacaagagagcgccgaaaaaggaagaccttactctgataagatgaataatattattcttaatctttctaataatgttacagacatagaaaattctccaaggttattagcaggtactggcgaaagtaaagtttatttatgtgttgttatgacttctgacaggggactttgtggaggttttaatacgaatataataaagaaagccaaatcatattttcaaaaaattactagtgagggaaaaactttaaaaattattactgttggatcgaaaggatatgaccaattaaaaagggtttataaagataatataattgagaaaatttcatttaaagaatcaaaaaatgctaattattatgatgctgataaagttggtaaaattattatcaataaatttgaaaaaaaagaatttgatgtttgtacaattttttataatcaatttaaaaacgtaataactcaaatacctcaagaacagcaaattattcctttgaaatcgtccaaaagagtagaagagaattcagcccaagacaattatgagtttgaacctgaagaagatgaaattttaaataatttattacctaaaaatatttcaactcaaatttttaaagcaatgttggaaaattcagctagcgaacaaggttctaggatgagtgcaatggataatgcaactagaaatgctggtgagatggttgataggctcacaattgaatacaacagaagccgtcaagcagcaataactaaagaactaattgaaattatatcaggagcagaaagtttataa

SEQ ID NO: 273854 - DNA, 1294 bp, Unknown
  Bacterial polypeptide expressing nucleotide sequence isolated from the Sargasso Sea
caccgacggtttaaccagaggcatagatgttggtgatagcggatccccgatttcagtgccagttggtcaagaaacgcttggacgcctctttgatgttttagggaatgttattgatggaaaaggagatttaaaaactgataaaaagaatcctatccataggccggcaccaaaacatgaagagctagctacatcaacagaaattcttgtaacaggaattaaggttgtcgacttaatggagccttatactaagggtggaaagactggtctttttggaggagcaggtgttggtaaaaccgttttaattcaagaattgattcgcaatattgcaaccgagcatggaggctactcagtttttgctggagttggtgaaagaactcgcgaaggaaatgatttatataatgaaatgacagaatcaggcgtaattgataaaactaccatggtattcggtcaaatgaacgaacctcccggtgctagattaagagtggctttaagtggacttgcaatggcagagtttttcagagatgatgaagggagagatgttctactatttgttgataatatatttagatttactcaggcaggttcagaagtctctgcgcttcttggaagaatgccctctgctgttgggtatcagccaactttatcaactgagatgggcgaacttcaagaaagaattacttcaactaaaaagggctcaatcacatctgtgcaagcggtatatgttccagcagatgatttaacagatcctgctcccgctactgcttttgctcacctggatgctacatctgttcttgaaaggaaaattgcagaattaggtatatatccagcagttgaccctttggcatctacatctagaattctggaccctaggattataggagacaggcattatagtgtagcgaggaatgttcaaggtgtcctccaaaaatatagagatttgcaagacattattgcaatcctaggtatggatgagctttcagatgaagacaagttaacagtttcaagagcaagaaaaattcaaaaattcttttcacagccattttttgttgctgagcaatttactgggacacccggacgctatgttgagctcgaagataccgtttcaggatttgaagcaatcttaaatggtgaagctgatgaaataccagaaaatgcattttcatatgttggatcgattgatgaagcctttgataaaagtaaagatgtaaaatcagataaatctaaagataatccaaaacaagaagaatattcgattgaggaagatagcgttccagccgaagaaagcacagaataa

SEQ ID NO: 273855 - DNA, 715 bp, Unknown
  Bacterial polypeptide expressing nucleotide sequence isolated from the Sargasso Sea
atggaaattaatccgtctgaagtaacaaagatattaaaagaacaaatcaaaaattttggagaaaaagccgaaatctctgaagtaggacaagttttgtctgtaggtgatgggatagcaagaatttatggtttagataatgttcaagctggagagatggttgaattttcagatggctccaaagggatggctttaaatttagagagtgaaaatgttggagtagttatttttggagacgaccgaaatattaaagaaggagatgttgtaaaaagaacaggaagcattgttgatacgccagtcggaaaagagttattaggaagggttgttgatggattaggaaatccaatcgatggcaaaggtgcactagataaaggagttaagaaaagtagagttgaagttaaagctcctggaatcattccaagacaatcagttagcgaaccaatgcaaacaggattaaaatcaattgacagtctcgtcccgattggaagaggtcaaagagaattgattattggagacagacaaactggaaaaactgcagtggcaattgatgccataataaatcaaaaaaagataaatgagtcgggtgatgagaaacaaaagctatattgcatttatgttgcagttggacaaaaaagatcaacagtaaggcaaattcaaaaaactttagaagaagccggtgcaatggaatacactactattgtggctgcaacagcatcgg

SEQ ID NO: 273856 - DNA, 298 bp, Unknown
  Bacterial polypeptide expressing nucleotide sequence isolated from the Sargasso Sea
tatggcaagtttagacgaccttaaaaaaagaatagctagtgtaaaatctactcagaaaattacaaaagcaatgaaaatggtggctgcagcaaaacttaaaagagctcaagaaagtgctgaaaaaggaagaccatattctgaaaaaatgaataacgtcattttaaatttgtctaacggcatctcagataaagaaaatgctccaaaattactttcgggaactggaaaagataaaacgcatctttgtgttgttatgacatctgacagaggtttatgtggtggatttaattcaaacataata

SEQ ID NO: 273857 - DNA, 1537 bp, Unknown
  Bacterial polypeptide expressing nucleotide sequence isolated from the Sargasso Sea
atggaaataaatccttcagaagttacaaagatactaaaagagcaaattaaaaattttggcgataaagcagaaattacagaagttggacaagtattatcagttggtgatggtattgctagaatttatggacttgataatgttcaagctggtgaaatggttgaattttccgatggttctaaaggtatggctctaaatttggaaagtgaaaatgttggagttgtaatttttggtgatgatagaaatattaaagaaggagatattgtaaaaagaactggagatattgttgatactccagttggaaaagaattacttggtagagttgttgatggactaggaaatccaattgatggtaagagtgcattagataaaagtgttaaaaaaagtagagtagaagttaaagcaccaggtattattccaagacaatcagttagtgagccgatgcaaacaggtttaaaatcaattgatagcttggttccaattggaagaggccagagggaattaattattggtgatagacaaacaggaaaaactgcagttgcaattgatgctataattaatcaaaaaaaaattaatgaatctggtgatgaaaaacagaaactctattgtatttatgttgctgttggacaaaagagatcaacagtaagacaaattcaaaaaacattagaagaagctggtgcaatggaatacacgacaattgttgcagcaacagcatctgactctgctcctcttcaatttttagcaccctatacaggatgtgcgatgggagagttttttagagataatgggatgcatgcattaattatatatgatgatttgtcaaaacaggcagttgcttatagacaaatgtctttacttttaagaagacctccagggcgtgaagcatacccaggtgatgtattttacttacacagcagattgcttgaaagagccgctaaattaagcgatgaacatggtggaggttctttaactgcgcttccaattattgagacacaaggtggtgacgtttctgcatttattcctactaatgtgatttcaattactgatggtcaaatattcttaggaacagagctttttaatcagggtattagacctgcaattaacgttggattatctgtttctagggttggatcttctgcacagactaaagctatgaaaaaagtttctggatcaatgaagttagaattggcccaatatagagagatggctgcttttgctcaatttggatctgacttagatgcatcaacacagcaacttttaaacagaggctctaagttgacagagcttttaaaacaaaaacagtattctccaatgactgtggctgaacaagttatttctgttttttgtggagtaaaaggatatttggatgatattgaattaaaagatatttctgattttgaaagcaaaataattgagaaatgcaaatcagaaaaagctgaaattattgattctattttagcctcaggtaaacttgaggatgacaaagagaagttattggttgaagtaataactcaattgaaagaaaactttaaatcttaat

SEQ ID NO: 273858 - DNA, 322 bp, Unknown
  Bacterial polypeptide expressing nucleotide sequence isolated from the Sargasso Sea
aagttcaaaaaagttttacaaacttacaaatctctcaaagacattatagcaattttaggaatggatgaactttctgaggaggacaaactcacagtcgcaagagcacgaaaaatacaaagatttctatctcaaccattttttgttgcagaggtttttactggatcacctggtaaacttgttgatcttcaggcaacaataaaaggttttgatgcaatttgtaaaggtgaatatgatcacttgcctgaggcagcattttatatggttggaactatcgaggaagcaatcgagaaggctgaaaaaatggcaaaagatgcggcgtaat

SEQ ID NO: 273859 - DNA, 850 bp, Unknown
  Bacterial polypeptide expressing nucleotide sequence isolated from the Sargasso Sea
atgtcaaaaaatataggtaaagtttcaaaagtaattggagctgttgttgatgttgaattctcatcaaaagaaagtacactgcctgagatatatgactcacttgagattaaaagagaagatggtactatcttagttcttgaggttcaatctcacataggtgaaaatattgttagaacaatatcaatggattcaactgatggactcagcagaggtacagaagctgtagcaacaggtaacccaatacaaatgccaattggtaaagaagtttatggaagactttttaatgttgttggcgacccaattgatggtcttgaagtattgcctaaaattaatgatgacgggatgtctatccataggcaagctcctgactttgatcaactatcaacatctactgaagttttgtttacaggaataaaagttattgatcttattgagccatatgctaaaggtggtaagattggattatttggtggagctggagtaggtaaaacagtactaattcaggaactaataaataacatcgcaaagggtcatggaggtctttctgtatttgcaggagttggtgagcgaactagagaaggtaatgacctattgagagagatgatagaatcaggaattataaattatggtgatgattttaaaaagtctatggaagcaggtgaatgggatttaagtaaagttgataaaaaggcattactagagtcaaaagctacctttgtgtttgggcaaatgaatgagcctcctggagctagagctagggttgcactatctggactaactgttgctgaatattttagagatggaggagctgatggtcaaggaaaagatgtcttattctttgttgataata

SEQ ID NO: 273860 - DNA, 433 bp, Unknown
  Bacterial polypeptide expressing nucleotide sequence isolated from the Sargasso Sea
aatgcaaataaatccctcagaagttactaaattactaaaagagcaaataaaacgttttggtgaaaaagctgaagtatctgaaataggaaaagtactttcagttggtgatggtatcgctagagtttatggactagataacgttcaggctggtgagatggtagagtttgacgatgggtctaaaggtatggctcttaatttagaaaatgacaatgttggcgtagtaatattcggagatgatagacaaattaaagaaggcgacactgtaaaaagaactaactcaattgtagatgtacctgttggtaaggaattgttgggaagagtggtcgatggacttggaaatccaatagatggaaaaggcaatcttccaactaagacccaaagaaaaagagtagaagttaaagcccccagggattattccaagacaatcagttaa

SEQ ID NO: 273861 - DNA, 1369 bp, Unknown
  Bacterial polypeptide expressing nucleotide sequence isolated from the Sargasso Sea
aatggaaataaatccttcggaagtaacaaaaatattaaaagagcagattaaaaaatttggagataaggcagaagtaactgaagttggacaggttttatctgttggagatggtatcgcgagaatatatggtttagataatgttcaagcaggagagatggttgaattttctgatggctcaaaaggcatggctttaaacttagaaagtgacaatgttggtgttgtaatttttggtgatgatagagctgtaaaagaaggtgatacagtaaaaagaacaggagcaattgtagatacacctgtagggaaagaattattaggaagagtagttgatggattaggaaatccaatagacggcaaaggtgcgttagataaaggtataaaaagaagcagagttgaagttaaagctccaggaataattccaagaaaatctgtaaatgaaccaatgcaatcaggacttaaatcagttgatagtttagttccaattggaagaggtcaaagagaattaattataggtgatagacaaacaggaaaaactgcagttgcaattgatactataattaatcagaaaaaaataaatgagtctaacgatgaaaaacaaaaattatattgtatttatgtagcaattggtcaaaaaagatcaactgtaagacaaatagaaaaatctttagaagaggcaggagctatggaatatactactatagttgcggcaacagcatcagatgcagcaccacttcaatttttagctccctatactggatgtgcaatgggagaatattttagagacaacggaatgcatgctttgattatttacgatgatttgtctaagcaagcagttgcatatagacaaatgtcattattgttaagaagaccccctggaagggaagcttatccaggagatgttttttatttacatagtagacttctagaaagagcagccaaacttagcgatgaacatggaggtggatctttaacagcgctcccaattattgaaacacaaggtggtgatgtatctgcttttattcctaccaatgtaatttcaattacagatggacaaatatttcttgaaacaaatttgtttaatcagggtattagaccagcaattaacgttggtttatctgtatctagagttggatcttcagcgcaaacaaaagcaatgaaaaaagtttctggttcaatgaaattagaattggcacaatatagagaaatggcagcatttgctcaatttggttcagatttagatgcctcaacccaaaaattattaaatagaggttcaaagttaacagagcttttgaaacaaaaacaatattcaccaatgacggttgcggaacaagtaatatcagttttttgtggtgttaaaggaatatttagatga

SEQ ID NO: 273862 - DNA, 424 bp, Unknown
  Bacterial polypeptide expressing nucleotide sequence isolated from the Sargasso Sea
tatggcagctatgactgtacatcttgacgtagtaagcgcagagcagaacttgttttctggtttggttgaatcgattcaagtatctggtagtgaaggtgagcttggtgttaatgccggtcacgcgccactactaactgcccttaaacctggtatggtgcgtttagttaagcaatttggtgaagaagaactcatctatattgctggcggtacactagaagttcaaccgaacatagtgaccgtacttgcagacacagccgttcgtggtgaagacctagacgaacaagctgcagagcaagctaaacgtgacgctgaagcgcaaatggcaaaaggtgcatcgtcagagcttgattataatcaagcggcaatgcagctagctgaagcggtagcacaactacgtgttattcagcaattacgtaaaaagtaa

SEQ ID NO: 273863 - DNA, 796 bp, Unknown
  Bacterial polypeptide expressing nucleotide sequence isolated from the Sargasso Sea
agttgctctagtttatggtcaaatgaatgaacctcctggagctcgagcaagagttgctttatctggattgactcaagcagagtatttcagagatgaagaaggtcaagatgttttattttttgtagataatatatttcgttttactcaagcaggttctgaagtatcagctcttttaggaagaataccgtctgccgttggttaccaaccgacattggcaactgatatgggggctcttcaagagcgtattacaactacaaaaaaaggatcaataacttcggttcaggcaatttatgttcctgctgatgatttaacagatccagcacccgcaacatcattttctcaccttgatgcaacaactgtcttaaaccgtgcaatttctgaaaaaggtatttatccagctgtagacccgcttgactctacttcaagaattttagatccacaggttgtaggagatgatcattatcgtgtagcaagagaagtacaacgtgttttgcaaacttacaaaagtttacaagatataattgcaattttaggtatggacgaattatctgaagaagataaattaactgttgcaagagctagaaaaattgaaaagtttttaagccaacctttttttgttgctgaagtatttactggttctccaggaaaatatgttgaattagaagatacaattaaaagttttgatggactagtgaaaggtgagtatgatcatatgcctgaggccgcattctatatggttggaggtattgatgaagctattgaaaaatcaaaaaaattagaatctgaagcggcttaa

SEQ ID NO: 273864 - DNA, 778 bp, Unknown
  Bacterial polypeptide expressing nucleotide sequence isolated from the Sargasso Sea
aatgaacgaacccctggagcaagagcaagggtaggattaactggtttaacagttgcagaatattttagagataaagaaggacaagatgttttgttttttgttgataatatttttagatttactcaagcaggttcagaggtttccgctttacttggaagaattccctctgcagtaggatatcaaccaactcttgcaacagatatgggcaacttacaagaaagaataactactactggaaaaggttcaatcacttcagttcaagcaatatatgttccagccgatgatttaactgaccccgcacccgcaacatctttttcacatttagatgcaacgacggtgctttccagacaaattgcggaactaggaatttatcctgcagtagacccgcttgactcaacttcaagaattttagatccaagaatagtcggtgatgagcattacagagtagcgaggcaagtacaaaaagttttgcaaacatataaatctcttcaggatataattgcgatattgggtatggatgaactttcagaggaagacaaactcacagtagctagagctagaaaaatacaaagatttttatctcaaccattttttgttgcagaggtcttcacaggtacgcctggaaagttagtaaatttagagtcaactattaaggggttcgacgcaatatgtaagggtgaatatgatcatttgcccgaagcagctttttatatggtcggaactatagatgaagcaatagaaaaagcagaaaaaatggccaaagaagcggctgcataat

SEQ ID NO: 273865 - DNA, 1252 bp, Unknown
  Bacterial polypeptide expressing nucleotide sequence isolated from the Sargasso Sea
aagtccacaggtaaaatcgcatctgttccagttggtgaagcaatgcaggggagagttgttaaccctctcggacaaccaatagatgggaaaggggaaattccaacaagtgatactagattgattgaagaaatggctcctggaataatcaagagaagatcagtgcatgaaccaatgcaaacaggtatcacatctattgatgcaatgattcctgttggaagaggtcaaagagaattaattattggtgatagacaaactggaaaatctgcaattgctatcgatacgataatcaaccaaaaaggtcaagacgtagtttgtgtttacgtagctattggtcagaagtcagcatcagtagcaaacatcgtagaggtattaagagagagaggagccctagattatacagtcgtagttagtgcaggagcttcagaaccagctgctttacagtacttagcaccttataccggtgcagcaattgctgaacattttatgtatcagggtaaagcaacacttgttatttatgatgatctaacgaaacaagctcaggcttatagacaaatgtctcttcttttaaaaagaccaccaggaagagaggcttatccaggagatgttttctacttacacagtagattgttagaaagagcagcaaaactttctgatgctatgggagggggctctatgacagctcttccaattattgaaactcaggcaggggacgtttctgcttacatcccaactaatgttatttcaattacagatggacaaatattcttgagtgcagatttatttaactcaggattaagaccagctattaatgttggtatttctgttagccgtgttggaggagccgctcagacaaaagcaattaaaaaaattgcaggaactttaaaattagaactcgcacagtttgatgaactagctgctttttctcaatttgcatctgatcttgatgaagcaactcagcaacaacttgaacgaggcaaaagactaagagagttattaaagcaacctcaattctctccgctgaaccttgcagaacaagttgcagttgtttatgcaggagttaaagggcttattgatgaggttcctgttgaagatgttactaaatttgcaactgaacttagggaatacctaaagttaaataaagcggaatttatagaagaaattcttaaagaaaagaaattaaatgatggattagaatccacgctaaaagaggtgataaatgaagttaaatcatcaatgcttgccacagtttaaa

SEQ ID NO: 273866 - DNA, 1293 bp, Unknown
  Bacterial polypeptide expressing nucleotide sequence isolated from the Sargasso Sea
tatgagcaaaggaataatcacacaagttattggagcagtagttgacgtaaaatttgagggagaacttccagaaattctaacagcattggaatgtaaaaatggtgataacagattagttttagaagttgctcaacatttaggtgaaacaacagttagaacaattgcgatggatgctactgaaggactaaaaagaggtgatgaagtaataaatactaatgctcctattcaagtacctgttggacctgaaactcttggaagaattattaatgtaattggtgagcccatagatgaaagaggtgaagttaaaacaaaagaaagttggccaattcatagagcagcccctgaatttaatgatcagtctacagaaacagaaattcttgtaactggtatcaaagttattgatctattggcaccttatgcaaaaggtggaaaaattggattattcggtggagctggagtaggtaaaacagtcttaattatggaattgataaataatgttgcgaaagcacatggaggattttcagtttttgcaggagtaggtgaacgaactagagaaggaaacgacctttatcatgagatgatggactctggagtaataaaaaaagatggtcctggatctaaagctgcactagtttatggacagatgaacgagcctccaggagcaagagcaagagttgcgcttacaggtttaacagttgctgaatattttagagaccaagaaggtcaagatgttcttttctttgttgataatatttttaggtttacacaagctggctcagaggtttcagcactattaggaagaattccgtctgcagttggctatcaaccaacactagctacagatatgggaaatctacaggaaagaattacaacaacaaacaagggttcaattacatcagttcaagcaatttatgtaccagctgacgacctaactgatccagcaccagcaacttcatttgcacacttggatgcaacaactgtactttcaagacagatcgctgaaattggtatttatccagctgttgatccattagattctacatccagaattttggacccaagagttgtgggagacgaacactataaggtagcaagagatgtccaaaaaatattacaatcttataagtcacttcaagatattattgcaattcttggtatggatgaattatcggaagaggataaattagtagttgctagagccagaaaaatccaaagatttttatctcaaccgttttttgtagctgaagtttttactggttcacctggaaaattagttgatttagagtcaaccat

SEQ ID NO: 273867 - DNA, 1093 bp, Unknown
  Bacterial polypeptide expressing nucleotide sequence isolated from the Sargasso Sea
ggtctaaaaagaggacttactgcctcaagaactaatgctccaatttcagttccagtaggaccagaaacattgggtagaattgtcgatgttttaggtaatccaatcgatgagaaggggccaattggtgaaaaatcaaaaatgccaattcacagaaaacctccttcatatacagatcagtcagcatctaatgaggtccttgaaaccggcattaaagttattgatcttatgtgtccatttgctaaaggtggaaaaattggtttatttggtggagcaggtgttggtaaaacagtaaatatgatggagcttataaataatattgcgcttcaacattcaggtctttctgtttttgctggtgttggcgaaagaacaagagaaggaaatgatttttattatgaaatgcaagaatcaggagttgtaaatattgataatctaggcgaatcaaaagttgcgatggtttacggacaaatgaatgagccacctggaaatagattaagagttgctttaactggattaactatggctgaaagctttagagatgaaggtaaagatgttttgttatttattgataatatttatcgatataccttagcaggcgttgaggtgtctgctcttttaggcagaatgccatctgctgttggatatcagccaacattggctgaggaaatgggagctcttcaagaaagaatcacatcaaccaagacaggatctattacttcaatacaagctgtgtatgtgccagcagatgatttaacagacccttcaccagcaacaacgtttgctcacttggatgctactgttgttctttcaagacagatttctgagttaggaatatatccagctgttgatcctcttgattcaacaagcaggcagcttgatcctttcgtggtcggagatgatcattatgaagttgctcaaggagttcaaaagatcttacaaagatataatgagctcaaagatatcattgcaattctcgggatggatgagctttctgaagaagataaagggcttgtagccagggcgagaaaggctcaaaaagttttatcccagccgttctttgttgctgagatttttactggaactcccaggaaagtat

SEQ ID NO: 273868 - DNA, 1525 bp, Unknown
  Bacterial polypeptide expressing nucleotide sequence isolated from the Sargasso Sea
tatggatattaacacagataacattacggcattattaaaagaacaaattgcaaaatttgaaggttcagttgacgtaagtgaggtaggtgaaattatttcagttggtgatggtgtcgccagagtctctggtttagagaacgtaatgagttcagaattagttgaactaccaaatgatacatttggaatggcattgaatttagaagaggacaatgttggacttgtattatttggtgatagtagtttagttaaagaaggagatttagcaaaacgaacaggtcgtgtagttgaagttcctgtaggggatgccatggtagggcgcgtagtagacccattagggcaagcaatggatggaaaaggatccattaattcaaaagattcacttccaattgaaagaaaagcacttggcgtaatggctcgccatccagttaaacaaccacttcaaacaggtattaagccaatagatagtatggttccaattggtagaggtcaaagagagttaattattggtgatcgccaaaccgggaaaacggcaattgctgtagatactattattaatcagaaatatactcatgaaactaacgaacctgttttttgtatttatgtagcaattggacaaaaagcgtcaactgtagcatctattgtttctgagctcgaagaagcaggtgcaatggattatacaactgttgtagctgcaaatgcatctgatgcagcaccactgcaatttattgctccgtattcaggttgtgctatgggagaatattttagagataatgggaagcatgctctaattatttatgatgatttatctaagcaagctgttgcatatcgtcaaatgtcgcttgtgctacgtaggcctccaggtcgtgaagcgtatcctggagatgttttttatcttcatagtagattacttgaacgtgcatcaaaattatctgaagaacttggaggaggttctcttacagccttaccaattattgaaacacaagaaggggatgttgctgcttacattcctactaatgttatatctataactgatggacagatatatctagagactaatttatttaattcaggtgtacgccctgctattgatgtaggtttatctgtatctcgtgtggggggtaatgctcaagtgaaggcaatgaaaagtattgctggaacactaaggttagatttagctcaatttagagagcttgaagcatttgcaaaatttggatctgatttagataaaagtactcttgcacagttgacacgtggtgagcgtatggttgagatattaaaacaaaagcagtattcaccaatggatattgataaacagatagcaattatatttgcaggcgcaaaggggcatctggatgatattcctttagataaagtttctgattttgaatctgctttatttgactatttagatgcgaataattcaaaagaactagaaaaattgagagttgaaggtgatatgtcagaagaaatgtcagatattttggacaaatcaataagtcaatttaaagagggatttatagcataa

SEQ ID NO: 273869 - DNA, 1420 bp, Unknown
  Bacterial polypeptide expressing nucleotide sequence isolated from the Sargasso Sea
atggctaaaggtgataaaggtaaagtagttcaagttattggtactgtagtagacgtagaatttgatcaaaataacctacctgaaattttcaatgcgttggaacttgaaaatgagggtgagcgcttagttctagaagttgagcaacacgttggtaattcatgggctagatgtttagctcttggacctactgaggggcttgctaggggagttgaggttactgattcaggagcagcagtgtctgtacctgttggagaaccctctttgggaagattatttaatgtagttggggatcctattgataatggagaacctataagtaaagatgctgtaagatggcctatacacagacggccaccaagttttgatcaacaatcaggatctgtagaacttttagagacaggaataaaagttctagacttgattaccccttttgctaaagggggaaaaattggtgcatatggtggagcaggtgtaggtaaaaccgttattattacagaattaattagaaatattgctcaagaacactcaggtgtttctgtttttgcaggtgttggagaaagatctagagaaggtaacgacctatggcatgagatgcaagattatggagtattaggttccactgctttggtatttggtcaaatgaatgaacctgcaggatctagagcaagaatagctctaacaggtctaacaatggccgaatatttcagagatgaacaaaaacaggatgttttgctattcgttgataatatatacagatatgttttagcaggaatggaagtttcagctctgctaggtagaatgccttctgcagttgggtatcaacctacattatcaactgaaatgggtgatcttgaagaaagaattacgactacagtagatggatcaataacttcattccaagcagtatatgttcctgctgatgattatactgatcctggaattgtaacaacttttggtcacttagatgcaaacgtttcccttgatagagccttagctgcacaattcttatttccagctgtagatcctcttgcttctaattctagaatattagagccagcaattgttggagaagatcactataatgcagctagaggtgttcagcaagttttgcagagatacaaagatttacaagatgttatagcaattcttggtattgatgaattatctgaagaagaccagcttacagttgctagagcaagaaagattcaaagattccttacgcaacctttcttcgttggagaagtatttactggaattcctggcaaatatgtacctatagctgaaactgtaaaaggatttttagaaataattgaaggtaagcatgatgatcttccggagcaagcattctatatggtaggaaatatagaagaagctgttcaaaaaggtgaagaaatgaaacaacagatagaaaataactagt

SEQ ID NO: 273870 - DNA, 1316 bp, Unknown
  Bacterial polypeptide expressing nucleotide sequence isolated from the Sargasso Sea
gcaaatgcaaaaggtagagttacacaagtaatcggtgctgttgtggacgtacagttcgacgatcacttacctgaaattttgaatgcactgaatacagacaacaatggtaagacgctcgtgcttgaagtagctcagcaccttggtgaaaatacagtccgcacaattgctatggatgccacggaaggcttagttagaggacaagaagttgttgatacagcaggaccgatttctgtaccagttgggaacgctactttgggtcggattgttaatgttgttggcgaacctgttgatgaacaaggtcccgttaagtcagatgagtatcgtgcaattcaccaaccagctccagagttcgctgaacaatctacagagtcagaagttttggtcacaggtattaaagttatcgatctcctagcgccttactccaaaggtggtaagattggtttgttcggtggcgccggtgtgggcaagaccgttctgattatggaattgatcaataatattgctaaagtacactccggtttctctgtatttgcgggtgtcggtgaacgtactcgtgaaggtaatgatttgtatcacgaaatgattgaatctaacgttattaaaccagataatctcgaagagtctcaggttgcgctagtgtatgggcagatgaatgagcctccaggtgctcgcgcgcgcgttgcgctaactggtctaactttggctgagcagtttagagaccaatctggtacagatgttttgttttttgtagacaatatttttaggttcacacaagctggatctgaggtgtctgcgctacttggccggataccttcagccgtaggatatcaaccaacacttgctactgatatgggagcaatgcaggaacgaattacttctacaaaaaatggttctattacgtcaattcaagcagtctacgtacctgctgatgacttgacggaccccgcaccggcgaccacgtttgcacatttggacgctactacagttttatctcgtgctatatctgagctcggaatttaccccgcagttgatccgcttgattcatcgtcaagattgatggatcctgctgtcgtaggcgaagaacactacgatgttgctcggtcagttcaaggaattttgcagagatataagtcacttcaagatattattgccatcttgggtatggatgagctttccgaggaagataagctcacagtagcccgtgcaagaaaaatacagcgatttctttctcaaccattcgacgtggcaaaagtatttaccggttcagatggtgtgcaagtaccattagaagatacaatttcatctttcaaagcagt

SEQ ID NO: 273871 - DNA, 1534 bp, Unknown
  Bacterial polypeptide expressing nucleotide sequence isolated from the Sargasso Sea
aatggaaataaatccttcagaagttacaaaaatattaaaagagcaaattaaaaaatttggagataaagctgaaattacagaagttggacaggttttgtccgttggagatggtatcgctagagtttatggtttagataatgtccaagcaggtgaaatggtagagtttgcagatggatctaaaggtatggctttaaatttagaaagtgaaaacgttggtgttgttatatttggagatgataaggcaattaaagaaggtgacacagtaaaaagaacaggagaaatcgttgatactcctgttggaaaagagttgcttggtagagtagtagatggattaggaaatccgattgatggaaaaggtgctttagataaaaatgtaaaaaaaagtagagttgaagtaaaagctccaggaattattccaagaaaatctgtaagtgaaccaatgcagtcaggtttaaaagcaattgatagtttagttccaattggaagaggacaaagagaattaatcataggtgatagacaaacaggaaaaacagcggttgccgtagatacaataataaatcaaaaaaaaataaacgaaagtggagatgaaaaacagaaattgtattgtatatatgttgcaattggacaaaaaagatcaacggtaagacaaattcagaaaactttagaagaagctggtgctatggaatatacaactatagttgcagctacagcatcagacgctgcacctttgcaatttctagcgccatatacaggatgtgctatgggagagttttttagagacaatggcatgcacgctttgattatatacgatgatctttccaaacaagcagttgcctatagacaaatgtcattattgttaagaagacctcctggaagagaagcttaccctggagatgtattttatcttcacagcagattacttgaaagagctgcaaaacttggagatgaacatggaggaggatctttaacggcattaccaataattgaaacacaagcaggcgacgtttcagcttatattccaacaaatgtaatatctattactgacggacaaatattcttagaaacaaatctatttaaccaaggtattagaccagctattaacgtaggtttgtccgtttcacgagtaggatcagctgcccaaacaaaagcaatgaaaaaagtttctggatcaatgaagttagaattagcacaatacagagaaatggctgcatttgcacaatttggttctgatttagatgcatcaacacaaaaattgttaaacagaggatcgaaattaacagaacttttaaaacaaaaacaattctcaccaatgacagttgctgagcaagtagtttctgtattctgcggtgttagaggatatcttgatgatattgaccaaaaagatatatctgattttgaaaataaaattctgcaaaaatgcaaatctgataaaccagaaattttagattcaatttcaagttcaggaaaattagaagaaaatgcagaaaaaatgctaattgatctaattaacgaatttaaaaaaggattgaagtaa

SEQ ID NO: 273872 - DNA, 877 bp, Unknown
  Bacterial polypeptide expressing nucleotide sequence isolated from the Sargasso Sea
aatggcaagcttagacgacctaaaaaagagaattttaagtgttaaatccacacaaaaaataacaaaagctatgaaaatggtagcagcagcaaaacttaaaagagctcaggaaaatgcagaaaagggtcggccttattctgaaaaaatgaataatattatcttaaatttatctaacggaatatcagataaagaaaatgcgccaaaacttttggctggaacagggaatgacaaagttcatttatgtgtagttttaacttctgacagaggtctatgcggaggatttaactcaaatatcatcaaaaaggcaaaagcctattttactaaaattacaagtgagggaaaaaatctaaaaataattactgttggatccaagggttatgaccaattgaaaaggcaatataatgataaaattgtgaataaaatatcttttaaagagtcaaaaaatattaacttttttgatgctgagaaagtatctaaaataattattgaaagttttcaaaaaaatgaatttgatgtatgcaccattttttataataaatttaaaaatgtaattactcaaataccacaggctcagcaaattattcctttaaaatcttctgaaactggcaatgaaaatgaaaaagataattatgaatttgagccagaggaagatgaaatattaggtaatttgttgccaaaaaacatttctacgcaaatcttcaaagcgatgttggaaaattctgcaagtgaacagggatctagaatgagcgctatggataatgcgacacgaaatgcaggagaaatggttgataaacttaccatacaatataatagaagtagacaagcagccattacaaaggaattaatagaaataatatcaggagcggagagtttataa

SEQ ID NO: 273873 - DNA, 334 bp, Unknown
  Bacterial polypeptide expressing nucleotide sequence isolated from the Sargasso Sea
tatgagaaaaggaaaaattacacaaattataggagcggtagttgacgttaaatttgatggagaactacctgagattttaactgcactagagtgtaaaaatggtgataacagacttgttttagaagttgcacagcatcttggagaaacaagtgtgagaaccattgcaatggatgctacagaaggattaaaaagaggagatgaggtaacagatactggggctcctataaaggtaccagttggtcctgaaactttgggtagaatagtaaatgtaattggagaaccgattgatgaaaaaggtgaaattaaaacaaaggaaaattggccaatacataga

SEQ ID NO: 273874 - DNA, 1363 bp, Unknown
  Bacterial polypeptide expressing nucleotide sequence isolated from the Sargasso Sea
catggaaataaaaactgatcaattaacacaattacttcgagagcagatagaaaaacacgatagctcggttgatatctcagaagtaggagaagtgcttgaagtaggagacggcgttgcccgtgtttcaggccttgaaaatgtaatgagctccgaacttgttgagctaccaaatggtgtgttcggtatggcgttaaaccttgaagaagataacgtcggtcttgtattgtttggagaatctcgccttgtaaaagagggtgatcttgcaaaaagaacgggccgagtagtcgaggttccagttggagatgcgatgcttggtagggtagtaaaccctcttggacagccaattgatggcaagggccctataaatacagagcactccttacccatcgagagaaaggcactaggagtgatggccagatctccggttaatgagccacttcaaactggaataaaagccgtagatagtatgatacccattggcagagggcaaagagaattgatcattggcgatcgacaaacaggaaaaacagcggtagcgattgatgctattattaatcaaaaatacacccacaatactgaaaatccggtttactgtatttacgtagcaatcgggcaaaaggcttctacggtagctgctcttgttcaagagctagagagcaatggtgcaatggagtatactaccgtagttgcagctaatgcttcagatcctgcacccatgcaatatattgccccatacgcgggtgcggcaatgggcgagttttttagggataatggaaagcatggattaatcgtctatgatgatttgtcaaaacaggctgttgcatatcgtcaaatgtctttggttctgcgtcgtccccctggaagagaagcatttcctggtgatgttttttacttacacagtcgattgttagagcgtgcatcaaaactttccgaagaacttggtggcggttctcttactgcgctgcccattattgaaacacaagagggtgatgtctcagcatacattccaacgaatgtaatttcaattactgatgggcaaatttatcttgagaccaacctttttaattcaggaataagacctgctatcgatgttggtctatctgtatccagagtgggtggtaatgcccaaatcaaggcaatgaaatctgtcgctggaactttacgtttagacttagctcaatacagagagctagaggcattcgcaaaatttggttctgatttagataaggctacgctttcccagctgacaaggggagagaggatggttgaaatactaaaacagaatcaatatgttctgatggatgttgaaaagcaaattgccattatttttgctgcctccaaaggtcagctagatgatttggat

SEQ ID NO: 273875 - DNA, 874 bp, Unknown
  Bacterial polypeptide expressing nucleotide sequence isolated from the Sargasso Sea
atggcaagtttagatgatttaaaaaaaagaatagcaagtgtaaaatctacacagaaaattactaaagctatgaaaatggttgcggccgcaaagttaagaaaagcacaagagagtgctgagaagggcagaccttattcagaaaaaatgaataatgttattttaaacctatctacaggaatatctgataaagaaaatgcaccaaaattattgtcaggaactggtaatgaaaaagtacacctttgtgtagttatgacttctgatagaggtttgtgtggtggatttaattctaatataattaaaaaagcaaaaagttttttctcaaaaattttagatcaaggtaaagaacttaaaattataactgttggttctaaaggaaatgatcaactcaaaagagcttatggagatagaattattgaaaatatttcttttaaagaatctaaaaatgctaattattttgatgcagataaagttggaaaaaaggtgattgaaaaatttgaagctggtgaatttgatgtttgtactattttctataatcgatttaaaaacgtaatcactcaaattccacaggctcaacaaatcattcctcttaataatgatgcagaagaaaatacttctgatgagagttatgaatttgaaccagatgaagatgaaattttaaccaatttgttgccaaaaaatatttcaacacaaatatttaaggcaatgttagagaattcagctagcgaacaagggtcaagaatgagtgcaatggataatgcaactcgaaacgcaggtgaaatggttgacaaacttactattgagtataatagaagtcgtcaggcagcaattacaaaagaactaatagaaatcatatcaggagcagaaagtttataat

SEQ ID NO: 273876 - DNA, 717 bp, Unknown
  Bacterial polypeptide expressing nucleotide sequence isolated from the Sargasso Sea
gcaaagcagttgcctatagacaaatgtctttacttttgagaagaccgccaggacgagaagcttaccctggagatgtattctatctgcacagtagactgcttgaaagggcagcaaaattaagtgaggagcatggtggaggatctcttacagctcttccaatcattgaaactcaaggtggagatgtttcagcgttcatacctactaacgtgatttctatcactgatggtcaaatatttttagaaacagaactttttaaccaaggtataagacctgcaattaacgtaggtttgtcagtatctagagttggatcttctgctcaaacaaaagctatgaaaaaagtgtctggatctatgaaattagagttggctcaatatagagagatggcagcttttgctcaatttggatctgatctagatgcatctactcagcaacttttgaatagaggttcaaaattaactgaacttttaaaacaaaaacaatattcacctatgacagtagcagaacaagtaatatctgttttctgtggtgttaaaggataccttgataatattgatttaaaagatgttgctgaatttgagagcaagattattgaaaaatgtaaatcagataagcctgaaattattgaagctattcaaagctcaggtaagttagaagaggataaagagaaattactagttgaggttattactcaattacagagtaattttaaatcttaat

SEQ ID NO: 273877 - DNA, 1255 bp, Unknown
  Bacterial polypeptide expressing nucleotide sequence isolated from the Sargasso Sea
atgagcggactaaacccatctgaaatttcaagtgttctcaaggacaaaatttcagggcttgatctaaaggctgaaaccaaaaacgaaggaaccatcgtcaatgtttctgatggaattatcagaatacatggaatgggcgatgttatgtatggtgagctcgtagagtttgaaaacggtgtctttggacttgcacttaacttagagcaagactctgtcggtgttgttgtccttggtgattaccttgggctaagtgaagggcaaaaagtaacatgtacaggtaagatcttagaggttccagttggtgaggaaatgctcgggcgagttgtagacgccttaggaaacccaatcgatggaaagggtgaacttaaaacaaaacaatctgcccctattgaagtagttgcgccaggggttattgccagacaatcagtcgatcaaccagtgcaaattggacttaaatcaatcgatgcaatggttccaataggaagaggccaaagagaactcattattggtgatagacaaaccggaaaaacagctgtagcaattgacgcaataattaatcaaaaaggcacaggaattaaatgtatttatgtagctattggtcaaaaacaatcaacaatagccaatgttgtagcaaaacttgaagagtatggagcaatggagcacacaattgttgtttcagcggcagcagctgatccagctgcgatgcaatacctctcagcatattcaggttgcgcaatgggggaatattttagagatacaggacaagatgcattaattgtttacgatgatttgtcaaagcaagcagttgcttacagagagatatcgctattacttagaaggcctccaggaagagaagctttccctggagatgttttttatcttcactcaagacttttagagagagcagctagagtaaatgcggaatatgtagaaaaaattacagaaggaaaggtaaaaggtaaaacaggatctctaacagccttaccaattattgaaacacaagccggagatgtatctgcttttgttccaactaatgtaatttcaattactgacgggcagatatttttagaaacagatctttttaactcaggtgttagaccagctattgacccaggactttctgtatcaagagttggtggagctgcacaaactaagataattaaaaagcttagtggtggaattagaacagatcttgctcagtacagggagcttgcagcattctcacagtttgcatctgatcttgatgacgcaacaa

SEQ ID NO: 273878 - DNA, 809 bp, Unknown
  Bacterial polypeptide expressing nucleotide sequence isolated from the Sargasso Sea
tatgaagatggttgctgctgcgaaacttagaaaagctcaagaaagtgcagaaaaggaaaggccttattcagaaaaaatgaataatgttattttaaatttgtctagtggaatatcagataaagagaatgcgccaaaacttttatcaggaacaggaaatgataaggttcatttatgtgttgtaatgacatcagatagaggattatgtggaggtttcaattctaatataattaaaaaagctaaaagttacttctcgaaaattttaagcgagggaaaagaacttaaaatcataactgtaggctcaaaaggaaatgatcagttaaagagaatgtatggcgataaaattattgagaatatttcttttaaggagtcgaaaaatgctaattattttgatgctgacaaagttggcaagatagtaatagataaatttgagaacagcgaatttgatatatgcactattttttataatcaatttaaaaacgtaattactcaaattcctcaagcccaacagataatccctctaaatagtgaggatagtgaagataatacttcagaggaaagttatgaatttgaaccagatgaagatgagattttaagcaatttattaccaaaaaatatttcaacacaaatatttaaagcaatgttagagaattcagctagcgaacaaggatcaaggatgagtgcaatggacaacgcaacccgaaacgcaggtgaaatggttgacaaacttactatccagtataatagaagtcgtcaggcagcaattacaaaagaactaatagaaatcatatcaggagcagaaagtttataat

SEQ ID NO: 273879 - DNA, 454 bp, Unknown
  Bacterial polypeptide expressing nucleotide sequence isolated from the Sargasso Sea
atgagtaaaggaataatcacacaagttattggagcagtagttgacgtaaaatttgagggagaacttccagaaattctaacagcattggaatgtaaaaatggtgataacagactagttttagaggttgctcagcatttaggtgaaacaacagtaagaacaattgcaatggatgctactgaaggattgaaaagaggagatgaagtaataaatactaatgctcctattcaagtacctgttggacccgaaactcttggaagaattattaatgtaattggtgagcctatagatgaaagaggtgaggttaaaacaaaagaaagttggccaattcatagagcagcccctgaatttaatgatcagtctacggaaacagaaattctcgtaactggtatcaaggttattgatctgttggcaccttatgctaaaggtggaaaaattggattatttggtggagctg

SEQ ID NO: 273880 - DNA, 1543 bp, Unknown
  Bacterial polypeptide expressing nucleotide sequence isolated from the Sargasso Sea
gatggcaaccaaagcatctgaaataagtgaattaataaaacagcaaattaaaaacttcgaacacgaagccaaatcatccgacgttgggacagttgtttctgtaacagatggtatcaccagaatacatgggctaaacgatgtccagtacggagagatgatcgagtttcctggcgatacatttggcttggcccttaacttggaacaagactcagtcggagcggtggtattaggtgactacacccacatttctgagggagcacaagtaaaaacaaccaatagaattcttgaagtgccagttggcgaaggtttgcttggtagggttgtcgactccttgggaacgccactcgatggaaaaggagctgtttcctcagaccaaacagcaccaatagaaaaagttgcaccaggcgtcatctcaagacagtcagtagaccaaccagttcaaaccggtcttaaatcgattgatgcaatggtaccaatcggaagaggtcagcgagagcttatcattggcgatagacaaacaggaaaaacagccgttgctgttgacaccataatcaaccaaaaaggcacagggataaaatgtatctacgttgcagtgggccagaaaaactcttctgttgctaatgtggttaagaagttagacgaagaaggcgcattagagcacacaatcattgtcaatgctgcagcatccgattcagctgccatgcaatatattgctccatattcaggttgtgccatgggtgagtacttccgagacaaaggagaagacgccctaattatttttgatgacttaaccaagcaagcctgggcatataggcaagtatcacttctattaaagagacctcctggaagagaggcttatcctggcgacgtattttatcttcactcaagattgcttgagagagcagcaagggtgaatgcagagtatgtagaaaaagaaacaggcgggaaagtgaagggccaaacaggctcgttaaccgcattgccaatcatcgaaacacaagcgggtgacgtttctgcattcgtcccaacaaatgtgatttcaattacagacggacaaatatacttagaaagtgacttatttaatgcgggcattagaccggcgataaatgctggtttatctgtttccagggtgggcggtgcagcccaaacaaaaatcattaaaaagctcggagggggtgtcaggctggcattggcacaatatcgtgagcttgcagcatttgcccagtttgcatccgatcttgatgaggccacaaggaaacaactagaaagaggtcagagagtaacagagctaatgaagcaaaaacaatacgctccactgactgtagcagaaatggctgtgtccctttatgctgcgaacgagggctatctcgatgatgtcccagcagacaagattgtcgatttcgagatagcactgcatgcaaattttgttgactcagcctctgatcttgcccaaaagatcaatgacactggagactacaacgatgaaatcgaagccgagctcaaaaagttcgttgaagattttaaagcaaccggcacatattaa

SEQ ID NO: 273881 - DNA, 454 bp, Unknown
  Bacterial polypeptide expressing nucleotide sequence isolated from the Sargasso Sea
tatggcaaacgaaaaggaaattcgaacaaaaattgggagcgttaaaaacacccaaaaaattacgaaggccatggagatggttgcggcaagtaagatgcgccgaacacaggaaaccatgaaaaaagcgttgccatatgcagacaaaatcagagctgtgataggacatatctataaggctaatccggactataaacacccttttcttgaaaagcgtgaagtcaaaacagccggctacattgttgttagttccgatagagggctttgtggcgggctcaatgtaaacatgttcagaggactaattgccaaactaaaagagaacaaaagcaatcaaattgattcaaagctttgccttgttggagcaaaggcagtccagttttttaggtctgtggatgtggatgttgtagcagcagcatcacaccttggtgaagagccacaagttgaagatttggttggg

SEQ ID NO: 273882 - DNA, 1006 bp, Unknown
  Bacterial polypeptide expressing nucleotide sequence isolated from the Sargasso Sea
tatgccaaaggtggaaagatcggattgtttcggtggagcaggagttggaaaaactgtaattataatggaacttataaataatatagctaaggcccatggtggattttcagtatttgctggagtgggagagagaactagagaagggaacgatttatatcacgaaatgatagagtcaggagtgatcaagccagagggaactggatctaaagcagcattagtttatggacaaatgaatgagcctccaggagctagagctagagtagctttaactggtcttactgtggcagagtatttcagggatcaagagggtcaagatgttttgttctttgttgataacatttttagatttactcaggcaggttcagaagtatcagctcttcttggaagaatcccttctgcggttggttatcagcctactcttgcaacagatatgggaaacctacaggaaagaattacaactactaataaaggatcaattacatcagttcaggcaatttatgtacctgcagatgatttaacggatccagctccagcaacttctttttcacacttagatgcaacgactgtactttcaagacaaattgctgaattaggtatttacccagctgttgaccctttagattctacttctagaattttagatccaagagttgttggtgatgaacactatcgagtagcaagatctgttcagaaaatattacaaacatacaaatctttgcaagatattattgcaattctaggaatggacgagctatcagaggatgataaacttaccgtagctagagctagaaaaatccaaagatttttatctcaacctttctttgttgctgaagtatttacaggatctccaggtaaactagtagatttagagtcaacaattaaagggtttgacgcaatatgcaaaggagaatatgaccatctgcctgaagctgctttttatatggttggcacaatagaagaagcaatagaaaaagctgaaaaaatggcaaaagatgcagctgcttaa

SEQ ID NO: 273883 - DNA, 1282 bp, Unknown
  Bacterial polypeptide expressing nucleotide sequence isolated from the Sargasso Sea
gttaaggaaggtgatctagcaaaacggactggtcaggttgtagaagttccagttggagacgctatggttggtcgtgtagttgatccattgggtcaagcaatggatggtaaaggttccattacttcaaaagactcacttccaatagaaagaaaggctcttggtgtgatggctcgacacccagttaaacaaccgcttcaaacaggcattaaaccaatagatagtatggttcctattggtagagggcaaagagagttaattattggcgatcgtcaaactggaaaaacagctatagcagtagatacaataataaaccaaaaatacacccatagtacttccgatccagtttattgtatttatgtagcaattgggcaaaaagcatcaaccgtagcttctattgtatcagaacttgaagatgctggtgcaatggagtatacaacagttgttgctgcaaatgcatctgacgctgcgccgttacaattcattgctccttattcaggatgtgcaatgggggaatattttagagataatggtaagcatgcattaattatttacgatgatctatctaagcaagctgttgcatatcgccagatgtctctggtgcttcggaggcctccaggtcgtgaggcttatcctggggatgtgttttatcttcacagtaggttgcttgagcgcgcttccaaattatctgatgagttgggaggtggatctttaactgcgcttccaataattgaaacacaagagggggatgtagctgcatatatacctacgaatgttatttcaattactgatggacaaatctatcttgaaaccaatttatttaattcaggtgttcgccctgctatcgatgtaggtttatctgtatcacgtgttggtggtaatgcgcaagtaaaagcaatgaaaagtattgctggaacattaagattagatttagcgcaattcagagaacttgaagcatttgcaaaatttggatctgatttagataaaagtactcttgcgcagttgacacgtggcgagcgaatggttgagatattaaagcaaaaacaatattctccaatgaatattgataaacaaatagcaattatatttgcaggaacaaaaggccatttagatgatattcctttagataaagtttctgattttgaatctgctttatttgattatttagatgcgaataattcaaaagaacttgaacaattgagatctgaaggagttatgtcagaagagatgtctgatgttttaaacaaatcaatcagtcaatttaaggatggtttcactgtataat

SEQ ID NO: 273884 - DNA, 727 bp, Unknown
  Bacterial polypeptide expressing nucleotide sequence isolated from the Sargasso Sea
aatgttctttaattccttgctaacaaattttgcagcattagaagttggtcaacatctttattggcaaattggaaatatcagacttcatgggcaggtttttttaacatcttggattttattaggggcgttattagtttttatttctttaggaactaaaaaaatggaaaatgatcctaaaggcctacaaaatttgcttgagtttctctgggattacataagagatcttgctaggacgcaaattggagaaaaagtttatagagattggatgccatttataggcactttatttttattcgtctttgtgagtaattggggaggagctttaattccttggagattgattaagttgccaagtggagagttgggagcacctactgcagatatcaatacaacaatagccttggcgctattggtttcactttcttatttctatgctggtttaagcaataaaggttggaggtatttcgaatattatgttcacccaactccgattatgcttccttttaaaattctagaggattttactaaacctttatcactctctttcaggctatttggaaatattttggctgatgaacttgtagttggtgttttagtatttttagtcccactaattttaccaatacctgttatgttcctaggattatttactagtgcaattcaggcattgattttcgcaactttagcggcctactacattggagaagctgttgaggaacatcattag

SEQ ID NO: 273885 - DNA, 412 bp, Unknown
  Bacterial polypeptide expressing nucleotide sequence isolated from the Sargasso Sea
ggtatttatcctgcagtagatccactagattctacctcaagaattttaactcctgaaatattaggagatgagcactataactgtgctcaacttgttaaagaattacttcagagatacaaagatctccaggatataattgctatccttggtatggaagagttatccgaagaagataaattagctgtagcaagagcaagaagagttcaaaggtttttatcacaaccatttcatgttgcagagcaatttactggaataccaggagcattagttgacatcaaggatacaattaagggttttaatatgataatggatggtgagcttgatcacattcctgaagcggcttttaacctaaagggtactattgaagaggcaattgaggcaggtgaaaagatgcttgccgaaacaaaataac

SEQ ID NO: 273886 - DNA, 1150 bp, Unknown
  Bacterial polypeptide expressing nucleotide sequence isolated from the Sargasso Sea
tatgagtaatggaacagtaatacaaataattggagcggtaatcgacgtagagtttcctaaagaaaatctacctaagatttatgatgcattgactgttgatgaaacaggcctggtgcttgaggtgcaacagcaacttggtgacggagtggtaagaactattgccatgggtgcttcagaaggtttgaaaagaggtgtgtctgtcaccaacactgaaaatccaatttctgtacctgtaggggaagcaacccttggaaggattatgaatgttctgggtgagcccatagacgaaaagggagatgtagctgctacatctactatgcctattcacagaaacccaccttcatatgaagatcaggcagaaactacggagcttttagagaccggtatcaaggttattgatttgatttgcccatttgcaaaaggtggaaaggttggtctatttggtggtgccggagtcggtaagacagttaacatccaagagcttataagaaatattgcttatgagcatagtggctattcagtgtttgctggagtgggtgaaagaactcgtgaaggtaacgatatgtatcacgaaatgattgaaggaggagtgctagacaaagtggcacttgtctatggtcagatgaatgagcctcccggaaacagattaagagtcgccctgtcgggattaacaatggctgaaaactttagagatgaagggagagatgttcttttgttcgtagataatatctatcgttatactcttgcaggaaccgagtgttctgcccttctgggtcgtatgccgtctgcagtcgggtatcaaccaactcttgctgaagagatgggtgttttacaagaaagaatcgcctctacaaaaaccggatctatcacttctgtacaagctgtatatgtaccagcagatgacttaactgacccttctcctgccacgacatttgcccacttagatgctaacgttgttctttcaagacaaatagcttcattgggtatttatcccgcagttgatcctttagactctaacagcagacagcttgagcctgcaatcgttggtcaagagcactacgacgtagctaatgccgtcaaacagcaactcaaccgttataaggaactgaaagatataattgccattctgggaatggatgagctctcggaa

SEQ ID NO: 273887 - DNA, 475 bp, Unknown
  Bacterial polypeptide expressing nucleotide sequence isolated from the Sargasso Sea
atgagaaaaggaaatattacacagattattggagcagtagtagatgtaaaatttgatggagagcttccagaaatactaacagctttggaatgcgacaatggaggcaatagattggtattagaagttgcacaacatttaggggagtctagtgttcgtacaatagcaatggacgctacagagggtctaaaaagaggtgatgaagtaacagatactggtgcaccaattaaagttcctgtaggtccagagacacttggaagaatcactaatgtaattggtgaaccaattgatgaaaagggagaggtgaaaactaaggaaagttggcccatccatagatctgctcctgagtttaatgatcaatcaacagaaacagaaatcctagtaactggaataaaagttgtagatttattagcaccttatgctaaggggggtaagattggtttattcggaggagctggagttggaaaaccgtactaat

SEQ ID NO: 273888 - DNA, 838 bp, Unknown
  Bacterial polypeptide expressing nucleotide sequence isolated from the Sargasso Sea
aatgagcaaaaatggaaaaattattcaagtaatcggagcagtagttgatgttcaatttgaaggggatttacctgagattttaacagcactagaagtagataattctggaaacaaattagtgttagaagtagcacagcatcttggagaaaacagtgtaagaacaatcgcgatggatagtactgaaggattaaaaagaggcgatgttgttcaaaacactggtgcaccaattagtgttcctgttggtcctgaaactttaggaagaattataaatgttattggacaacctattgatcaaaaaggagaggtaaagacaaaagaaaaatggccaatacaccgagaggcaccaaaatttacagatcagtccactgaaacagaaattctagaaactggtattaaagttatagatcttctggcgccatactcaaaaggtggaaagattggattattcggaggagctggagttggcaaaacagtaattattatggaattgataaataacattgcaaaagctcatggaggattttctgtttttgcaggtgttggagaaagaactagagaaggaaacgatctataccatgaaatgattgagtcaggtgttatcaaacctgaaggtaaaggttcaaaagctgctttagtatatggtcaaatgaacgagcctcctggagctagagccagagtaggtttaacaggcttgacggttgcagaatattttagagacaaagaaggccaagatgttttattttttgtagataatatttttagatttacaccagcaggatctgaagtttcagctttattaggtagaataccatccgctgtaggatatcagccaactttg

SEQ ID NO: 273889 - DNA, 337 bp, Unknown
  Bacterial polypeptide expressing nucleotide sequence isolated from the Sargasso Sea
tatggctaataatttaactggaaaaatatcacaagttcttggagctgttgtggatgtggagtttgatggtgaacttcctgcaataatgaatgctctagaattagataatgatggaacaagactattgctcgaggttgctcagcatttaggagaaaatgcagtaagaacaattgcaatggataccacagatggattagtaagaggtcaaacagtgacagatacaggcgcccccatttctatgccagtaggtcctgaaacacttggccgtattatgaatgttgttggtgagcctgttgatgagagaggtgcaattggtacaacaaaaacttatcctatt

SEQ ID NO: 273890 - DNA, 1423 bp, Unknown
  Bacterial polypeptide expressing nucleotide sequence isolated from the Sargasso Sea
tatgagcaaaaaaggaataattactcaggttataggagcagtagtagatgtaaaatttgatggtgcattaccagaaatacttactgccttgcaatgtgataatggtggaaataaattaattttagaggtagcacaacacttaggagagtctagtgtaagaactattgcgatggatagcacagaaggactaaaacgtggagatgaagctctagatacaggcgctccgattcaagttcctgtaggccctgaaactctcggaagaattatcaatgttattggtgagcccattgatgaaaaaggtgatgtaaaaaccaaagaaagttggccaattcatagacaagctccaacttttaacgatcaatcaactgaaacagaaattttagtaactggtataaaagttatcgacctattagccccttatgcaaaaggggggaaaattggcttatttggaggagctggtgttggaaaaactgtgataatcatggagttaattaataatatagcaaaagctcatggaggtttttcagtttttgctggcgttggtgaaagaactagagaaggtaatgatctttaccatgagatgatagagtctggagtaattaaaccagaggggaaaggttcaaaggctgctttggtttatggacagatgaatgaaccaccaggcgcaagagcaagggtagctcttactggtttgacagtagcagaatattttagggatcaagagggtcaagatgtattatttttcgtagataatatttttagatttactcaagcaggctcagaagtatcagctttacttggtagaattccttctgcggttggataccaaccaaccttagccacagatatgggaaatttacaagagagaattacaacaaccaataaaggctcgataacatctgttcaagcaatttatgttcccgcagatgatttaactgatcctgcgccagctacgtcattttctcacttagatgcaacaaccgtattatcaagacaaatagcagagcttgggatttacccagcagtggatcctttagactcaacatcaagaatacttgatccaagaattgtcggagaagaacactataaagtcgcaagatctgttcaaaaaattttacaaacatataaatctttacaagacataatagcaattctaggaatggacgagctatccgaagaagataaattgacagtagcaagagcaagaaaaattcaaagatttttatctcaaccgtttttcgtagcggaagtttttactggttctcccggaaaacttgtcgatttagactcgactatcaaaggatttgatgcaatttgcaagggcgaatatgatcatttacccgaggcagctttttatatggttggcacaatcgaagaggcggttcaaaaagctgaaaaaatggctaaggaagctgcagcctaa

SEQ ID NO: 273891 - DNA, 397 bp, Unknown
  Bacterial polypeptide expressing nucleotide sequence isolated from the Sargasso Sea
gatccgttggattcaacttcgagaatactggacccaagaattgttggagatgagcattatagagttgctagagaagtacaaaaagttcttcaaacttataaatctttacaagatataattgcaattttaggtatggatgaattatctgaagaagataagttagttgttgctagagcaagaaaaatacaaagatttctctctcaacctttctttgtagctgaggtgtttactggttcgcctggtaaacttgtagatttagaatcaacaataaaaggttttgatgctatttgtaaaggtgaatacgatcatttgccagaggcagcattttatatggttggtacgattgaagaagctatcaaaaaggctgagagcttagctaacgaagctgctgcataat

SEQ ID NO: 273892 - DNA, 1018 bp, Unknown
  Bacterial polypeptide expressing nucleotide sequence isolated from the Sargasso Sea
tgatctactagcactttatgcaagaggtggtaaaattggattatttggcggagctggagttggtaagacagttttaattatggaattaattaacaacattgcgaaggcccatggaggatattcggtatttgctggcgttggagaaagaacgcgtgagggtaatgatttgtaccacgaaatgattgagtcaggaattattgacttaaaaggcaaggattcaaaagttgcacttgtttatggtcagatgaacgaaccaccaggagcaagagctagagttgctctttcaggattaactcaagcagaatactttagagatgaagaaggtcaggatgtgttattctttgtagataacatatttagatttactcaggcaggctctgaagtgtcagctcttctaggacgtatcccatctgcagttggatatcaaccaacacttgcaactgatatgggtgctttacaagaacgaatcacaactacaaaaaaaggatctattacatcagtacaggcaatatatgttcctgcagatgacttaactgatcctgcacctgcaacatccttttcacatttggatgcaacaacagttctaaatagagctatctctgaaaaaggaatatatccagcagttgatccattagactctacttctagaattttagatccacaagttgttggtgatgatcattatagagttgcaagagaagtacaaagagttctacaaacatataaaagtcttcaagatataatagctattctaggaatggatgagctttcagaagaagataagttaacagttgcaagagctagaaaaatagaaaagtttttgagccaaccattttttgttgcagaagtcttcacaggctctcctggaaaatatgttgatcttgaagataccataaaaagttttgatggactcgtaaaaggtgaatatgaccatatgccagaagctgcattttatatggtaggtggtattgatgaagctattgaaaaagctaaaaaattagaagctgaagctgcataa

SEQ ID NO: 273893 - DNA, 1420 bp, Unknown
  Bacterial polypeptide expressing nucleotide sequence isolated from the Sargasso Sea
atgaaaaaaggaaaaattactcaagtaataggagcagtagtagatgtaagttttgatggagacttacctgaaattttaacagcacttgaatgtaaaaatggcgaaaacaaattagtcttagaagtagctcaacatttaggagaatcaagcgttagaactattgcaatggatgctacggaaggtttaaaaagaggagatgaggtaattgacactggctctcctataaaagttccagttggaccagaaacacttggaagaattattaatgtagttggtgatccaattgatgaaaaaggggaagttaaaactaaagaaagctggcccattcatagagctgcacctgaatttaatgaccagtctactgaaacagaaattctagtaacaggaattaaggttgttgacttattagcaccttatgcaaaaggtggtaaaataggattatttggaggtgccggtgtaggaaaaacagttataatcatggaacttataaacaatattgctaaagcacatggtggcttttcagtttttgcaggagttggagaaagaacaagagaaggaaatgatctctatcatgaaatgatagagtcaggcgtaattaaaccagaaggtcctggatcaaaagcagctttagtgtatggccaaatgaacgaaccgccaggcgcaaggtcaagagttgcattaacaggcttaactgttgcagaatattttagagatcaagaaggacaggacgttcttttctttgtagacaatatttttagatttacccaagcaggatctgaagtttcagcattacttggaagaatcccatcagcagtaggatatcaacctactttagcaactgatatgggaaatttacaggagagaattacaacaacaaacaaaggatctataacatctgtacaagcaatttatgtacctgcagatgacttaacagatccagcaccagcaacttcattttcccacttagatgcaacaaccgtattgtctagacaaatcgctgaacttggaatttatccggcagttgaccctttagactctacatctagaattttagacccaagaattgttggtgatgaacattatagagttgctagagaagtacaaaaagttcttcaaacctacaagtctttacaagatattattgcaattttaggtatggatgaattatcagaagaggacaaattaactgttgctagagctagaaaaattcaaaggtttctttcgcaacctttctttgtagcagaagtatttacaggttcaccgggtaagctagttgatttagagtccactatcaaaggatttgatgcaatttgtaaaggtgagtatgatcatttacctgaagcagctttttatatggtaggaacaatagaagaagcaatcgaaaaagctgaaaaaatggctaaagaagctgcagcataat

SEQ ID NO: 273894 - DNA, 880 bp, Unknown
  Bacterial polypeptide expressing nucleotide sequence isolated from the Sargasso Sea
atggcaagtttagacgatttaaaaaaaagaataacaagcgtaaaatctacgcaaaaaattaccaaagccatgaaaatggttgcagctgcaaaacttagaagggcccaagaaaatgcagaaaaaggaagaccatattctgataaaatgcacaatataattcttaatctttcaaatggcatttctgacaaagaaaatgctccaaaattacttaaaggatcaggaaacgataaaatacacttatgtgttgttttaacttcagacagaggtttatgtggaggatttaatagcaatattattaaaaaagcaaagtcttactttcaaaaaattttgaatgaaggaaaaagcttaaaaattattactgttggatcaaaaggttatgatcaattaaaaagagtttacagcgacaagattatagaaaaaatttcatttaaagattcaaaaaatgtaaattatcttgatgcagaaaaagttggtaaaattataattgataatttttataaaaatgaatttgatgtatgtacaattttttataatcaatttaaaaatgttattactcaaataccacaggaacaacaaataattcctttaaaagcatctgagtcaaaaaaagattcttcagttgaagataactatgaatttgaaccagaggaggatgaaattttaagtaatttacttccaaaaaatatttcaactcagatttttaaagcaatgcttgaaaattcagccagtgaacagggatcaagaatgactgcaatggataatgcaacccgaaatgcaggtgaaatggttgataaacttactattcagtataatagaagtcgtcaagcagcaattactaaagaattaattgaaattatatcaggagcggaaagtttatagt

SEQ ID NO: 273895 - DNA, 1537 bp, Unknown
  Bacterial polypeptide expressing nucleotide sequence isolated from the Sargasso Sea
atggatataaatccttcagaagtaaccaaaatattaaaagaacaaataaaaaaagtaggagaaaaggcagagatatctgaagtaggccaagtactgtcagtaggcgacggtatagctagaatctatggacttgacaatgttcaagcaggggaaatggtagagttttctgatggttcaaaaggaatggcattaaatttagaaagtgacaatgttggtgttgtaatttttggagaggatagagctattaaagaaggagatactgtcaaaagaacaggagctattgtagatacaccagtcggaaaagaattattaggtcgagtagtagatggattaggaaatccaatagatggtaagggtgctttagataaaggagttaaaagaagtagagttgaagtaaaggctcctggaataattcctcgaaagtcggttaatgagccaatgcaaacaggacttaagtcagttgatagtttagttccaattggtagaggacaaagagaactaattattggagatagacaaacaggaaaaactgctgttgcaattgatgcaattataaatcaaaaaaaaataaatgaatcagatgatgaaaaacagaagttgtattgcgtatatgtagcaattggtcaaaaaagatctacagttagacagattgaaaagactctagaagaagctggagcaatggaatacacaacaatagttgctgcaacagcttcagatgctgccccacttcaatttttagcaccttacactggctgtgctatgggtgaatattttagggataatggaatgcatgccttgattatttatgatgatttatctaaacaagcagtagcttatagacaaatgtctttgttgttaagaagacctccaggcagagaagcttacccaggtgatgtattttacttacatagtaggttacttgaaagagcagctaaacttagtgatgaacatggaggaggatctttgacagcacttccaataatagaaacccaaggtggagatgtttcggcttttatacctaccaatgttatatcaataaccgatggacaaatatttttggagacaaatttgtttaaccaaggaattcgaccagcaattaacgttggtttatcagtatccagagttggttcatctgctcaaacaaaggcaatgaaaaaagtttctggatctatgaaactagaacttgcacagtatagagaaatggcagcttttgcacaatttggatcagacttagatgcttctactcaaaaacttttaaatagaggatctaaattgactgaacttttaaaacaaaaacaatattcgccaatgactgttgcagaacaagtgatttcagttttttgtggagttagagggtatttggacaacatagagcaaaaaaatattgcagagtttgagacaaaaattatcgaaaaatgtaagtcagaaaaacctgaaatactgagcgcaatatcaagttcgggtaaacttgaagaaaatactgaaaaattattagtagaaacaataacagaacttaaaaaaaattttaactcttaaa

SEQ ID NO: 273896 - DNA, 1378 bp, Unknown
  Bacterial polypeptide expressing nucleotide sequence isolated from the Sargasso Sea
aatgagcacaggaaatatcgtacaagtaatcggagcggtagtagacgttgagtttccaaaagaagcaataccgagcgtatatgacgcactcacccttaaagacggagaactagtttttgaggttcagcagcaacttggtgacggcattgtcagaaccattgcaatgggagcaagcgagggtttaaaaagaggccttgaggttgaaaatactggagccccaattagcgtgcctgtaggacaggaaaccttaggaagggttctagatgttttgggcaatccgatagatgaaaaaggacccgttggcgccaaagcaaatagaccaattcacgcaaaagcacccacgtttgaagaacagtctacagaagcggatgtattggaaacagggattaaagttatcgaccttctttgcccatttgcaaaaggaggaaaggttgggctgtttggaggtgccggcgtcggaaaaacagttacagttatggaattgatcagaaacattgcagcagagcacgacggcttttccgtttttgctggagttggagaaagaacaagagaagggaatgacttctatcatgaaatgatggagtcaaacgtcctagacaaggtcgcacttgtttatggacaaatgaatgagcccccaggaaacaggctcagagttgccttgaccggactaacaattgcagaaaactttagggacgaaggaagggatgtcttgatgtttatcgataacatttacagatatactcttgcaggcacagaagtatctgcactgcttggaagaatgccatctgcagttggatatcaacccaacctagcagaagaaatgggcgttcttcaagagaggatcacctcaacaaagacaggctcaattacctcaattcaagcagtttatgtaccagcagacgacttgacagacccatcaccagcaactacttttgcccaccttgatgcaacggttgtattggcaagatcaattgctgagcttggaatttacccagctgttgacccgcttgattcaaatagtcgccaattagatccaggagtcgtaggtcaagagcattacgatacagcaaggtctgttcagcaggttttacaaaggtataaggagttacaggacattatcgcaattcttggaatggacgagctttccgaagaagacaagcttaccgtacaaagagcaagaaaaattcaaagattcttatctcaaccattttttgttgcagaggtctttacagggtccccggggcagtatgtgtcactgagggattctatcaaggctttccaaggaatagtcgcaggggattacgacgaccttccagaacaagcgttttatatggttggaacaatcgaagaagcggtcgaaaaagcaaaaagcatgtaa

SEQ ID NO: 273897 - DNA, 1417 bp, Unknown
  Bacterial polypeptide expressing nucleotide sequence isolated from the Sargasso Sea
tatgagaaaaggaaatataacacaggtcattggagcggtagtagatgtaaaatttgatggagaactaccagaaattttaacagcattagagtgtaataatgcgggtaatagattagtgcttgaagtagctcaacatttaggagagtctagtgttagaactatagctatggatgcaacagagggattgaaaagaggtgatgaagtcaaagatacaggtgcaccgataaaagttccagttggaccagaaactttagggagaattataaatgttattggtgagcctattgatgaaaaaggtgatgtaaaaaataaagaaaactggcccatacacagacctgccccgacgtttaatgatcaatctactgaaacagaaattttagttactggtataaaagtaatagacctcctagcgccatatgccaaaggaggaaaaattggattatttggtggtgcaggggttggaaaaactgttctaattatggaattaattaataacgtagcaaaagctcatggtggtttttcagtttttgctggtgttggagagagaacaagagaaggaaatgatttatatcatgaaatgattgactcaggagttattaagcctgagggagaaggctctaaagctgcattagtttatgggcaaatgaatgagccaccaggcgctcgagcaagagtagcacttactggattgaccgttgcagaatattttagagaccaagaaggacaagatgtattatttttcgtagataatatttttagatttactcaggcaggctctgaggtatctgcattattaggaagaattccatcagcggttggataccagccaaccttagcaacagatatgggaaatcttcaagaaagaataacaactacaaacaaaggttcaattacatcagtccaggctatttatgtacctgcggatgatttaactgatcctgcaccagccacgtcttttgctcatttagatgctacaactgtattatcaagacagatagccgaactgggaatttatccagcagtagacccattagactcaacttcgagaattttggatccaagaatagttggtgatgaacattacagagtagctagagaagttcaaaaggttcttcaaacttataaatcattacaagatataattgctatattgggtatggatgaattgtcagaagaggataaattagttgttgctagagctagaaagatacaaagatttttgtcacaacctttctttgttgctgaagtgtttacaggctcaccaggaaaacttgtagatttagagtctacaatcaaaggtttcgacgcaatatgtaaaggtgaatacgatcacttaccagaagcagcattttatatggttggaacaatagaagaagccatcgaaaaagctgaaaaacttgcaaaagatgtcgcttga

SEQ ID NO: 273898 - DNA, 637 bp, Unknown
  Bacterial polypeptide expressing nucleotide sequence isolated from the Sargasso Sea
aatggatattaatccttctgaaataactaaaattttgaaagagcagataaaaaaccttggagagaaaacagaagtttctgagataggcaaagttctttctgttggggatggtatcgcaagggtatatggcctcgataatgtgcaggctggagaaatggttgaatttaaagacggctctaaagggatggcactaaatttagagagcgacaatgttggaatcgtaatttttggtgatgacaaatcaatcaaagagggggacactgtcaaaagaactggtactatagttgatgttcctgttgggaaagaattattaggtagagtagtagatgctttaggtaaccccattgacggcaaagaagctctcaaaaaaggaattaaaagaaaaagagttgaggtaaaggcaccaggtataattccaagaaaatcagttaacgaaccaatgcaaacaggtttgaaggcaattgatagtttaataccaattggaagaggtcaaagagaattaataatcggtgacagacagactggaaaaacagcagtagcaatagatacaataataaatcaaaaaaaaataaatgagtcatctgatgagaaaaaaaaattatattgtatttatgttgcgattggtcaaaaaagatca

SEQ ID NO: 273899 - DNA, 1057 bp, Unknown
  Bacterial polypeptide expressing nucleotide sequence isolated from the Sargasso Sea
atggatattaagacaaatgaaatcggcgatttattacgaagccagattaaaaatatcaatgaaaatgttgatgttaatgaagttggcgaagttttagaaattggtgatggtgttgctagaacaagtggacttggaagtgtgatgagttctgagctggttgagtttccaaacaatgtatttggaatggctttaaatttagaagaagaaaatgttggtgcagtactatttggtgatagcagccttgtaaaagaaggtgacactgttaaaagaacaggtaaggtcgttgaagtaccagtcggaaaagagcttttaggtcgtgttgttgatcctcttggtcaaccaatggatggaaaaggtcctatcaatgccaaagaaactttaccaattgaaagaaaagcattaggtgttatgcaaagatttccagttaaagaacccctacaaactggattaaaatcaattgatagcatgattccgattggtagagggcaaagagagttaattattggagataggcaaacgggaaaatcagcaattgcaattgatgctattattaatcaaaaatccactcatagttcagatagcccagtatattgtgtttatgttgctgttggtcagaaggcatccacagttgctaagttagttgctgaacttgaagcaaacggtgcaatggagtatacaactgtagttgtagcaaatgcttcagatccagctccattacaatatattgctccttattcaggttgtgctatgggggagtattatagagacaacggtatgcatggtttaattgtttatgatgatttatccaaacaagctactgcatataggcaaatgtctcttgttttgagaagacctcctggaagagaagcatttccaggcgatgtattctatttgcatagcagattattagaaagagcttcaaagctttctgaagatttaggttctggttcgctaactgcacttccagttattgaaactcaagagggtgacgtatctgcttatattccaacaaacgtaatatcaattacagacggacagatttatttagatacaaact

SEQ ID NO: 273900 - DNA, 1537 bp, Unknown
  Bacterial polypeptide expressing nucleotide sequence isolated from the Sargasso Sea
atggaaataaatccttcagaagttacgaaaatattaaaagaacaaattaaaaaatttggagataaagctgaggttactgaggttggtcaagttttatcagtaggagatggtatagcaagaatttatggattagataatgttcaagctggagaaatggtagaattttctgatggttcgaaaggaatggcgttgaacctagaaagtgaaaatgtaggtgttgtaatttttggtgatgataaagcagtcaaggaaggtgatactgtaaaaagaactggtgcgattgttgatacaccagttggaaaagaattacttggtagagtagttgatggtttaggaaatccaattgatggaaaaggtgcattagataaaagcttaaaaagaagcagggttgaagtcaaagctccaggaataattccacgtaaatctgttagtgaaccaatgcagactggtctcaaatcaattgatagtctggttccaattggaagaggacaaagagaattaattattggagatagacaaactggtaaaacagcagtggctattgacgctattataaaccagaaaaaaattaacgagtcaggtgatgagaagaaaaaattatattgtatttatgtagccgtaggtcaaaaaagatctacagttagacagattgaaaaaacattagaagaagctggtgcaatggaatacacaacaatagttgcagcaacagcatcagatgcagcaccacttcagtttttagctccatacactggatgtactatgggtgaatattttagagataatggaatgcatgctttaataatatatgatgatttatcaaaacaagcggtcgcttatagacaaatgtctctattgttaagaagaccccctgggagagaggcgtatcctggcgatgtattttatttacatagtagattacttgaaagagcagcaaaattaggtgatgaacatggaggtggttctttgacagctcttccaatcattgagactcaaggaggtgacgtttctgcatttataccaacaaatgtgatctcaattactgatggacaaattttccttgaaactgaactttttaaccaaggtataagaccagcaattaacgttggtttatctgtatcaagagtaggatcctctgcccagacaaaggccatgaaaaaagtttcagggtcgatgaaattagaattggctcaatatcgagaaatggctgcatttgcacagtttggttcagaccttgatgcgtctactcaaaaattacttaaccgaggttcaaaattaactgaactattaaagcaaaaccaatattctcccatgacagttgcagaacaagtcatttctgtattttgtggagttagaggacatcttgatgatattgaacaaaaagatatttcaagttttgagaataaaattattgaaaaatgtaaagctgaaaagccagatatcattgaatcaatcacagcttcagggaaactcgaagatgacaaagagaaagaattgaatgaaattattttacaacttaagaaagattttaactcataaa

SEQ ID NO: 273901 - DNA, 877 bp, Unknown
  Bacterial polypeptide expressing nucleotide sequence isolated from the Sargasso Sea
atggccagtttagacgatctgaaaaaaaggatatcaagtgttaagtctacacaaaagattacaaaggcaatgaaaatggttgctgctgcaaaactgagaagagcacaggaaagtgcagaaaaaggcagaccttactcagataaaatgaataatattattttaaacttatcaaatggtatctctgatatagataatgctccaaaacttttatctggcaccggagaagataaagtacatttatgtattgtaatgacatctgatagaggtctttgtggaggttttaatacaaatattatcaaaaaagctaaactatattttcaaaaaattttagatgagggaaaaactttaaaaattattacagtcggaactaaaggttacgatcaacttaaacgtctttatggtgataatattatagagagaatatcatttaaagagtcaaaaaatgtaaattattttgatgctgaaaaagttggtaagatagttatagaaaaatttgataaaaatgaatttgacgtatgtgcaattttttataaccaatttaagaatgtaattactcaaattcctcaagaacaacaaatcattcctttaaaaacatctgaaaaagaggaaaattcatcagaggataattatgaatttgaacctgaagaagatgaaatactgagcaacttgttaccaaaaaacatttcaactcagatctttaaagcgatgttagagaactcagctagcgagcaaggttcaagaatgagtgcaatggacaatgcaaccagaaatgcaggcgaaatggttgacaaacttactattgagtataatagaagtcgtcaggcagcaattactaaagagttaatagaaataatttcaggagcagaaagtttataat

SEQ ID NO: 273902 - DNA, 1384 bp, Unknown
  Bacterial polypeptide expressing nucleotide sequence isolated from the Sargasso Sea
ttgagtaatcaaggcggagttcaatacagcaagattgctgagattaaaggaccacttgtaatcgttgatggtgtagacaatgcagcatttgacgagcttgtagaaattgaaacaactgaaggtgaaagacgtctaggtaaagtcttagaggttggaaacggcaaagcagttgttcaggtctttgaaggaacaacaggtctttctgtatctggaacaaatgcaaaatttgttggcaaagttatggaaatgcctgtatcagaccaagtacttggaagagtttttgatggtttaggaagagcaaaagacggtttacctgaaccagttgcagaatcatttttagatattaacggcgcaccaatgaacccagaacaaagagaatatccaaaagatttcattcaaactggagtttctgtaattgatggaatgcttactcttgtaagaggacaaaaacttccaatattttctggctctggtatgtcacacaacatcttagcagcacaaattgcacgtcaagcagcaatcattggaacagatgatagtttcgctgtagtatttgcagcaattggtgtgcaatacagtgaagcagaatatttcaaaagaagtttagaagaatctggtgcactaaaaagaagtgtactatttttgaatcttgcagacgatcctgcaattgagagaattatcacgcctagagtagccttaactgttgcagaatatcttgcatatgatttaggaatgcacgtactcgttattcttactgatatgacaaactatgctgaagcacttcgtgaaatcagtgcagcaagagaagaagtacctggaagaaaaggctatcctggatatctttacactgacctttctacaatttatgaaagagcaggaagattaagaggcaaaaaaggaagtgttacacaagtacctatcttaacaatgccatctgatgatattactcacccaattccagaccttaccggttacattactgaaggacaattggtacttggaagagatttgtttagacaaggtgtttatcctccaatcaacatcttgatgagtctcagtagaatcatgaaagacggaattggtgaaggaagtacacgtgctgatcatcaagaaatttcaaatcaaaattatgatgcatattctcgtgctcaagaagttagagcactagcaggaattgtaggaaaagcaggacttacaccagttgatcttaattacatgaactttggtgatgaatttgaaaagaaattcttgacacaagcaatagatgaaaacagaacaattgaggaaactctgggactacaatggaattgtgtctcaaaacttccaaaaaatgaattaaccaaagtcaaagacaaatacgtagaccaatactataaggaataat

SEQ ID NO: 273903 - DNA, 1780 bp, Unknown
  Bacterial polypeptide expressing nucleotide sequence isolated from the Sargasso Sea
atggtagcacaaggaaaaattgtttggattagtggacctgccgtcaaagctgatggtatggccgatgcaaaaatgtatgaaactgtatctgtcggagaatcaaaattaatcggtgaagttattcgtcttactggagacgtagcattcattcaagtttacgaatcaacctctggtctaaaaccaggtgaacctgtagttggtaccggtaaccctcttagtgtattactaggaccgggaattattggtcaaatttatgacggaattcaaagaccgctaaaggatttggctgcaaaatcaggctcatttatcggaagaggcattacaaccactcctgttgatatggaaaaacaatatcatttcacaccatctgtagcagttggtgatgaagtagaggcaggaaatatcattggaactgttccagaaacatcattaattgaacacaaaattctagtcccaccagatcacaaaggtggaaaaattacaaacattgtttcagaaggtgattatgcactagaaactgaaattgcaactgttgaaaaagacggtcaatcattcccattgaaaatgtatcacaaatggcctgttagacaaccaagaccatatctcaaaagatatgatccaactgttccgttacttaccggtcaaagagttattgacacatttttcccattagcaaaaggtggtactggttcaattccaggtgcattcggtactggtaaaactgtaacattacatcaaattgcaaaatgggctgactctcaagttgtagtctacattggatgtggtgaaagaggtaacgaaatgactgaggtactcgttgagttcccagaattaaaagatccaagaacaggaaaaccactcatggacagaactgtacttgttgcaaatacaagtaacatgccagtagcagcaagagaagcaagtatctacactggtgtaacaattgcagaatattatcgtgatatgggttatgacgttgtacttgtagcagattctacaagtagatgggctgaagcacttcgtgaaatgtccggaagattagaagagatgcctgcagaagaaggttatccatcatatctagcatcaagattagcagaattttatgaaagagcaggacgtgtccgagcaagaggttcacctgaaagagacggttctgtatctctggtaggtgcagtatctccatctggtggtgactttacagaacctgttacaacacatacaatgagatttatcaaaactttctgggctttagatgcaagtttagcatattcaagacattatccatcaatcaactggatgaactcctattctggctaccttgcagatatcgcaaaatggtggtctgaaaacattagtcaagactggctaagccttagaagtgaaacatacggaatcttacagagagaagatacactaaaagaaattgtaaaactactaggacctgaagcacttcctgatgaagaaaaattaatcctagaagttgcaagaatgattaagattggaatattacaacaaaactcatttgatgatgttgacacatattgtagtcctgaaaaacaattcaaattaatgaaattacaagttgacttttacaacaaaggtcaacaagcactaaaagacggcgcatcactagctgacattcgttctatggatgtaatctcactattactcaaagcaagaatggatgttaaagacgacgagatgccaaaattagataaaatcgaaactgatatggcagaacaattcaaaagtattacaggagttaaagttcaaaattgag

SEQ ID NO: 273904 - DNA, 177 bp, Unknown
  Bacterial polypeptide expressing nucleotide sequence isolated from the Sargasso Sea
aaccattctttgtcgcagaagttttcacaggctcaccaggtaaatatgtttctctggaggacagcattaaagggtttaatggaattctaaatggagactacgacgatcttcctgaacaagcattctatatggtaggaaccatagaagaggctgttgagaaagcaaaaacaatgtaat

SEQ ID NO: 273905 - DNA, 1081 bp, Unknown
  Bacterial polypeptide expressing nucleotide sequence isolated from the Sargasso Sea
gaaactcttggaagaattataaatgtaattggagaaccaattgatgaaagaggagaagttaaaacaaaagaaacttggccaattcacagagccgcacctgaatttaatgatcaatcaaccgaaacagaaatactagttacaggtattaaagttattgatcttcttgctccttatgcaaaaggaggaaaagttggtctttttggaggtgcgggtgttggaaaaacagttttgattatggaactgattaataatgttgcaaaagcgcatggaggtttttctgtttttgcaggtgttggagaaagaaccagagaaggaaacgatctttatcatgagatgatagagtcaggagtaatcaaaaaagatggagatggatcaaaagcagccttggtatacggacaaatgaatgagcctcctggagcaagagctagagttgcactaacgggattaactgtagcagaatattttagagatcaagaaggacaagacgttcttttctttgtggataatatttttagatttactcaggcaggttcagaagtttccgctcttttaggaagaatcccatctgcagtaggttatcaaccaactttagcaacagatatgggtaaccttcaagagagaattacaacgacaaacaaaggatcaattacttctgtacaagctatttatgttccagctgatgacttgactgacccagctccagcaacttcatttgctcacttggatgcaacaactgtactttcaagacaaattgcagaaattggtatttatccagctgttgacccacttgattctacttcaagaattttggacccaagaattgttggtgatgaacattatagagtggctagagatgtacaaaaaatattacaatcttataaatcattacaagatattattgctattcttggtatggatgaattgtctgaggaagataaattagttgtagcaagagcaagaaaaatacaaagatttttatctcagccattctttgtagctgaagtttttaccggatcacctggaaaattaaatgacctggaatcaacaatcaaaggctttgatgctatttgtaaaggtgaat

SEQ ID NO: 273906 - DNA, 1146 bp, Unknown
  Bacterial polypeptide expressing nucleotide sequence isolated from the Sargasso Sea
aattggtccagttctagatgtagaatttccagctgggaaattgcccaaaatattaaatgctttaagaattgaagctaaaaatccagctggacaagacatagcactcactgcagaagttcaacagctactaggtgaccatagagtaagagcagtggcaatgagtggcacagacggccttgtaagaggcatggaggcaatcgacacaggggcgccaatatctgtacctgtaggagaagcaactttaggaagaatatttaatgttttaggagaaccagtagatgagcaaggtcctgtgaatactaaagatactgctccgattcatagagcggcgccaaagttaactgacctagaaactaagccaaaagtttttgaaactggtattaaagtcatcgaccttttggctccttacagacaaggaggaaaagttggattattcggaggcgctggagttgggaaaacagttcttatacaagaattaattaataacattgcaaaagagcacggtggagtttctgtttttgggggtgtaggggaaagaactagagaagggaacgatttgtatgaagaatttaaagaatcgggagttataaatgcagatgatttaactcagtcaaaagttgccttatgttttggacagatgaatgaaccgcctggcgcaagaatgagagttggcttatcagcacttacaatggccgaacattttagagatgtgaataaacaagacgtcctactttttgttgataacatttttagattcgttcaagctggttctgaagtatctgcattacttggaagaatgccttcagctgttggataccaacctactctgggaactgatgttggtgaattgcaagaaagaattacatccacattagaagggtcaattacatctattcaggctgtttacgtacctgctgatgacctaacagacccagctccagctacaacctttgcccatttagatgctactaccgtgcttgccagggctcttgcagctaagggaatttatccagcagttgatccattagactcaacgagcacaatgttacaaccatcagttgttggcgatgagcattacaaaacagctagagctgtccaatcaactttacaaagatacaaagagcttcaagatattatcgcaattct

SEQ ID NO: 273907 - DNA, 976 bp, Unknown
  Bacterial polypeptide expressing nucleotide sequence isolated from the Sargasso Sea
atgagtagtgaaaatttaggacaggttattcaagttttaggaccagttatagacgtggagtttgtcaccgaagagcttcctccaattaatactgcattgaagttgactaatcctcttattagtgaggcgacttggaatttaaccattgaggttgcacagcaaattgggagtaaaagagttaggtgcattgctatggatacaactgatggaattaaaagaggagaaaaagtcttagatactggaatgccaattagcatcccagttggtaaaaatgctttaggaagaatgatgaacgttattggtgaaccaatagatggagtagggcctatagaatccgaatctcttagtccaattcataagcctgcaccatcttttcaagagcaaagtacaaaaacagaagttttcgaaacaggtattaaagttattgatttgctagcaccattcttaaagggtggaaaaattggtttgtttgggggtgcaggagttggtaaaactgtgcttttaatggagcttattaataatgttgctaaagaatacggaggatattcatttttcgctggtgttggggaaagaactagagaaggaaatgacctttatatggaaatgaaagaatccggtgttcttaaaaataccggactagtttttggacaaatgaatgaaccacccggtgccagagctagggttgctttaactggcttaacacaagcagaacattttagagatcaagaaggccaagatgttttattatttgtcgataatatatttagatttacccaagctggttcagaagtatcagctcttttaggtagaataccgtcggctgttggataccagcctactttggcaactgacttaggtgcattacaggaaagaataacgtcaactgtaaaaggttctataacctcagtccaggcgatttatgttccagctgatgatttaacagatcctgcgcctgccaccacattcgctcatttgg

SEQ ID NO: 273908 - DNA, 664 bp, Unknown
  Bacterial polypeptide expressing nucleotide sequence isolated from the Sargasso Sea
atgagaaaaggaaaaatcacacagataattggagcagtagtagatgtaaaatttgatggagagttgccagaaattttaacagcattagaatgcagcaatgcaggcaatagattagttttagaagttgcacaacaccttggagaatcaagtgtaagaacgattgctatggatgcaacggaaggtttaaaaagaggagacgaagttacagacacagcttcaccaattaaagttcctgtagggccagagacattgggaaggattgtaaatgttataggagaaccaattgatgaaaaaggagaagttaaaactaaagaaagttggcctatacatagagctgcaccagaatttaacgatcaatcaacagaaactgaaattttagttacaggaattaaagtagtagatttgttagcaccttatgcaaaaggtggtaaaatcggtttatttggaggtgcaggagttggaaaaacggtaattattatggaattgataaataatattgcaaaagctcatggaggattttctgtttttgctggagttggtgaaagaacaagagaaggaaatgatctgtatcacgaaatgatagaatcaggtgtaattaaacctgaggggcctggatcaaaagctgcattggtttatggtcaaatgaatgaacctccaaggagca

SEQ ID NO: 273909 - DNA, 706 bp, Unknown
  Bacterial polypeptide expressing nucleotide sequence isolated from the Sargasso Sea
tcacatcttgcacacgcaaattccgaatacaaacatccttatcttaataagcgagatgagattaaacgtataggattaataatagtttcaactgatcggggactatgtggagggttgaatgcgaatatgtttcgtatgttattaaaaaacatacaatcatgggagcaagaaggtaaagaggttgatctttgtgttattggaactaaggcagctggtttttttgggtcaattggtgcaaatattgtaggtcaagtaactcacataggcgatgaaccaagcttagaagaattacttggcactataatgataatgttaaatgcttataaggaagaaagaatagacgaattgtatttggtatcaaatcaattcgtaaattcaatggtgcagacacctacaatggaacaacttattcctggtaaacccgacgagaaagaaaagtatgcaagtcattgggactatatttatgagccggatgctgaggaagttctagatggatttttatcacgttatatcgagtcacaagtctacgctggtgtgatagaaaatatttcatgtgaaatggcagctagaatggtcgccatgaaaagcgctactgaaaacgcgggcgcgcttatagatgagttgcaacttatctataacaaggcgaggcaagcagcaattactcaagagttatcagagattgttgcaggtgctgccgctgtataat

SEQ ID NO: 273910 - DNA, 1075 bp, Unknown
  Bacterial polypeptide expressing nucleotide sequence isolated from the Sargasso Sea
aatcaacctctacaaactggaattaaagccgtagatagtatgataccaattgggagaggtcaaagagaattgataattggagacaggcaaacaggaaaaaccgctgttgcaatagacactataattaatcaaaaatatacgcatcaaactgatcagcctgtatattgtatttatgttgcaattgggcaaaaagcatcaactgttgcatccattgtatctgaattagaatccaatggcgctatggaatatacaactgttgtagcggcaaatgcatcagatgaggcacctctacaatatattgcaccatattcaggctgtgcgatgggagaatattacagggataacggtaagcacggtttgatcgtttatgatgatctatctaagcaagccgtggcatatagacagatgtcgctggttttgagaaggcctcctggcagagaagcatttccaggcgatgtattttacctccatagtcgcttacttgaaagagcatcaaaactttctagcgaattgggtggaggttctttaactgcacttcctataattgaaactcaagaaggagacgtctctgcatatattccaactaatgttatctcaattactgatggtcaaatttatttggaaaaaaatctttttaactcaggtataaggccggcaattgatgttggtatctcagtatcaagagttggaggtaacgctcaaataaaagcaatgaaaggtgtcgcaggtacgttgagactcgatcttgctcaatatagagagttagaagcatttgcaaaatttggttctgaccttgataagagcacacaagctcaattgaccagaggagaaagaatggttgaggttcttaagcaaggtcaatacatgcctatggatgtggagaagcagatttcaatcatttttgcagcttctaaaggttttttggacaatattgatgtagaaaaggtttcagtttatgaaaacgacctttttgactatctcgatgcaaataattctgaagatttaaaagcaatagttagcgaaggcttgatttcagactcagtagaaaagaatctagaaaaagcaatttctgagt

SEQ ID NO: 273911 - DNA, 1381 bp, Unknown
  Bacterial polypeptide expressing nucleotide sequence isolated from the Sargasso Sea
gatggttgaaggcaaaatcgtgcaatgcatcggcgccgttatcgacgtggagtttccgcccgggcacattccaaagatctacgacgcgctggtgctggaaggctcggacctcacactcgaagtccagcagcagttgggcgacggcgtagtccgcaccatctgtctgggctcgtcggacggcttgcgccggggcctgatggtgaagaataccggtcacccgatttccgtgccagtcgggagggcaaccctcggccgcatcatggatgtactggggcgtccgatcgatgaagcagggccgatcgatagcgagcacacgcgttcgattcaccagaaggcgcccgcattcgaggaattgtcgccgtcgacggaactgctcgaaaccggcatcaaggttatcgacctgatctgcccgtttgcgaagggcggtaaggttggcctgttcggtggcgcaggcgtgggcaagaccgtgaacatgatggaactgatcaacaacatcgctaaagagcacggtggttactccgtgttcgccggtgttggcgagcggacccgtgaagggaacgacttctatcacgagatgaaggattcgaacgttctcgacaaggtgacgctcgtgtacggccagatgaacgagccgccgggcaaccgtctgcgtgtcgcgctgaccggtctgacgatcgctgaatactttcgtgacgaaggtctggacgtgctgttcttcgtcgacaacatctaccgtttcacgctggccggtaccgaagtgtcggcactgctcggccgtatgccgtcggccgtgggctatcagcctacgctggctgaagaaatgggtaagctgcaggagcgtattacgtcgaccaggactggctcgattacatcggttcaggccgtgtacgtccctgcggatgacttgaccgacccgtcgccggctacgaccttcggccacctggacgcaaccgtcgtgttgtcgcgtgacatcgcttcgctgggtatctatccggccgtggacccgctcgattcgacctcgcgtcagatcgacccgaacgtgatcggcgaagagcactactcgatcacgcgtggcgtgcagcaaacgctgcaacggtacaaggaactgcgcgacattatcgcgattctgggtatggacgaactggcgccggaagacaaactcgccgtggcgcgtgcgcggaagatccagcgtttcctgtcgcagccgttccacgtcgccgaagtattcacggggacgccgggcaaatatgtatcgctgaaggaaacgattcgtggcttcaagatgatcgtcgacggcgaatgcgacagcctgccggagcaggcgttctacatggtcggcacgatcgacgaggctttcgaaaaggcccggaaaatgaagtag

SEQ ID NO: 273912 - DNA, 1138 bp, Unknown
  Bacterial polypeptide expressing nucleotide sequence isolated from the Sargasso Sea
aatgccagtatccgaacaagtactcggtagagtctttgatggtttaggaagagcaaaagacggtttaccagaaccagttgcagactcatttttagatattaacggagcaccaatgaatccagaacaaagagaatatccaaaagatttcattcaaactggagtctctgtaattgatggaatgcttacacttgtcagaggacaaaaacttccaatattttcaggttcaggtatgtcacataacatcttggcagcacaaattgcacgtcaagcagcaatcattggaacagatgatagttttgctgttgtatttgcagcaattggtgtgcaatacagtgaagcagaatatttcaaaagaagtttagaagaatctggtgcactcaaaagaagtgtactatttttgaatcttgcagacgatcctgcaattgagagaatcatcacacctagagtagcattaactgttgcagaatatcttgcgtatgatttaggaatgcacgtactcgttattcttactgatatgacaaactatgcagaagcacttcgtgaaatcagtgcagcaagagaagaagtacctggaagaaaaggttatcctggatatctctatactgacctttctacaatttatgaaagagcaggaagattgagaggtaagaaaggaagtgtaactcaagtacctatcttaacaatgccatctgatgatattactcacccaattccagatcttaccggttacattacagaaggacaattggtacttggaagagatttgttcagacaaggtgtttatcctccaattaacattttgatgagtcttagtagaatcatgaaagacggaattggtgaaggaagtacacgtgctgatcaccaagaaatttcaaatcaaaattatgatgcatattctcgtgctcaagaagttagagcattagcaggaattgtaggaaaagcaggacttacgccagttgatcttaattacatgaactttggtgacgaatttgaaaagaaattcttaacacaagcaatagatgaaaacagaacaattgaggaaactttgggattacaatggagttgcgtctcaaaacttccaaagaatgaattaactaaagttaaagacaaatacgtagatcaatactataaggaataa

SEQ ID NO: 273913 - DNA, 1525 bp, Unknown
  Bacterial polypeptide expressing nucleotide sequence isolated from the Sargasso Sea
tatggaaataaaaactgatcaattaacacaattacttcgagaacaaattgaaaaatttgatggttcagtagacatctcagaagtaggtgaagttattgaggttggggacggtgttgctcgtgtctcaggccttgagaatgtaatgagctctgagttagtagagctaccaaatggtgtttttggaatggcgttaaatcttgaagaagataatgttgggcttgtgctttttggagaatctcgtttggtcaaagaaggggaccttgctaaaagaacaggtcgtgtagtagaagtccctgtcggagatgccatgcttggtagggtggtcaatccattaggccaacctattgatggtaaaggagctattaatacagagcattcattgcctattgagcggaaagcattaggtgttatggcacggcacccggttaaagaaccgttacaaacaggtattaaagctattgatagtatgatacctattggtagaggccagagagaattgataattggtgaccgccaaacaggtaaaacggctgttgcaatagatacgattattaatcaaaaatatactcacaatacagatgatcctgtctattgtatctatgtagcgattggacaaaaagcctcaactgttgctgcattagtgaaagaattagaggataatggagcaatggaatacacaacagttgtagcagcaaatgcatccgaccctgcgccaatgcaatatattgcaccgtatgcaggagctgcaatgggtgaatattttagagacaatggtaaacatgctcttattgtttatgacgatctttccaagcaggctgtagcctaccgtcaaatgtctttggtattgcgtcgtcctccaggaagagaagcattccctggagatgttttttacctgcatagtcgattattagaacgtgcatcaaaactctctacggatcttggaggtggctcgttaacagcattacctattattgagactcaggaaggtgatgtatctgcatatataccaacgaatgtcatatctattactgatggtcagatctatttggaaaccaatctattcaactcaggaataaggcctgcgattgatgtcggtctatcagtatctagagtagggggtaatgcacagatcaaggcaatgaagtctgttgcagggaccttacgtttagaccttgctcaatacagagagttagaggcttttgcgaaatttggttctgacctagatcaagcaacgctagctcagcttactcgcggagaacgaatggtagagatattaaaacagaatcagtatgtgccagtggatgtggaaaaacaagtggctataatatttgcggcttctaaaggtcatttagatgatctgcctgttgaacaaatatcagactttgaatccggtttatttgaatatctagatgcaaatgcaaaagacagtcttgactctatagttagtgaaggcacgatcagtgatgaaacagcagaaaaacttgaaaaggcaattaaagattataaaggtggatttaacgcataa

SEQ ID NO: 273914 - DNA, 877 bp, Unknown
  Bacterial polypeptide expressing nucleotide sequence isolated from the Sargasso Sea
atggcaagtttagacgatttaaaaaaaagaatagcaagtgttaagtctacacagaaaattacaaaagctatgaaaatggttgccgcagcgaaacttagaagagctcaagaaagtgctgaaaagggaaggccttattcggaaaaaatgaataatgtcattttaaatttgtctagtggcatatcagataaagaaaatgctccaaaacttttatcaggaactgggaatgacaaggttcatttatgtgtcgtaatgacatcagatagaggattatgtgggggtttcaattctaatataattaaaaaagccaaaagttatttctcaaaaattttaagtgaaggaaaagaactcaaaatcataactgtaggttcaaaaggaaatgatcagttaaagagaatgtacggtgataaaattattgaaaatatttctttcaaagagtcaaaaaatgccaattactttgacgctgacaaggttggtaagatagtaattgataaatttgaaagtagtgaatttgatatatgcactattttttataaccaatttaaaaatgtgatcactcaaattcctcaagcccaacagataatccccttgaatagcgaggatagtgaagagaatagttcagaggaaagttatgaatttgaaccagatgaagatgagattttgagcaatttattgccaaaaaatatttcgacacaaatatttaaagcaatgttagagaattcagctagcgaacaaggatcaaggatgagtgcaatggataacgcaacccgaaacgcaggtgaaatggttgacaaacttactatccagtataatagaagtcgtcaggcagcaattacaaaagaactaatagaaatcatatcaggagcagaaagtttataat

SEQ ID NO: 273915 - DNA, 868 bp, Unknown
  Bacterial polypeptide expressing nucleotide sequence isolated from the Sargasso Sea
ccctgctccatgcaagtttatgctccttttgccggagctgctattggagaatactttagagacactggaagaccagctttaatcatttatgatgacctttccaaacaagcagttgcttaccgtgaagtttcattattgttaagaaggcccccaggaagagaagcttatcctggagatgtcttttaccttcattctagacttcttgaaaggtcagcaaaggttattaatgacgatgatatagcaaaaaacatgaatgatcttccagaaccattgaaacccgttgttaaaggtggaggatctttaacagcacttccaattattgagactcaagcaggagatgtttctgcatatattccaactaatgtaatttcaattactgatggtcaaatatttttagaatcggacttgtttaattctggtgtacgtccggcaattaacgtaggaatttcagtttctcgagttggaggatcagctcagattaagtcaatgaaaaaagtagcagggacattaaaacttgatcaagctcagtttagagaactgcaagcatttgctaagtttggatcagacttggaccctgtgactttaggggttattgaaaaaggtatgcgtaatgttgaaatattaaagcaagcccaaaatgatcctttcactgttgaagatcaagtcgcaataatttatttaggatcaaaaaacttgttaaaatctgttccggttgataaagtaaaagagtttgaaaagaagtttttagaacttatgaatttaaaatacagaaagactcttgattcaataaaagaaggaaaattaacagatgatgtaattactgctttagaaaaagttggggctgaaataagttcatcatacgaataat

SEQ ID NO: 273916 - DNA, 1462 bp, Unknown
  Bacterial polypeptide expressing nucleotide sequence isolated from the Sargasso Sea
aatggtagcaactccatcaacttcttcacaaacgaaaggcgtagtacgtcaggttattggcccagttctagatgtagaattcccagcagggaaattgcctaaaatattaaacgctttaagaattgaagcaaaaaatcctgcgggacaagacatagctcttactgcagaggtgcaacagctcctaggtgaccatagagtcagagcggtggcaatgagtggcacagacggtcttgtgagaggcatggaggcgattgacacaggcgcgccaatatccgtacctgtaggagaagcaactttaggaagaatatttaatgttttaggagaaccagtagacgaacaaggtccagtaaaaactaaagacactgctccaattcatagagctgctccaaaattaactgacctagaaaccaagccaaaagtttttgaaacaggaataaaagttatcgaccttttagctccctacagacaaggaggaaaagttggcttatttggaggcgctggtgttgggaagaccgttcttattcaggagttaattaataacattgcgaaggaacatggtggagtttctgtttttggaggtgtaggagaaagaaccagagaagggaacgatttatacgaagaatttaaggaatcaggagttatcaatgcagatgacttaactcaatcgaaagttgccttatgttttggacagatgaatgagccgccaggtgcaagaatgagagtaggcttgtctgcccttacaatggctgagcattttagagacgttaataaacaagacgttctactttttgttgataacattttcagattcgttcaagctggctctgaagtatcagctttacttggaagaatgccttcggctgttggatatcaaccaacacttggtactgatgtgggtgaattgcaagagagaattacatctacactagaaggatcaattacatccattcaggctgtttatgtacctgctgatgacctaactgaccctgctcccgcaacaacctttgcacatttagatgccaccactgtgcttgctagagctcttgcagctaaaggaatttatccggcagttgatccattagactcaacaagtactatgcttcaaccatctgttgttggcgatgagcattacaagaccgctagagctgttcaatcaactttacaaagatacaaagaattacaagatattattgcaattcttggtttagatgagctatctgaagaagatagactaacagtcgacagggctagaaaaattgaaaaattcctttcccaacctttctttgtagctgaaatatttacaggaatgtctggtaagtacgtgaaattagaagataccatagctggtttcaacatgattttatcaggtgaattagatgatttacccgaacaggcattttacttagttgggaacattgatgaagttaaagcaaaggctgaaaagataaagtcagaaaaataa

SEQ ID NO: 273917 - DNA, 1008 bp, Unknown
  Bacterial polypeptide expressing nucleotide sequence isolated from the Sargasso Sea
cttacgcaaaaggtggaaaaatcggtttatttggtggagccggtgttggaaaaactgttcttataatggaattaataaacaacgttgcaaaagcacatggtggattttcagtttttgctggagttggagaaagaacaagagaagggaatgatctttaccatgaaatgatggactctggtgtaattaaaccagatggagatggatcaaaagcagctcttgtttacgggcaaatgaatgaacctcctggtgcaagagcaagagtagctcttactggattaacggtagctgaatattttagagaccaagaaggacaggatgtactttttttcgtggataatatttttagatttacacaagcaggctcagaggtatcagcactgcttggaagaattccatcagctgttggatatcaaccaactttagcaactgacatgggtaatttacaggagagaattacaactacaaacaaaggttcaattacatctgttcaagcgatttatgtacccgcggacgatttaacagatccagctcccgcaacatcatttgctcacttagatgctacaacggttctatcaagacaaattgcagaaataggaatttatcctgcagttgaccctctagattctacttctagaatattagacccaagaattgttggagaggaacattacagagtagcaagagaagtgcaaaaagttttacaaacatataaatctctacaagatattatagcaatcttaggtatggatgaactttctgaagaagataaattaactgtggcaagagctagaaaaattcaaagatttttatcacaacctttctttgtggcagaagtatttacaggttctcctggtaaactagttgaattagagtctacaataaaaggatttgatgcaatttgtaaaggggagtacgatcatttgccagaggcagctttttatatggttggaactatcgaagaagcaattgaaaaagctgaaaaaatggcaaaagaggcagcagcttaat

SEQ ID NO: 273918 - DNA, 1504 bp, Unknown
  Bacterial polypeptide expressing nucleotide sequence isolated from the Sargasso Sea
catggtttccatccgtcccgacgagatcagcgccatcctcaaacaacagattgaggactacgacaagtcggtttccgtcagcaacgtcggcaccgtcctgacggtgggcgacggcatcgcccgcgtctatggcttgcagcaggccatggccggtgaactcctcgagttcgaggacggcaccgaaggcatcgctctgaacctcgaagacgacaacgtcggcgcggtgctgatgggcgagggctacggcatccaggaaggcagcacggtgaaggccaccggcaagatcgcttccgtgcccgtgggcgaggccatgctcggtcgcgtcgtcaactccctcggccgcgccatcgacggcaagggtgaaatcgccaccagcgagacgcgcctgatcgaatccatggcgcctggcatcatccagcgcaagtcggtgcacgagccgatgcagaccggcatcaccgccatcgacgcgatgatccccgtcggccgtggccagcgcgaactgatcatcggtgaccgccagaccggtaagaccgccatcgcgatcgacacgatcctgaaccagaaggatcaggacatgatctgcgtttacgtggccgtcggtcagaaggctgcttctgtggccaacgttgtggaggtgctgcgtgagcgcggtgccctcgattactccgtgatcgtggccgccaacgcttctgagcccgcagctctgcagtacctggctccctacaccggcgcctccatcgccgagtacttcatgtacaagggcaaggcaaccctggtgatctacgacgacctgtccaagcaggccgccgcttaccgccagatgtcgctgctgctccgtcgtccgcccggtcgtgaggcctatcccggcgacgtcttctactgccacagccgtctgctggagcgtgccgccaagctctccgatgccatgggcaaagggtccatgaccgccttgccgatcatcgaaacccaggccggtgacgtgtcggcctacatccccaccaatgtgatctcgatcacggacggtcagatcttcctcagctccgacctgttcaactccggcctgcgtcccgccatcaacgtgggtatctccgtgagccgggtgggtggtgccgcccagaccaaggcgatcaagaagatcgccggcaccctgaagctggaactggctcagttcgctgagctggccgccttctcccagttcgcctccgacctcgatgcgtccacccagcagcagctggagcgcggcaagcgcctgcgggaactgctgaagcagccccagttcagcccgctgatcctggctgagcaggtcgccatcgtgtatgccggcgtcaagggcttcatcgatgcggttcccgtcgacaaggtggtcgacttctcccgcgaactgcgtgagtacctcaagtccaacaagcctgagttcatcaccgaaatccaggagaagaaggtgatgagccctgaagctgaggcgatcctcaaggacgccatcagcgaagtcgtgtccaccctc

SEQ ID NO: 273919 - DNA, 730 bp, Unknown
  Bacterial polypeptide expressing nucleotide sequence isolated from the Sargasso Sea
atggccgacacggcaagcaacaatattggcagcgtttcccaggtgctgggcgctgtcgtcgacgttcagttcgaaggcgaacttccaaatatcatgaacgcgctggaatgcgataacggtggaaaccggctggttctcgaagtggcgcagcatctcggtgaaagcaccgtgcgcaccatcgcaatggatacgaccgaaggtttggtaaggggtcaggaggtcagcgataccggcacgccgatccagatgcccgtcgggcctgagacgctggggcgcatcctgaatgtcatcggcgagccgatcgacgaacgcggtccgctgaacaccaccaagaagcttcctatccatcgtgaagcacccgaattcaccgatcagtccaccgaaaccgacgttcttgtaaccggtattaaggttgtcgatctgcttgccccgtattcgcgtggcggcaagatcggcctgttcggtggtgccggtgtcggcaagacagttctgatcatggaactgatcaacaacgtcgcgaaggcgcatggcgggtactcggtattcgccggcgttggcgagcgaacgcgcgaaggtaacgatctctatcatgaaatgatggaatccggcgttatccagcccgatggcgaatcgaaagctgcgctggtctatggacagatgaacgagccgcccggcgcgcgtgcgcgtgtcggcctcagcggtctgacgctggccgaatatttccgtgacg

SEQ ID NO: 273920 - DNA, 546 bp, Unknown
  Bacterial polypeptide expressing nucleotide sequence isolated from the Sargasso Sea
aagtttttgcattattaggaagaattccttctgcagtaggatatcaaccgacattagctactgatatgggaaatctccaagaaagaattacaactacaaacaaaggttctattacgtctgttcaagcaatatatgtaccagcagatgacttgactgatcctgcgccagcaacatcattttcacacttagatgcaacgacagtattgtcaagacaaatagctgaaattggaatttatcctgcagtagatcctttggattccacatctagaattttagatcctaggattgttggtgatgaacattatagagttgcaagagaagttcaaaaagttttacaaacatataaatctttacaagatattattgcaatcttaggtatggatgaactatcagaagaagacaaattaattgttgctagagcaagaaaaatacaaagatttttatcacaaccattttttgtggcagaagtatttacaggatcaccaggaaaacttgtcgacttagaatcaacaattaaaggttttgatgcaatttgtaaaggctgag

SEQ ID NO: 273921 - DNA, 545 bp, Unknown
  Bacterial polypeptide expressing nucleotide sequence isolated from the Sargasso Sea
gaacaaaggttcaatcacatctgttcaggcaatttatgtacctgcagacgatttgactgatcctgcgcctgcaacttcgtttgctcacctagatgcaacaactgtactatcaagacagattgctgaaattggaatttatccagcagttgatccattagactcaacgtctagaattttggatccaaggatagttggtgatgagcattatagagttgctagagaggtacaaaaagttctacaaacttataaatctttacaagatataatcgcaattttaggtatggatgaattatctgaggaagataaacttgttgtcgcaagagctagaaaaatacaaagatttctttctcaaccattctttgttgcagaagtatttactggttcaccagggaagcttgttgacttagaatcaacaatcaaaggctttgatgctatttgcaaaggtgaatatgatcatttgccagaagctgcattttatatggttggtactattgaagaagctatccaaaaagctgagaatttagctaacgaagcagcagcataat

SEQ ID NO: 273922 - DNA, 1060 bp, Unknown
  Bacterial polypeptide expressing nucleotide sequence isolated from the Sargasso Sea
actgaaaacagaaattcttgtaactggtataaaggttattgacctgttagcaccttatgcgaaaggtggaaaaattggattatttggtggagctggagtaggtaaaacagttttaattatggaattaattaataacgttgcgaaagctcacggaggattttcagtttttgcaggagtaggtgaacgaactagagaaggaaatgacctttatcatgagatgatggactctggagtaataaaaaaagatggtcctggatctaaagctgcactagtttatggacagatgaacgagcctccaggtgcaagagcaagagttgcgcttacaggtttaacagttgctgagtatttcagagatcaggaaggtcaagacgttcttttttttgttgataacatttttaggtttactcaagcaggctcagaggtttctgctcttttaggaagaattccgtctgcagttggatatcaaccaacactagctacagacatgggaaatctacaggaaagaattacaacaacaaacaagggttcaattacatcagttcaagcaatttatgtaccagctgacgacttaactgatcctgctccagcgacttcgtttgcgcacttggatgcaacaactgtactttcaagacagatcgctgaaattggtatttatccagctgttgatccattagattctacatccagaattttggacccaagagttgtgggagatgaacactacaaggtagcaagagatgtacaaaaaatattacaatcttataagtcacttcaagacattattgcaattcttggtatggatgaattatctgaagaggataaattagtagttgctagagccagaaaaattcaaagatttttatctcaaccgttttttgtagctgaagtttttactggttcacctggaaaattagttgatttagaatcaactatcaaaggttttgatgctatttgtaaaggtgaatacgatcatttaccagaagcagcattttatatggttggtactattgaggaagcaattgaaaaagctaagaaaatggaaaaagaagcagctgcttga

SEQ ID NO: 273923 - DNA, 574 bp, Unknown
  Bacterial polypeptide expressing nucleotide sequence isolated from the Sargasso Sea
atgagaaaagggaaaataacacagattattggggcggtagttgatgtaaaatttgaaggagaactaccagaaattttaacagcattagagtgtgataatggtggaaatagactagttttagaggttgctcaacatttaggagagtcaagtgtgagaacgattgcaatggatgcaactgagggacttaaaagaggagatgaggtaacagatactgcagcaccgattaaagttcctgtaggaccagaaacactaggaagaataataaatgtgattggtgaaccaattgatgaaaagggtgatgtaaaaagttcagataattggccaatacatagagcagctccagaatttaacgatcaatctacagaaactgaaatacttgtaacaggtattaaagttattgatcttttagctccctatgcaaaaggaggaaagattggtttatttggtggtgctggtgttggaaaaacagttctgatcatggaattaatcaacaatgttgccaaagctcatggtggattttcagtttttgccggcgtaggagaaagaactagagaaggtaatgatttgtatcacg

SEQ ID NO: 273924 - DNA, 1219 bp, Unknown
  Bacterial polypeptide expressing nucleotide sequence isolated from the Sargasso Sea
gatgctttaggtagaccaatagacggaaaaggtgaagtaaaatcaaaccacaactctccgatcgaagttgtagcacccggcgttattgatagaaagtcagtggaccaaccagttcagacaggcattaaatctattgatgttatggttccaattggcagaggccaaagagaattaataattggagacagacaaacaggaaaaacagccattgctattgacacgattatcagacaaaaagactcaggcattacctcggtctatgttgctattggacaaaaacaatcgactgtagcgactgtcgtaagacagcttgaagaagcagacgcactaaaaaacacaatagtcgtttcagcaagtgcggcagaaagtgcagcattacaattcctggcgccctattcaggatgcactatgggcgagtattttagagacaaaggtgaagatgcattaattatttatgatgacttatcaaaacacgctgttgcttacagacaaatctcactcttactaaaaaggcctccaggcagagaagcttttcctggtgacatcttttatcttcactcaagacttcttgagagagcctcaagggtaaatgaagattatgtagagagacttacagaaggaaaagtaaaaggaaaaacaggctctttaactgccctacctataattgaaacacaagcaagtgatgtctctgcatttattccaacaaatgtcatatcaattaccgatggtcagattttcttggaaaccgacctcttcaattcaggcataaggcctgcaattaatgttggtatttctgtgtctcgtgtaggtggagccgcgcaaaccaagattattaaaaagttaggtggtactgtaaagttggctctcgctcagtttagagaactagaatctttttcacagtttgcttctgacctagatgatgcaacaaaagaacaactagaaaatggccaaagaattacagagctctttaaacaaactcagtttgctccaagatcagtggcttgcatagctattgtcctttatgcaattgaaaacaaatatttaacagatgtcgaaaaagacaaaatgcagtcttttgaagaaaacttaagaacacattttaaatcaaattatggggatgtatgggaagaggtcaataaaacaggcgactggaatgatggtcttgataagaaatttaaaaagattgtaagttcatttatgaaagagggttcttggtaaa

SEQ ID NO: 273925 - DNA, 844 bp, Unknown
  Bacterial polypeptide expressing nucleotide sequence isolated from the Sargasso Sea
agctagtgtaaagtctacacagaaaattacaaaagctatgaagatggtagcagcagcaaaacttagaagagcccaagaaagtgctgagaaaggaagaccttattcagaaaaaatgaataatataattctgaatctttcaaatggaatttcggacaaagaaaatgccccaaaattattgtctggatcgggtaataataaaattcatctttgtgttgttatgacttctgacagaggtttgtgtggaggatttaattcaaatataattaaaaaagctaagagttatttcactaaactttcgaaagatggaaaagatttaaagatcattactgtaggttcaaaaggtaacgatcaacttaaaagaacctatggcgataaaataattgcaaatatttcatttaaagagtctaaacatgctaattattttgacgctgaaaaagttagtaaaatgataattgaaaaatttgaagctgaagagtttgatgtttgtactattttttacaatcaatttaaaaatgtaattactcaaattccccaagctcaacaaataattcctttaaatattgaaaattcagaggaaaaaaaatctgaggatagttatgagtttgaaccagatgaagatgagatacttagcaatttattgccaaaaaatatttcaacacaaatatttaaggcgatgttagagaattcagctagtgaacagggctcaagaatgagtgcaatggataatgcgacccggaacgcaggtgaaatggttgacaaacttactattgagtataatagaagtcgtcaagcagcaattacaaaagaattaatagaaatcatatcaggagcagagagtttataa

SEQ ID NO: 273926 - DNA, 1208 bp, Unknown
  Bacterial polypeptide expressing nucleotide sequence isolated from the Sargasso Sea
gatgtctaggccaaaaggaaaaattactcaagtaatgggggcggtagttgatgttcaatttgataaccaccttcctgaaattctcaatgcccttgaaacaaaaaatgatggtcaaaagttaatattagaggttgctcaacatcttggtgaaaatacagtaagaacaattgctatggatagttctgaaggattagttagaggagcaattgttgaagatgctggagctccaatttctgttcctgtaggaaatcctacattaggaagaattttaaatgttgtgggagaacctgttgatgaacaaggtcccataaaagctaaagaattaagacctatacaccagcctgctccggaattttctgaacaatcaacagatacagagcttttaaccactggaataaaagttattgatttattggcaccttattctaaaggtggaaaggttggtctttttggtggagcgggtgtaggtaaaacagttttaattatggagttaattaataatatagccaaagtacactcgggattttctgtatttgcaggagttggagagcgaacaagagaaggaaatgacctttatcatgagatgattgaatcgggtgttattaatccaaaaaaattagaagaatctaaagtatctttagtttatggtcagatgaatgaaccaccaggtgcgagagcaagagtaggattaactggcttaacccttgcagagcaatttagggaccagtctggtacagatgtattgttttttgttgataatattttcagatttacacaagcaggttctgaagtttctgcccttttaggccgtattccttctgcagttggttaccagcctacgcttgctactgatatgggagcgttacaagaaagaataacatctacaaaggcgggatctataacttcagtccaagctatatatgtaccagctgacgatctaactgatccagccccagcaacttcttttgctcaccttgatgcaactacagttttaagcagggctatttctgaattaggaatatatccagctgttgatcctttagattcaaatagtaggcttatggatccattaattgttggtgaagagcactaccaagtagctagagatgtacaaggaattctgcaaaggtataaatctcttcaagacatcattgccattttaggtatggatgaactgtcagaagaggataagttgaccgttgctagag

SEQ ID NO: 273927 - DNA, 745 bp, Unknown
  Bacterial polypeptide expressing nucleotide sequence isolated from the Sargasso Sea
atggcaagtttagacgatttaaaaaaaagaatatcaagcgttaagtcaacgcaaaaaataaccaaagctatgaaaatggttgcggcggctaagcttagaagggcacaagaaagcgcagaaagaggaaggccttattctcaaaaaatgaataatataatcttaaatctttcaagtggtatttctgataaagaaaatgctccaaaattgttggcaggaacaggtgaagataaagttcatctttgtgtagttatgacagcagatagagggctttgtggtggatttaattcaaatattattaaaaaagctaaatcatattttcaaaagttatctgatagtggtaaagaattaaagattattacagttggatctaaaggctatgatcaacttaaaagagcttataaagataatattatcgaaaatatttcatttaaagagtctaaaaatgcaaattattttgatgctgacaaagtcggaaaaatattaattcaaaaatttgaacaaaaggaatttgatgtatgtacaattttttataatcaatttaaaaacgtcatcactcaaatacctcaagaacaacaaataattcctttaaaaataaacgaagaagaaaagtcatcagatgaaaattatgaatttgagcctgatgaagatgagatattaggaaatttattgccaaaaaatatttcaactcagatttttaaagcgatgttagaaaattcagctagcgaacaaggttcaagaatgagtg

SEQ ID NO: 273928 - DNA, 1303 bp, Unknown
  Bacterial polypeptide expressing nucleotide sequence isolated from the Sargasso Sea
aatggaaataaatccttcagaagttacaaagatattaaaagaacaaataaaaaattttggtgataaagctgaagtcacagaagttggacaggttttgtctgtaggagatggtattgccagaatttatggtctagataacgtacaggctggagaaatggtagagtttgcagatggatcaaaaggaatggctcttaatttagaaagtgaaaatgttggtgttgtaatttttggtgatgatagaaatataaaagagggtgatgtagtaaaaagaactggtagtattgttgatactcctgttggtaaagaattattaggaagagtagtcgatggtttaggtaatccgattgatggtaagggatcattaagcaaaactgttaaaaaaactagagtagaagtaaaagcacccggaattattcctcgacaatcagttagtgaaccaatgcaaactggattgaaatcaattgatagtttggtcccaattggaagaggtcaaagggaattaattattggtgatagacaaactggaaaaactgcagttgctgtagatgcaattattaaccaaaaaaaaataaatgaatctggtgatgaaaaacaaaaattatattgtatatatgttgctgttggacaaaaaagatcaacggttagacaaattcaaaaaacactagaagaagcaggtgcaatggagtatacaaccattgttgctgctacagcatctgactcagcaccattacaatttttagcaccgtatacaggatgtgctatgggcgaatactttagagataatggaatgcacgcattgattatctacgatgatttatctaagcaagcagttgcatatagacaaatgtctcttctattaagaagacctccagggcgtgaagcttatccaggagatgtgttttacttacacagcagattacttgaaagggctgcaaaattaagtgatgaacatggcggtggatcattaacagcacttcccattattgaaacgcagggtggtgatgtatcagcatttattcctaccaatgtaatttcaattacagatggccaaattttcctagaaactgaactatttaaccaaggtatcaggccagcaattaacgttggtttgtcagtatctagagttggatcatcggctcagacaaaagcaatgaaaaaagtttctggatcaatgaaattagaattagctcaatatagagagatggctgcatttgctcaatttggatctgatttagacgcctctactcaacaacttttaaacagaggttctaaattaactgaactcttaaaacaaaaacaatat

SEQ ID NO: 273929 - DNA, 779 bp, Unknown
  Bacterial polypeptide expressing nucleotide sequence isolated from the Sargasso Sea
tatgggcgaatactttagagataacggaatgcacgcattgattatctacgatgatttatctaagcaagcagttgcatatagacaaatgtctcttctattaagaagacctccagggcgtgaagcttatccaggagatgtgttttacttacacagtagattacttgaaagggctgcaaaattaagtgatgaacatggtggtggatcattaacagcacttccaattattgaaacgcagggtggtgacgtatcggcatttattcctaccaatgtaatttcaattacagatggccaaattttcttagaaactgaactatttaaccaaggtatcaggccagcaattaacgttggtttgtcagtatctagagttggatcatcggctcagacaaaagcaatgaaaaaagtttctggatcaatgaaattagaattagctcaatatagagagatggctgcatttgctcaatttggatctgatttagacgcctctactcaacaacttttaaacagaggttctaaattaactgaactcttaaaacaaaaacaatattcgccactgactgtagcagaacaagtggtatcagttttctgtggagttaaaggttatcttgatgatatagaattaaaagatgttgctgaatttgagagcaagattattgagagatgtaaatcagagaaacccgaaataatagagggaattcaaaattcaggtaaacttgaagatgataaagagaaaatgcttattgaagtaattactcaattgaaaggaacttttaaatcttaat

SEQ ID NO: 273930 - DNA, 475 bp, Unknown
  Bacterial polypeptide expressing nucleotide sequence isolated from the Sargasso Sea
tatggcaagtttagatgatctcaaaaagagaatagctagcgtaaagtctactcaaaaaattactaaagctatgaaaatggttgcggcagcaaaattgagaaaagcccaagaaagtgctgagaaaggaagaccttattctgaaaaaatgaataatattattttaaatctttcaaatggaatacctgataaagaaaatacctcgaaattattgtctggaactggtaatgataaagtccatttatgtgtggtaatgacatctgacagaggtctttgtgggggttttaattctaatataattaaaaaagctaaaagttatttttcaaaaatttcagctgagggtaaagaatttaaaattataactgtaggatcaaaaggtaacgaccaattaaaaagagtttatggtgaaaagattatagaaaatatttcttttaaagaatctaaaaatgcaaattattttgatgctgataaagtcgga

SEQ ID NO: 273931 - DNA, 1403 bp, Unknown
  Bacterial polypeptide expressing nucleotide sequence isolated from the Sargasso Sea
catgtcaggtgagatggtggaatttcctaataatacctttggtatggcattaaaccttgaaagagactcggttggtgcggttgttttgggtgattatcagcatttgtcagaaggtgataaagtaaaatgcaccggtaaaatattgcaagtgcctgttggtgatgagttaatgggaagagtggtgaattccttaggagagcctattgacggtaaaggtgagattaatgcaaaaaactcttctccaatagaaaaaattgctcctggtgttattgaaagacagtcagtagatcaaccagtacaaactggcctaaaatcaattgattctatggtaccaattggcagagggcaaagagaattaattattggtgataggcaaactggtaagactgctttagctatcgacgctatcattaatcaaaaaggaacaggaattaaatgcgtatatgtagcgatcgggcaaaaaaattcatctgtttccaatgtggtaaaaaaacttgaagaacatggagcaatggagcacaccattgttgtagcttcaacggcttcagagtctgcagccatgcaatttattgcgccctactctgggtgcgcgatgggtgaatattttagagattcaggccaagatgcattaattatatatgatgacttaagtaagcaagctgttgcttacagacaagtttcgttgttgttgagaagacctcctggcagggaagcctttccgggagatgtcttttatcttcactcacgacttttagagagagccgcaagagtaaacgcagattacgtcgaaaaaatgactgaaggaaaagtcaaaggcaaaactggttcacttactgcactgcctgttattgaaactcaggcaggcgatgtttcggcatttgtgccaacaaacgtaatttccataaccgatggacaaatatttttagaaacaagtttatttaactctggtctaaggcctgcaattaacgctggcttatcagtttctcgtgtgggtggagcagctcaaactaagttaattaaaaagcttggaggtggaattagacttgctctagctcaatatagggaacttgctgctttctcacaatttgcatctgatttagacgatcaaactcgaaaacaattagaacgtggagaaagagttatggagttgatgaaacagcctcaatactcaccattaaaaatatccgaaatgggtgtagttttgttcgctgtgaatgaagggtttttagacgaaatagaagttaataaagttaaagactttgaaaaatctttacttagtttcgcaaattccgaatacaacgatttcatgaataacatggaatcttcaggagattttaatgatgaaattgaaaaaggattaaaggaaatgttagataaatttgtttcaactcaaacttggtgat

SEQ ID NO: 273932 - DNA, 973 bp, Unknown
  Bacterial polypeptide expressing nucleotide sequence isolated from the Sargasso Sea
aaaattggtttatttggtggagcaggtgttggtaaaacagtaaatatgatggagcttataaataatattgcgcttcaacattcaggtctttctgtttttgctggtgttggcgaaagaacaagagaaggaaatgacttttattatgaaatgcaagaatcaggagttgtaaatattgacaatctaggcgaatcaaaagttgcgatggtttacggacaaatgaatgagccgccaggaaataggttgagagttgctttaaccggattaactatggctgaaagcttcagagatgagggtaaagatgttttattatttattgataatatttatcgttataccttagcaggtgttgaggtgtctgctcttttaggcagaatgccatctgctgttggatatcagccaacattggctgaggaaatgggagctcttcaagaaagaatcacatcaaccaagacaggatctattacttcaatacaagctgtgtatgtgccagcagatgatttaacagacccttcaccagcaacaacgtttgctcacttggatgctactgttgttctttcaagacagatttctgagttaggaatatatccagctgttgatcctcttgattcaacaagcaggcagcttgatcctttcgtggtcggggatgatcattatgaagttgctcaaggagttcaaaagatcttacaaagatataatgagctcaaagatatcattgcaattctcgggatggatgagctttctgaagaagataaagggcttgtagctagggcgagaaaggctcaaagatttttatcccagccgttctttgttgctgagatttttactggaactccaggaaagtatgtttcgcttgaggacacaattaaagcatttaagggaattcttaatggagattacgaccatcttcctgaacaggcattttatatggttggaactattgaagaggctgtagaaaaagctaagactttataaa

SEQ ID NO: 273933 - DNA, 1108 bp, Unknown
  Bacterial polypeptide expressing nucleotide sequence isolated from the Sargasso Sea
tctgatagatgggcaattcatagagatgctcctcaattcgttgatcaagcaactgaaacagaaattcttgtaacaggaattaaagttgttgatttacttgcaccatactcacgtggagggaagatcggtctttttggtggagcgggagttggaaaaacagttatcattatggagctgattaataacatcgcaaaagcacacggcgggtactcagtatttgctggtgtaggagaaagaactcgtgagggaaatgatttatatcatgaaatgttagaatcaggtgtgaatactcttgagggtaaagactccaaatgtgctctagtgtttggccaaatgaatgaacctccgggagctcgtgcaagagttgctttaactggacttactgttgctgaatattttagggatatggaaggtcaagacgtattattctttgttgataatatctttcgttttactcaagctggatcagaggtgtcagcacttcttggaaggataccgtctgcggttgggtaccaaccaacattagcaacagatatgggttcacttcaggagagaataacttctacaaataaaggatcgattacttctgtgcaggcaatttatgttcctgctgatgatttaacagacccagcacctgcaacatcttttgctcacttggatgcaacaaccgtactttcgagacaaattgcagaattgggaatttatcctgccgttgatccattagacagtacctctagaattcttgacccacgtattgttggtgaagagcattatagagtagctcgtaatgttcaatctgttttacaaacatataagtcacttcaagacattattgcgattcttggtatggacgaattatccgaggaggataagttgaccgtctcgcgcgctagaaaaattcaaaggttcatgtctcaaccattctttgttgcagaggtctttactggaacaccaggaatctatgtcgaattagacgacacaattaaaggctttgatgcaatttgtaagggtgagtatgatcatctccctgaagcagcgttctacatggtaggcacaatagaagaggcaataaaaaaatctgaaaaaatggcagtcgaggcggcttaaa

SEQ ID NO: 273934 - DNA, 1351 bp, Unknown
  Bacterial polypeptide expressing nucleotide sequence isolated from the Sargasso Sea
aatcggagcggtagtggatgttgagtttccaaaagaagcaataccaagcgtatatgatgcactcacacttaaggacggagacttagtattcgaagtccaacaacaacttggtgatggcatagtcagaaccattgcaatgggagcgagcgagggtctgaagagaggccttgaggttgaaaatacaggcgctccaatcagtgtcccggtaggacaggaaacccttggaagggttttggatgtccttggcaacccaattgatgaaaaaggacctgttggcgctaaatcaaacaggccgattcacgcaaaagcaccctcatttgaggaacagtcaaccgaagccgatgtattagaaacaggaattaaagtcattgaccttctttgcccgtttgcaaaaggcggtaaggtgggtttgtttggcggtgctggtgttggtaaaacagttacggtcatggagctaatcagaaacatcgccgcagaacatgatggcttttcggtttttgctggagtgggagaacgaacaagagaggggaatgatttttaccatgaaatgatggagtcaaacgtcctcgataaagttgcacttgtatacggacaaatgaatgagcccccaggaaacaggcttagagtagcgctgactgggctaaccattgctgagaactttagagatgagggaagagatgtattgatgtttatcgataacatctatagatacacgcttgcaggcacagaagtatcagcattgcttggaaggatgccatctgcggttgggtatcaaccaaacctcgcagaagagatgggcgtacttcaagaaaggatcacctctactaaaacagggtcgatcacatcaattcaagcggtttatgtaccagcagatgatttgacagacccttccccagccacaacatttgcccacctggacgcaacagttgtattggcaagatcaattgcagagcttggcatttatccagcggtcgacccgcttgactcaaatagtcgtcaattggaccctggcattgtgggccaggagcactatgacactgcaaggtcagttcaacaggtcctgcaacgctacaaagagttgcaagacatcatagcaatccttggtatggacgaactttctgaagaggacaagctcaccgttcagagagcaagaaagatccaaaggttcttatcacaaccattctttgttgccgaggtctttaccggatcgcctggccaatatgtttctcttagagattcgattaaggcattccaaggaattgttgcaggcgattatgatgatctcccagagcaagcattctacatggttggcaccattgaagaagcggtcgaaaaagcaaaaagcatgtaa

SEQ ID NO: 273935 - DNA, 544 bp, Unknown
  Bacterial polypeptide expressing nucleotide sequence isolated from the Sargasso Sea
cctggaaggttccatcacctcgattcaggccgtctacgtccctgctgacgacctgaccgacccggcacctgccaccaccttcgcccacctcgacgccaccaccgtgttgagccgcggcctggcctccaagggcatctatcccgctgtggaccccctggattccaccagcaccatgctccagcccgccgttgtgggcgatgagcactacaagaccgcgcgcgctgtgcagtccaccctgcagcgctacaaggagctccaggacatcattgcgattctgggtctggacgaactctcggaagacgaccgtctgaccgtggaccgtgcccgcaaggttgagaagttcctgtcccagccgttcttcgtggctgagatcttcaccggcatgcctggccaatacgtgaagctcgatgagaccatcaagggcttccaaatgatcctctctggtgagctggatgatctgcctgaagcggccttctacctggtgggcaacatcgatcaggtcaaggccaaagccgagaagatccgctctgaagccaagggttga

SEQ ID NO: 273936 - DNA, 1408 bp, Unknown
  Bacterial polypeptide expressing nucleotide sequence isolated from the Sargasso Sea
gctgaagcattataattatcgaggaaatcaaatgagcgaaggaatagtagtacaggtaattggagcagtaatcgatgtggagttctcaagggagaatctgcctaaagtttacgacgctttatccattgaagaatcaggattggttttagaagtccagcagcaattgggagacggggttgtcagaaccatcgcaatgggacaaaccgaaggattaaaaagaggaacaaaagtggtgaacactggggatgcagttacagtaccagttggcgagaaaacgcttgggcgaattttaaatgttttaggggacccaattgatggaaagggagatgtaggcgaagaagaaagaatgcctattcatcgagatccacctagttacgaagaacaagcagaatcctctgaaattttagaaacaggaatcaaagttatagatcttatgtgtccttttgcaaaaggcgggaaagtaggtttatttggtggagcgggagtaggaaaaacagtcaacatgatggaattgataagaaacattgcctacgaaacaagcggttactcagtatttgcaggagttggtgaaagaactcgtgaaggaaacgatttctatttagaaatgaccgaatctcaagttctagacaaagttgccttggtttatggacaaatgaatgaaccccctgggtgtcgaatgagagttgctttgtcgggcctaacgattgccgaaaagtttagagatgaaggcagggacgtattattatttattgataatatttatcgatacactttggcaggagtggagtgctcttcgctgctaggaagaatgccttcagcggttggctatcaaccaacgcttgccgaagaaatgggcgtgttgcaagaacgaataacctctacaaaaactggatcgatcacttcagttcaagctatctatgttcctgccgatgatctaaccgacccttcgccggcaacaacattcgctcacttggatgcaaccgttgtactttcaagacaaattgcatcacttggaatatatcccgcggttgatccattagactctactagcagacagttggatccaaacattgttggccaagagcattacgaagttgccaaaggagtgcaacaagttctgcaaagatatttggaattaaaagacattattgcaatacttggaatggatgaattgtccgacgaggataaacaaacggttaatcgagctcgaagaattgaaaaatatctttcacaacctttcttcgttgcagagatttttaccaactctcctggaaaatttgtttcgattaaagacactgtgagaggctttaaaggcattcttgatggcgagtatgacgatttacccgaacaagctttcctcatggtaggcgctattgaggaagttgtagagaaagcgaaaactctataa

SEQ ID NO: 273937 - DNA, 923 bp, Unknown
  Bacterial polypeptide expressing nucleotide sequence isolated from the Sargasso Sea
tgttgcagttggtcagaaaagatctactgttgcgcaaattgtaaaaactttggaagaaaatggtgctttagattattcgataattgtagctgcaacagcatctgatcctgcaccaatgcaatttttagcgccatattctgccgcctcaatgggagaatatttcagagacaacggtatgcatgcagtaatagtttatgacgatttatcaaaacaagctgttgcttatagacaaatgtcactacttcttcgaagacctccaggaagagaggcttaccctggtgatgtattttatctgcactctcgtttattggaaagagctgcaaaaatgaataaagacaatggttctggttcactcacagctttaccagttatagaaactcaaggtggtgacgtatctgcatttattccaacaaatgttatttcaattactgatggtcaaatatttttagaaactgaattattttataaaggtgtcagaccagctgttaatgttggattatctgtatctagagtaggttcagcagcacagataaaagctatgaaacaggtagcaggtacaattaaattggatttggcacaataccgagaaatggctgcttttgctcaatttgcttctgacttagatgcatcaactagacaattgctagctagaggtgagagactaactgaattattaaaacaatcacaatatgaccctttagctgttgaggaacaagttgcagtaattttcgcaggagtaaatggttatcttgataaaatcagtgttagccaaattggtgactttgaaagatcattattacaaaatttgagaagtagtggagtttcaataattgactctataaaaaaagaaaaggctctgaatgaaaaatctgaaaaggagctaattaagattattgaaaatttattaaaaaattataattgat

SEQ ID NO: 273938 - DNA, 988 bp, Unknown
  Bacterial polypeptide expressing nucleotide sequence isolated from the Sargasso Sea
aatggaaataaatccttcagaagtaacaaaaatattaaaagaacagattaaaaaatttggagacaaagcggaagtaactgaagtaggacaagttttatctgttggggatggtatcgcaagaatatatggtttagataacgttcaagcaggagagatggtcgaatttgctgatggttcaaaaggtatggctctaaacttagaaagtgacaacgttggtgttgtaatttttggtgacgatagagctgtaaaagaaggtgatacagttaaaagaacaggagcaattgtagatactcctgtaggaaaagaactattaggaagagtagttgatggattaggaaatccaatagacggcaaaggtacgctagacaaaggtataaaaagaagcagagttgaagttaaagcgccaggcataattccaagaaaatctgtaagtgaaccaatgcaatcagggcttaaatcagttgatagtttagttccaattggaagaggtcaaagagaattaattattggcgacagacaaacaggaaaaactgcagttgcaattgatactataattaatcagaagaaaataaatgagtctaatgatgaaaagcaaaaattatattgcatttatgtggcaattggtcaaaaaagatcaacagtaagacaaatagaaaaatctttggaagaagctggagctatggaatacacaactatagttgcagcaacagcatcagatgctgcaccacttcaatttttagccccttatactgggtgcgcgatgggagaatattttagagataatggaatgcatgctttaattatttatgatgatttatctaaacaagcagtagcatatagacaaatgtcattattgttaagaagacctcctggaagggaagcttatccgggagatgttttttatttacatagtagacttttggaaagggcagcaaaacttagtgatgaacatggaggaggatccttaacagcactcccacattattga

SEQ ID NO: 273939 - DNA, 880 bp, Unknown
  Bacterial polypeptide expressing nucleotide sequence isolated from the Sargasso Sea
aatgagcgatagtttaggcagagttgttaaaattgcaggtccagtcgtagacgttgcatttgcacaggattctttgccagaaattacaaatgcacttgaagtagatgtagaaattgatggttctaaaagcacaatcgttttagaggttgcacagcaccttggagaaggaagagttcgtgcaatttctatgcaaggtacagatggtttacgaagaggtgcagaagtctctgatacaggtgctcctatctcagtccctgttggacaagaaactttaggtcacatattcaatgtttggggtgaaacattagatgtggaaacaagctcaattggtgtaaaacaaaaatggccaattcatagacaaccacctccatatgaagaagtaactgctcaaaatgaaatgttcgagacaggtatcaaagttattgatcttttaatgccatatgttcaaggtggaaagattggtctcttcggtggtgctggtgttggtaagacagttcttattcaggaaatgattaacagagtggccacacaacacggtggtgtatcagttttcgctggtgttggagaaagaactcgtgaaggtaatgacttgtttagagaaatgcaagaatctggagttattgataaaaccgcacttgtattcggtcaaatggacgaaccacctggagtgagattaagagttgcattgtcagccctaactatggctgaatatttcagagatgaagaaaagcaagacgttctattgtttattgataacattttcagattctctcaggcaggttctgaggtgtcaacattattaggccgtatgccatctgctgtgggttatcaaccaacacttgcagacgagatgggattcttacaggagagaatcacatgt

SEQ ID NO: 273940 - DNA, 328 bp, Unknown
  Bacterial polypeptide expressing nucleotide sequence isolated from the Sargasso Sea
ctgccccagctccgacacgggccaagtaccgatgccgttcaagccactctatcccgcgggttcgcatcaaacccctcggcgggctcggttacgcaggtcatcggtgccgtggttgacgtacaattcgaaggggaattgccttcaattttgagtgcactagaagtccagggtcatgaaatcagactcgtactcgaagtcgcgcagcatcttggtgaaaacactgtccggacgatcgctatggacactactgaaggtctcgtgcgcggtcagccggtgctcaacatgggctcaccgattcaggtacgatttcgctcggatgaaaagtaga

SEQ ID NO: 273941 - DNA, 1399 bp, Unknown
  Bacterial polypeptide expressing nucleotide sequence isolated from the Sargasso Sea
atgccaaaaaatggaaaaatttcacaggtaatgggggcagtggttgatgttgtattcgaagacggtcatttaccagacatctataatgctttaacagtcgacagaggagaagagggaacgcttgttttagaggtagcacagcatcttggtgactcggtcgttcgaacggttgcaatggatactacggatggattagttcgtgggcatgttgtagaagattctggtgagcccatttctgttcctgtaggagaaaaaaccttgggacgcttgtttgatgttttaggaaatacgattgatcaaaaaggcgactgcaaaactgaaaatagaaatcctattcaccgtcctgcaccaaagcatgaagatttagctacttcaacagaggccttagtaactggtattaaggtcgttgatctcatggagccgtacaccagaggtgggaagactggtttgtttggtggtgctggagtggggaaaacagttttgattcaagagttaatcagaaatattgccacggagcatggtggttattcagtatttgcaggagttggagagagaactcgtgaggggaatgatctttatgctgagatgactgagtcaggagttattgataaaactactatggtattcggtcaaatgaatgagcctccaggagcgcgtttaagagttgctcttagtggcctggcaatggcagaatttttcagagacgatgaaggcagggacgttttactttttattgacaatatatttcgttttactcaagcaggttcagaagtgtctgcattattaggtagaatgccatctgctgtaggttatcagcctacgctgtccactgaaatgggagacttacaggaaagaatcacctcaactaaaaagggatcgattacctccgtccaagctgtttatgttcctgcagatgaccttacggatccagctccagcaacggcatttgcccacttggatgcaacaagtgtattagagaggaaaatcgctgagcttggtatatatcctgcggttgatccactggcatcgacatctagaatcttagacccaaggattataggtgaaaaacattataatgttgcaagagacgttcaatctgtccttcagcaatacaaagatctccaagatattatagctattcttgggatggatgaattatctgataccgataagcttaccgttgcaagagctaggaagatccaaaagttcatgtctcaacctttcttcgttgctgaacaatttactggtacaccagggagatatgttagcttagaggatacagtatctgggtttgatgccatcctcaaaggtgaggttgatgaattaccagagaatgcatttgcctacgtagggacaatagatgaagcaattgaaaagcataaaaagtcagccgcttaat

SEQ ID NO: 273942 - DNA, 1543 bp, Unknown
  Bacterial polypeptide expressing nucleotide sequence isolated from the Sargasso Sea
atgtctatcagtgcaaccgaaattagtgatctgatcaaaaagaagatcaaagaactggatttagataccgaagaacgaaccgaaggaaccgtcgttggtctagctgatggtgttgctagaatacacggtttgggtgatgtaatgcagggagaaatgatcgagttccctggcaatacttatggtttggcacttaacttagaaagagattctgttggtgcagtcatcatgggtagttatgaacatatatcagagggagatgttgttaaatgcaccaaacgtattcttgaagtgccagtgggagaggcattattggggcgtgtagttgatgcgttaggtaatccaattgatggaaaaggagaaattgatacaaaagaatcatcgccaattgaaaaaattgcaccaggagttattgcgagaaaatcagtcagccagcctgtgcagacaggtttaaaatctattgactccatggtaccaattgggcgtggacaacgagaattaataataggagatcgacagacaggtaaaacagcagttgcaattgatgcaataattaatcaaaaaggtactggtgttaaatgtatatatgtcgcgattggtcaaaaagcttcttcaataaatgttgtaattagaaaactcgaagaacatggagccatggaacacacaattgttgttgctgctacagcatcagagtcagccgcaatgcaatatattgctccttatggcggctgcgcaatgggagaatattttcgtgatcttggagaagatgcattaattatttatgatgatttaacaaaacaagcatgggcatatcgacaggtttcattgctattaaaacgaccacctggtcgcgaagcataccctggagatgttttttatttgcattcacgtttattggaacgcgcttcccgaattaatgaagattatgtagaaaaaattacaaatggaaaagtaaaagggaagacaggttcattaacagcactaccaattattgaaacacaagcaggagatgtatctgcttttgttccaacaaatgttatttcaataactgatggacagatatttttagagtctgatctttttaattctggttttcgaccagctatcaatgctggtttatcagtatcgcgagttggtggagcagcacaaacaaagattattaaaaaattgggtggtggtgtgcgtttagctatggcgcaatatcgtgaattagcagcttttgctcaatttgcatcggatcttgatgaagcaactagaaaacagttagagcgcggtcagcgtgttatggaattaatgaaacagaaacaatattctccgcttaatgttgctgagatgggtgttagtttatttgctgttgaaaatggttacattgacgatattgagctagaaaaaataggtgcttttgaggcagctcttcatgattatatgaaaagcgagcagtcaactcttttagataagattggtccagagggtaattatgatgatgggattgaaacagaattaaaaagtgcaattgataatttcaaaaaaaataatacttggtaat

SEQ ID NO: 273943 - DNA, 485 bp, Unknown
  Bacterial polypeptide expressing nucleotide sequence isolated from the Sargasso Sea
ttttcttggaaccgatctctttaattcaggtattaggcctgcaattaatgttggtatctcagtatctcgtgtaggcggagctgctcaaaccaaaattatcaaaaagttaggcggtacggtaaaactggctcttgctcaatttagagaactggaatctttttcacagtttgcctctgatctagatgatgctacgaaagaacagcttgaaaatggccaaagaattacagagctcttcaaacaaactcaatttgctccaagatccgtggcatgcatagctattgttctgtatgcaatcgaaaataaatatttaacagatgttgaaaaagacaagatgcagtcctttgaagaaaatttaagaacccattttaaatcgaactatggagatgtatgggaagaggtcaataagacaggtgactggaacgatgatcttgataagaagtttaaagaaatagtgagttcatttatgaaagagggttcttggtaga

SEQ ID NO: 273944 - DNA, 1303 bp, Unknown
  Bacterial polypeptide expressing nucleotide sequence isolated from the Sargasso Sea
gataacaggctagttttagaggtagcacaacacttaggtgaaactactgttagaacaattgctatggatgctactgaaggattaaaaagaggtgatgaggttattaataccaatgctcctattcaagttccagttggacccgaaacacttggaagaattataaatgtaattggcgaacctatagatgaaagaggtgtggtaaagactaaagagagctggccaattcatagagctgcacctgaatttaatgaccaatcaacagagactgaaatacttgtaacaggtattaaagtaattgatttgcttgcaccttacgcaaaaggcggaaagattggattattcggtggagcaggagtaggaaaaacagttttaattatggaattaattaataacgttgcaaaagctcatggtggtttttcagtttttgcaggagttggagagagaactagagaaggaaatgatctttatcatgaaatgattgagtctggagtaattaaaaaagaaggagccggttcaaaagctgccctagtttatggacaaatgaacgaacctcctggagcaagagcaagagttgcacttactgggttaactgtagctgaatactttagagatcaggaaggtcaggatgtgcttttcttcgtagataatatttttagatttacccaggcaggatcagaggtttcagcattgttaggaagaattccatctgctgttggatatcaaccgacattagctactgacatgggtaacctgcaagaaagaattacgactacaaacaaagggtcaattacatctgtacaagcaatttatgtgcctgctgatgatttaacagaccccgctccagccacatcgtttgctcacttagatgcaacgactgtactttcaagacaaattgcggaaattggtatttatcctgcggtagatccacttgattctacatcaagaattttagatccaagaatagttggagatgagcattatagagtagcaagagacgttcaaagaatactacaatcatataaatcactacaagatattatagctattcttggtatggatgaattatctgaagaagataaactagttgtggcaagagcaagaaaaatccagagatttttatctcaaccattctttgttgcagaagtatttactggttctccaggaaaacttgttgatcttgattcaactattaaaggttttgatgcaatctgcaaaggtgagtatgatcatttacctgaagctgctttttatatggttggaacaattgaagaagctatagaaaaagctaagaaaatggaacaag

SEQ ID NO: 273945 - DNA, 877 bp, Unknown
  Bacterial polypeptide expressing nucleotide sequence isolated from the Sargasso Sea
aatggcaagtttagacgatttaaaaaaaagaatagcaagtgttaagtctacacagaaaattacaaaagctatgaaaatggttgctgcagcgaaacttagaagagctcaagaaagtgctgaaaagggaaggccttattcggaaaaaatgaataatgtcattttaaatttgtctagtggcatatcagataaagaaaatgctccaaaacttttatcaggaactgggaatgacaaggttcatttatgtgtcgtaatgacatcagatagaggattatgtgggggtttcaattctaatataattaaaaaagccaaaagttatttctcaaaaattttaagtgaaggaaaagaactcaaaatcataactgtaggttcaaaaggaaatgatcagttaaagagaatgtacggtgataaaattattgaaaatatttcttttaaagagtcaaaaaatgccaattactttgacgctgacaaggttggtaagatagtaattgataaatttgaaagtagtgaatttgatatatgcactattttttataaccaatttaaaaatgtgatcactcaaattcctcaagcccaacagataatccccttgaatagcgaggatagtgaagagaatagttcagaggaaagttatgaatttgaaccagatgaagatgagattttgagcaatttattgccaaaaaatatttcgacacaaatatttaaagcaatgttagagaattcagctagcgaacaaggatcaaggatgagtgcaatggataacgcaacccgaaacgcaggtgaaatggttgacaaacttactatccagtataatagaagtcgtcaggcagcaattacaaaagaactaatagaaatcatatcaggagcagaaagtttataa

SEQ ID NO: 273946 - DNA, 1234 bp, Unknown
  Bacterial polypeptide expressing nucleotide sequence isolated from the Sargasso Sea
atggatattagtgctgccgaaatttcaaaaattttaaaagaacaaattgccgattatggaagtgaagcttctgtttcagaaactggaagggtattaagtattggcgatggaatcgcaagagtttacggccttgataaagttcaacttggtgaaatggtagaattcgaaggcggcattaggggaatggcactaaatttggaatctgacaatgttggtgttgttatatttggtgacgacagagctatcaaagaaggagatactgtaaaaagaacaaaatctattgttgatgtgcctgtaggaaaagaattgttagggagagttgttgatggcctaggcaatcctattgatggaaaggggcctattgccaaaagtgcaaaaagatcaagagttgaggtaaaagcaccgggcattatgcctagaaaatcagtgcacgaacccatgatgacagggcttaaggctattgattctctcgttcccattggaagagggcagagagagctcataattggtgacaggcaaattggaaaaaccgcgatcgccattgacacatttattaatcaaaaagaaactaatgatgcagctgggaaagacgatagcaaaaaattattttgtatttatgttgctgttggccaaaagcgttcttctgtagcacaaatagtaaaaacattagaagaatatggagctatggaatattctattgttgttgcttctacagcatctgagtcagctccaatgcaatttttagctccttacacagctgcagcaatgggtgaatactttagagataatggtatgcacgctgttgttgtatatgatgatctatctaaacaagctgttgcttacagacaaatgtcattacttttaagaagacctcctggtagagaagcttttccaggggatgttttttatcttcattcaaggttacttgaaagagctgcaaaagttaatgataaattaggatctggctctttaactgctcttccaattattgaaacacaagctggtgatttgtcagcatttattccaaccaatgttatttcaataacagatgggcaaatttttctagaatctgaattattttatagaggcattagacctgctgtaaatgttggcttgtctgttagtagagtaggatcagccgcacaaacaaaagcgatgaaaaaagttgccggatcaattaaacttgaattagctcaatatagagagatggcagcatttgcacaatttgcatcag

SEQ ID NO: 273947 - DNA, 934 bp, Unknown
  Bacterial polypeptide expressing nucleotide sequence isolated from the Sargasso Sea
aatgagtaatggagttgtgacacaaattatcggagcggttatagatgtcgaattcgatagagagaacataccaagcgtatatgaggctcttaatattgtcggtcttgaaactgtgcttgaggttcaacaacaactaggtgatggaattgtaagaactatcgctatgggttcaacagaaggactaaaaagaggtttagaggttgttagaacaaatgcacctatttctgttcctgttgggcaagaaactctaggaagaattatggatgttttaggaaaccccattgatgaaaaaggtgacattggtgagaaagaaagacagccaattcataaaagcccaccaagctacactgatcaagcaggatcaaacgaactactagaaacaggcatcaaagtaattgacctaatgtgtccttttgcaaaagggggaaaagttgggttatttggaggagctggagtaggtaagaccgttaatatgatggagcttataagaaacattgcgattgagcattcaggattctctgttttcgctggagttggcgaaagaactcgagaaggtaatgacttttatcatgaaatgaccgaatcaaatgttttggacaaagtttcacttgtgtatggacaaatgaatgaacctccaggtaacagattaagagttgctcttaccggcttaacgattgctgagaaatttagagacgaaggaagagatgtacttctttttattgataatatttacagatatacacttgctggtgttgaggtatcagccctattaggaagaatgccatctgctgttggatatcagccaacactggctggggaaatgggagcactacaagaaagaataacctcaacaaaaacaggttctattacttcaatacaggctgtatatgttccagctgatgatttaacagacccttcacctgcaacaacattt

SEQ ID NO: 273948 - DNA, 1576 bp, Unknown
  Bacterial polypeptide expressing nucleotide sequence isolated from the Sargasso Sea
atgcaaaaaattaaaccagctgaggtatcagcattattaaaaaaacaattagactcagcagacattcaatcttcttttgatgaaattggcactgtacttgaagtaggtgatggaatagctagggtctatggtcttacaaatgcccaatatggagagcttgtcgcttttgaaaatggtctacaaggtatggtattaaatcttgaagaagatcatgttggggttgtactatttggaccttcaaaagaaatcaaagaaggggataatgttaagcgtacaaatcaaattgcgtcaattaaagtaggagaaggaatattaggaagagttgttgatacacttggaaatcctatagacggtaaaggccctattaaaggagagttgtttgatatgcctattgaaagaaaagctccaggtgttatatttcgtcagccagtaaacgagcctttacaaacgggaataaaatcaattgatgctatgatcccaattgggagaggtcaaagagaattagttatcggtgatagacagacaggtaaaactactgtttgcattgatacaattttaaatcaaaaagagttttatgatgcgggagagcctgttttttgtatttatgttgcgattgggcaaaaagcatcaactgtagcagcaattgctaaaacactagaagataaaggagcgcttgcttatacagtaatagttgcagctaacgcatcagaccctgcaccaatgcaagtttttgctccattttcaggagcttgtataggggaatattttagagacacaggaaggcctgctttaattatttacgacgatttatctaaacaagcagtagcatatagagaggtttcattacttcttagaagacctcctggaagagaggcttatcctggagatgttttttacctgcattcaagactattagagaggtcagccaaagttgtgaacgatgataaggtagcaagtggaatgaacgatttaccagattctttaaaatcaaaagtaaaaggtggaggatcattaactgcattaccaataattgaaacacaagccggagatgtgtcagcctatattccaacaaatgtaatttcaattactgatggtcaaatattcttggagtcagacttatttaactctggtgtaagacctgcaattaatgttgggatatctgtatcaagagttggaggttctgctcaaattaaatcaatgaaaaaggttgcaggtacattaaaattagaccaagcacaatatagagagcttgaagcattttctaagtttggttcagatctagatgcagcaactctaaacgttattgaaaaaggtagaagaaatgttgaaatccttaaacaaaatcaaaatgatcccttccaagtggaagatcaagtagcaataatatatgcaggatctcaaaatcttcttaaagacgtgcctgtcgagaaagtcaaggcttttgaagaggcattcctacaggaacttagaaaaaattacaagaaacttttaagtgaattaaaagctggaaaaatctctgataaagaaactgatgagattaaaaaagttactgaaaaaattgccaaatctttttaaa

SEQ ID NO: 273949 - DNA, 1057 bp, Unknown
  Bacterial polypeptide expressing nucleotide sequence isolated from the Sargasso Sea
atggatgaattaaacccttcagaaatcagtcaagtaataagacaaaaaatagacgcgctagatacaacatcagccccaagcaacgaaggcacaatagtgtttttggcagatggtatagccagaattcatggcctcggagaggttatgaatggtgagctaattgaatttgagcatggagtaatgggaatggctcttaacctcgagagagactccgttggagctgtagttttgggagactacaagctactctcagaagggggctcagctaaatgcacaggcagaattttggaggttcctgttggagaggccatgctgggaagggtagtagatgctctaggaaacccaattgatggcaaaggagaaataaaagcagagtccagctctcctgtagaaaaagtagctccaggtgttatatcaagaaaatctgtcgatcaacctgtgcagctaggaataaaagccatcgatagcatggtgcccataggcagaggacagcgtgagctcattattggagacaggcaaacaggaaaaacagcaatagccatcgatgcgataatcaatcaaaaagaaacaggaataagatgtgtttatgttgctgttggacaaaaacaatcatcaatagcacaagtagtaagaactcttgagaagtatggtgttatggacaacactattgttgtggcagcagctgcagcagacccagctcccatgcagtacatagcgccgttttctgcttgttctatgggagagtactttagggataaaggagaggatgcacttattgtatatgatgacctatctaagcaggcagttgcttatagacaaatgtctttgctgcttaggaggccaccagggagggaagcatatccgggtgatgttttctatttgcactcaaggctattagaaagagcagcaagagtaagcgaggactatgtagaaaagtatacagatggaaaggtgaaaggaaaaaccggctccttaaccgcacttcctataatcgaaactcaggccggagatgtatcggcctttgttccaacaaacgttatatccataactgacggac

SEQ ID NO: 273950 - DNA, 1447 bp, Unknown
  Bacterial polypeptide expressing nucleotide sequence isolated from the Sargasso Sea
atggatattcgtgcagcagagatatcaacaatattaaaagatcagattgaaaattttggcgtagatgctgaagttacagaagttggcaaggtcttatcagtaggtgatggaattgcgcgtgtttacgggctcgatcagatacaagcgggtgaaatggtagaatttcctggtagtattgctggtatggctttgaacctcgaaagagataacgtcggtgtagttatatttggaagtgataaaacaattagagaaggcgatgttgtaaaaagaacgggttctatcgttgacgttccaataggtaaaggtctcttgggaagagttgttgatgcacttggtaaccctatagatgggaaaggtgctcttaaaaacgtcaaaagatcaagagttgagactaaagctcctggtattatgccaagagaatcagtgagcgaacctatgcaaactggattgaaggcaattgattcgcttattcctgtgggaagggggcaaagagaactcattattggagacaggcaaacaggtaaaacagctattgcgatagatacttttttaaatcaaaagagtactaacgataaagctggtaaagacgatactaaaaaactgttttgtatttatgtagcagtaggtcaaaaaagatctacagttgctcaaattgtcaaaaccttggaagaaagaggagcattggaatattctattgttgtagcagctacagcatctgatccagctcctatgcaatttctagcaccttattctgctgcagctatgggagaattttttagagataatggaatgcatgcagttgttgtttatgacgatttatcaaaacaagcggttgcctacagacaaatgtctctccttttaaggagacctccaggaagagaagcttatccgggtgacgtgttttatctccattctcggttgcttgaaagagctgcaaaattaaatggagataatggatctggttcactaacagcccttccaataattgaaacacaaggtggtgacgtttctgcatttattccaactaatgttatttcaattacagatggtcaaatttttctagaaactgaactcttttataaaggtattaggccagctgtgaatgtaggtttatcggtatcaagggttggatcttctgctcaaatcaaagctatgaaacaagttgctggtactatcaagttagacttagctcaatatcgagagatggccgcttttgcacaatttgcatctgatatggatgcttcaacaagacaacttttatcaagaggagaaaggttaactgaattactgaagcaacctcaatattctccaatggatgttgaagaacaggtagccgttatttttgctggagtgaaaggatatttagatcaaattccaacacaaaaaattggtgagtttgaacagtcacttatccaaaaactaaataccaagggatctaatatttaga

SEQ ID NO: 273951 - DNA, 952 bp, Unknown
  Bacterial polypeptide expressing nucleotide sequence isolated from the Sargasso Sea
atggcaaatcttaaagagattagagatagaatcgtttccgttaaaaatacaagaaaaataacggaggctatgagacttgttgcggctgcaaaagttagaagagctcaagatcaagttcttaagagtagaccttttgcagataaacttgcacgggtcttagaaaatatccaatctagagttcaatttgaggctgtcgactcacctctattatcaaagagagaagtaaagagaatcactttggtttgcataactgcggatagaggtttatgtggtggttacaatacaaacataataaaaaaggttgaaataagatatgcagaattagtcaaacaagggtatcagccaaatttaattttggtaggcaagaaagctattggatattttcaaaatagaaaggatagatatgtaattaaaactactttcaaagaactagaacaggtacccacagttaaggactctgaaggagtaacaaatgaaattttagctgaatttctctcagaaaattctgatagggtggaaattatttatacgaaattcatcactctagttagctgcgctcctgtcgttcaaacactattgccacttgaccctcaaggaattgctgaggaaaacgatgaaatttttaggttgactacaaaagatagtaagttacttgttgaaaaatcaaatattgaaaaaagtgaatcagagaagttgccgtcagatattgtttttgaacaaagtcctgatcaactattagattcgttattaccattatatttacagaatcaggtattaagagctctccaagagtcggcagcttcagaactcgcttgcaggatgactgctatgaataatgcaagtgataatgctaaagaattagcaagtactttgaatctaacctataacaaagctagacaagcagctattacacaagaaatattggaagttgtaggaggttcagcagtttagc

SEQ ID NO: 273952 - DNA, 1294 bp, Unknown
  Bacterial polypeptide expressing nucleotide sequence isolated from the Sargasso Sea
agttgcacaacatcttggagaaaacgaggtcaggactattgctatggatagtacagacggtttggttcgtggaatggaagttattcagactggggcacctataacagtacctgttggaccagaaaccttaggaagaattcttaatgtgataggtgaccctgtagatgatggaaaaccggtcaaatcaaaaacttctttaccaatccacagagacgcgccagagtatgttgaccagtcaacatctgcagatattttggttacaggtataaaagttgtggaccttctagcaccatacgcaaagggtggaaaaattggtctctttggtggagcaggtgttggtaaaactgttttgattatggagcttattaacaacgtagctaaggctcacggtgggtactctgtttttgcaggtgttggagaaagaactagagaaggtaacgacctttttcatgaaatggtagaatctggtgttattgttccagatggtcctggatcaaaagccgcattagtttatgggcaaatgaacgagcctccaggagctagagcaagagttgctttgacaggattgactttagctgagtattttagagaccaagagggtcaagatgttcttttttttgttgataatatttttagatttactcaagctggatctgaagtttctgcattactaggtagaataccttcagctgttggataccaaccaacattagcgacagatatgggtgctttacaagaaagaatcacaacgacaacaaaaggatctataacttctgtacaagctatttatgttccagcagatgatttaactgatccagcaccagctacatcgtttgcacacttggacgctacaacagttttatcaaggcaaattgctgaaatagggatttatcctgcagttgatccacttgactctacttctagaatgttagatccaagaattgtaggtgatgagcattatgctgttgcaagaaaagtacaagaagttcttcagcaatataaatcactgcaagatattattgctattttaggaatggatgaattatctgaagaagataaattagttgtaaatagagccagaaaaatacaaagattcttatctcaaccatttcatgttgcagaagtgtttaccggttcaccaggtgtattagtacctttagaagataccataaaaggttttaaaggaattgctgatggtgagtatgatgacttaccagaggcagcattttatatggtaggtaccattgaggaagcaatggaaaaagctaagaagttagctaaagacgctgcttag

SEQ ID NO: 273953 - DNA, 1133 bp, Unknown
  Bacterial polypeptide expressing nucleotide sequence isolated from the Sargasso Sea
aattataaatgtaacaggagatccagttgatgaagccggaccgataaaaacagacgaacgctggtcaatccaccgtgaagccccgacatttgctgaccaagaaacagatgcacaaatgttggtcactggagtaaaagttatggacctcctttgtcccttccttaaaggaggcaaaattggattgtttggtggagcaggagttggaaaaacagttgtgatcatggaactgatccgaaacattgctgcagaacatggtggcttctcagtttttgccggcgtaggtgagcggacacgtgaaggaaatgatctttggaatgagatgaaagaatcaggagtgcttgacaaaacaagtcttgtatatggtcaaatgaatgagcctccaggtgcacgtgcacgtgtagcactgaccggcttaaccgttgcagaatatttccgtgatgaagaggccgcagatgttctgatgttcatagataatatttttcgatttacacaggcaggttcagaggtttctgcactacttgggcgaataccttctgccgtgggttaccaacctacgctttctactgaaatgggtaatttacaggagcgtattacatcaaccaacaaagggtcaatcacttctgtgcaagcgatttacgttcctgctgacgacctgactgatcccgcaccggcaactactttttctcatcttgatgcaacagtcgtcttaagccgagcaatcaccgaactgggtatatatccggcagttgatccgcttgattcaacatcacgcattctttctgcggatgttttgggtgatgatcactatagtgttgcacacgaagtgcaaatactcctgcaacgctacaaggacttgcaggacattattgcaatacttggaatggatgaattgtctgaagaagacaaagtcgtagtgagccgcgccagaaaagtacaaagattcctctcccagcctttctttgtggcagagacttttactgggacttcaggtgaatatgttgatattaaagacaccattaaaggatttcgggaaattcttgatggaaaacatgatgatcttcctgaacaagcattctacatggtgggaaccattgaacaggtgatggaaaaagcaaagaaactgagtaactgat

SEQ ID NO: 273954 - DNA, 1546 bp, Unknown
  Bacterial polypeptide expressing nucleotide sequence isolated from the Sargasso Sea
aatggaagaattaaacccatcagaaattagtcaggtcatcaaacagaaaattgatgctcttgatactgcctccactcctagcaatgaaggcacaatcgttttccttgcagacggtattgcgagaatacacggacttggcgaagtcatgaatggtgagcttatagagtttgaacatggtgtcatgggaatggcacttaaccttgaggttgactctgtgggggctgtaattttgggagattacaagctgctggcagaagggggttctgcaaagtgtactggaagaattttagaggtccctgtcggagaagctctcatgggaagagttgtggacgcactgggtaacccaatagatggtaagggcgaagtgcagacagatcaaaccgcccccgtagagaaagtcgctcctggagttatttcaagaaagtctgtagatcaaccggtgcaactgggcataaaggccgttgacagcatggttcctattggaagaggtcagcgtgaattgatcattggagacagacagaccggtaaaaccgctatcgccattgatgcaataatcaaccaaaaagacactggcgttaagtgtatatatgtagcaataggacaaaagcaatcttctattgcccaggtggttagaactcttgagcagtatggcgcaatggaaaatacaattgttgtggttgctgctgctgcagacccggcaccaatgcaatatattgctcctttcgcggcttgttccatgggcgagtatttcagagacaggggagaggatgctctaattatctacgatgacctttctaaacaagctgttgcatataggcagatgtctcttttgctaagaaggccgcccggaagggaggcttatcccggtgacgttttctaccttcactcaagattgctagaaagagctgcaagggtgaatgaggaatatgtagagaaccacacaaacggtgaggtgaagggaaaaacaggttcgttgactgcattaccaatcatcgaaactcaggctggagacgtttcagcgtttgttcctacgaatgtaatttctataacagatggacaaattttccttgagtcctctttatttagttcaggactaaaaccagccatggaccctggaatttcagtttcaagggtaggtggtgctgctcaggttccaataattaaaaagcttggcggaggaatcaaaacagccctcgctcaatatagagagttagaggcttttgcccaatttgcttcagatcttgacgaggcatccaaagagcaattagagcatggcgtaagggtcactgagctgacaaaacaagaccagttttcacccatgtctgtagctgaaatgggcttaatgctttacacggccaatgaaggatatctaaggcaggttgaggttgaaaaaatcaaagactttgaaaagagcttaatagcctatatgaattccgagcataaagatctcatggacaaggtatcagagaccggagaatacggagacgatatccaaaatgccttcaaagaagccctagataaattcatggaaactcaaacctggtag

SEQ ID NO: 273955 - DNA, 863 bp, Unknown
  Bacterial polypeptide expressing nucleotide sequence isolated from the Sargasso Sea
tatgagaaaaggacaaataacacagatcattggggcggtagtagacgtaaaatttgatggagaactaccagaaattttaactgcactagagtgcgataacggtggaaatagattagttttagaagttgcacaacacttaggggagtcaagtgttagaacaattgcaatggatgcgaccgagggtcttaaaagaggagatgtggtaaaagatacagctgctccaattaaagtcccagtaggaccagagactcttggaagaattattaatgtaataggtgagcctattgatgaaagaggagaagttaaaagttcagataactggccaattcatagagctgcaccagaatttaatgatcaatcaacagaaactgaaatacttgtaactggaataaaagtgattgatcttttagcaccctacgctaaaggtggtaaaattggtttattcggtggagctggagttggtaaaactgttttaattatggaattgattaacaatgttgcaaaagctcatggtggattttcagtttttgcaggagtaggagaaagaactagagagggaaatgacctctaccatgaaatgatagattcgggtgttattaaaactgatggggaaggttctaaagcagcattagtttatggacaaatgaacgagcctccaggtgcaagagcacgagttgctttaactggattaactgttgctgaatattttagagatcaagaaggtcaagatgtactattctttgttgataacatttttagatttacacaagcaggatctgaagtctctgcattacttggtagaataccttcagctgtaggatatcaaccaacattagcaactgatatgggtaacttacaggaaa

SEQ ID NO: 273956 - DNA, 291 bp, Unknown
  Bacterial polypeptide expressing nucleotide sequence isolated from the Sargasso Sea
aacttcaagatatcattgccattctaggtatggaagagctttctgaagaagataaattagttgtttctagagcaagaagagtgcaaagatttttatcacagccatttcacgttgctgaacaatttacaggaattcctggtgtattggttgatattaaagacacaattaaaggttttaacatgattatggatggagagcttgaccatctaccagaagcggcatttaatctaaaaggaactatagaggaggcaattgaagctggtgaaaaaatgattgctgaggctaagtaat

SEQ ID NO: 273957 - DNA, 870 bp, Unknown
  Bacterial polypeptide expressing nucleotide sequence isolated from the Sargasso Sea
cagtttttgccggcgttggagaaagaaccagagaaggaaatgacttttatcatgaaatgacagattcaaatgttctagataaagtttctcttgtctatggtcagatgaatgaacctccaggaaataggcttagagttgctctaactggcttaaccatggctgagaaattcagagatgaaggaagagatgtgctgctttttgtagacaacatctatagatatactttggccggagttgaagtatctgcactattagggagaatgccttcagctgttggatatcagcctacgcttgcagaagaaatgggagtgcttcaagaaagaattacatctacaaaaacaggctcaattacatcaatacaagcagtttatgtgccagctgacgatttaacagacccatctcctgctacaacttttgctcacctagatgctacggttgttctttcgagaagaattgcagaattgggaatataccctgctgtagatccactcgattctacgtcacgacagctagatccacttgttgtagggcaagaacactatgaagtggcacaaagagtccaaggtgttttacaaaggtataaagaacttaaagacattattgctattctcggtatggatgaactatctgatgaagataaaaacacagtatcgagagcaagaaaagttgaaaaatttttatcacaaccatttttcgttgccgaagttttcacaggagcaccaggaaaatatgtttctgtaaaagatacaatccaagggtttaaagaaattcttgatggtgttcatgatgatgtgccagaacaagctttttatatggttggctccatagaagaagttttagaaaaagctaagacggttaaaagtgattaat

SEQ ID NO: 273958 - DNA, 1420 bp, Unknown
  Bacterial polypeptide expressing nucleotide sequence isolated from the Sargasso Sea
atgagcaaaggaataattacacaggttattggagcagtagtagatgttaaatttgatggagaacttccagaaattttaacagcattggaatgtaaaaatggaaacaacagattagttttagaagtagcgcaacacttgggtgaaactacagttagaactattgcaatggatgctactgaaggattaaaaagaggtgatgaggtaattaataccaatgctcccatacaagttccagtaggacctgaaactcttggaagaattattaatgtgattggagagccaatagacgaaagaggagaagtaaaaactaaagaaagttggccaattcatagaggtgcccctgaattcaatgatcaatcgactgaaactgaaatacttgttactggtattaaagtaattgatttgcttgctccttatgcaaaaggaggaaaaatcggattgtttggcggtgccggtgttggaaaaactgttttgattatggagttaatcaataacgttgcaaaagcacatggtggcttctcagtttttgcaggtgtaggagaaagaacaagagaaggaaacgatctctatcatgaaatgatcgagtctggtgttatcaaacaggacggaccaggatctaaagcggcattagtttacggacaaatgaatgaacccccaggtgctagagctagagtggcacttactgggttgactgtagcagaatattttagagatcaagagggacaagacgtactcttctttgtagataatatttttagatttactcaagcaggctcagaagtttcagcacttcttggtagaattccatctgcagttggttatcaaccaacattagcaactgacatgggtaaccttcaagaaagaattacaacaacaaacaaaggatcaattacttcagttcaagcaatttatgtacctgcagatgatttaactgaccctgctccagcaacatcatttgcgcatttggatgcaacaacagtactttcaagacaaatagctgaaattggaatatatcctgctgttgatccgttggactcaacttcaagaattctagaccctagaattgttggtgatgaacattatagagtagcaagagatgtgcaaagaatattacaatcttacaaatcactacaagatatcatagccattttgggtatggatgaattatctgaagaggataagctggttgtagcgagagcaagaaaaattcaaagatttttatctcaaccattttttgttgcagaagttttcacaggatcaccaggaaaattggtagatttagactcaaccatcaaaggctttgatgctatttgtaaaggtgaatatgatcatttacctgaagcagcgttttatatggtgggaacgattgaagaggcaattgagaaagctaaaaaaatggaacaagaagctgctgcttaat

SEQ ID NO: 273959 - DNA, 874 bp, Unknown
  Bacterial polypeptide expressing nucleotide sequence isolated from the Sargasso Sea
atggcaagtctagatgatctcaaaaaaaggatagcgagtgtaaagtctacacaaaaaattacgaaagctatgaaaatggttgctgcagcaaaattaagaagagcccaagaaagtgctgagagaggaagaccttattcagaaaaaatgaataatattattttaaacttgtctagtggcatatctgataaggaaaatgccccaaaattattatctggtacaggcgaaaataaagttcacttatgtgtagtaatgacatcagacagaggcctgtgtggtggttttaattctaacatcattaaaaaagcgaaaagttatttttcaaaaattttaaacgagggtaaacaattaaagattattactgtagggtcaaagggaaatgaccaactaaaaagagtttatggagataaaattattgaaaatatatcttttaaagaatctaaaaatgcaaattattttgatgcagataaagttggaaggatcataattgaaaaatttgaggctggtgagtttgatatatgtactattttttataatcaatttaaaaatgtaatcactcaattacctcaagctcaacagattatacccttaaacaatgaagaggatcataataattcagacgaaagttatgaatttgagccagatgaagatgaaattttaagcaatttactaccaaaaaatatttcaacacaaatatttaaggcaatgttggagaattcagctagcgaacaagggtccagaatgagtgcaatggacaatgctacccgtaacgcaggtgaaatggttgacaaacttactatcgaatataatagaagtcgtcaggcagcaattacaaaagaactaatagaaatcatatcaggagcagaaagtttataat

SEQ ID NO: 273960 - DNA, 1537 bp, Unknown
  Bacterial polypeptide expressing nucleotide sequence isolated from the Sargasso Sea
atggaaataaatccttcagaagttacaaaaatattaaaagaacaaatcaaaaattttggtgaaaaagccgaagttgcagaagtagggcaggtattatcagttggagatggtatcgcaagaatttatggtttggataatgtgcaagctggtgaaatggtggaatttgcagatggatcaaaagggatggctcttaacttagaaagtgaaaatgttggtgttgtaatttttggtgacgatagaaatgtaaaagagggtgatgtagtaaaacgtacgggtaacattgttgatactcctgttggaaaggaattgttaggaagagttgtagacggtttaggtaatcctattgatggaaaaggtccatttgataaaaatattaaaaaaactagagtagaagtaaaagcaccaggaattattcctcgtcaatcagtcaatgaaccaatgcaaactggattaaaatcaatcgatagtttggttccaattggaagaggtcaaagggaattaattattggtgacagacaaacaggtaaaactgcagttgctgtggatgcaattattaatcaaaaaaaaataaatgaatctggtgatgaaaagcaaaaattatattgtatttatgttgcagttggacaaaaaagatcaacggtaagacaaattcaaaaaactttagaagaagcaggtgcaatggagtacacaactattgttgcagctacagcatcagattctgcgccattacaatttttagcaccatatacaggatgtgctatgggtgagtattttagagataatggaatgcatgcacttattatctatgatgatttatctaaacaagctgttgcgtacagacaaatgtctctattattgagaagacctccaggccgtgaggcttatccgggagatgtattttatctacatagtagattacttgaaagagctgcaaagttaagcgacgagcacggtggtggttcattaacagcacttccaattattgaaacacaaggaggagatgtttctgcatttattcctactaatgtaatttcaattactgatggtcaaatattcttagaaacagaattatttaaccaaggtataagaccagcaattaacgttggattatcggtatctagagttggatcatcagctcaaacaaaagctatgaaaaaagtttcaggatcaatgaaactagaattagcacaatatagagaaatggcagcatttgctcaatttggatctgatttggatgcatctacacaacaacttttaaataggggctcaaaactaactgaacttctaaaacaaaaacaatactcaccattgactgttgctgagcaagtaatatcagttttctgcggtgttaagggttatctcgatgatattgatttaaaagatgtatctgagtttgaaagtaaaattattaataaatgtaaatcagataaacctgaaataattgaagcaattcaaagcactggaaaacttgatgaagataaagaaaagctattggtagaagtaattactcagctgaaaggaacctttaaatcttaat

SEQ ID NO: 273961 - DNA, 1420 bp, Unknown
  Bacterial polypeptide expressing nucleotide sequence isolated from the Sargasso Sea
atgagcaaaggaataatcacacaagttattggagcggtagtagacgtaaaatttgatggtgaactaccagaaattttaacagcattggaatgtaaaaatggtgataacagactagttttagaggtagcacaacacttaggtgaaactactgttagaacaattgctatggatgctactgaaggactaaaaagaggtgatgaagttaccaacacaaatgctcctattcaagttccggttgggcctgaaactcttggaagaattattaatgtaattggtgaaccaattgacgaaagaggtgaagttaaaaccaaagaaagttggccaattcatagagctgcacctgaatttaatgaccaatcaacagaaactgaaatccttgtaacaggtatcaaagtaattgatttgcttgcaccgtatgcaaaaggtggaaagattggattatttggtggagcaggagtaggaaaaacagttttaattatggaattaattaataacgttgcaaaagctcatggtggtttttcagttttcgcgggagttggagagagaactagagaaggaaatgacctttatcatgaaatgattgagtctggagtaattaaaaaagaaggagctggttcaaaagctgctttagtttatggacagatgaatgaacctcctggagcaagagcaagagttgcacttacagggttaactgtagctgaatactttagagatcaggaaggtcaggacgtacttttctttgtagataacatttttagatttactcaggcaggatcagaggtttcagctttgttgggaagaattccatctgctgttggatatcaaccgacattagctactgacatgggtaacctacaagaaagaattacgactacaaacaaagggtcaatcacatctgtacaagcaatttatgtacctgctgatgatttaacagaccccgctccagcaacatcgtttgctcacttggatgcaacgactgtactttcaagacaaattgcagaaattggtatttatcctgctgtagatccacttgattctacatcaagaattttagatccaagaattgttggagatgaacattatagagtagcaagagacgttcaacgaattctacaatcatataaatcactacaagatattatagctattcttggtatggatgagttatcagaagaagataaattagttgtagcaagagcaagaaaaatccagagatttttatctcaaccattctttgttgcagaagtatttactggttctccaggaaaacttgttgatcttgactcaactatcaaaggttttgatgcaatctgtaaaggtgagtatgaccacttacctgaagctgctttttatatggttggaacaattgaagaagctatagaaaaagctaagaaaatggaacaagaagctgctgcttaat

SEQ ID NO: 273962 - DNA, 1423 bp, Unknown
  Bacterial polypeptide expressing nucleotide sequence isolated from the Sargasso Sea
tatgagtgaaattaatcaaggaaaagtcgttcaagtaatgggggctgttgtagatgttaaatttgatgaccatctccctgctattttggatgcattacaggtagagcaagacggtaaaaaactagttcttgaagttgctcaacatcttggagagaattcagtaagaactattgctatggatactacggagggtcttaaaaggggacaatctgttgaaagtactggcgcaccaatatcggtccctgtaggagaagaaacattaggcagaataataaatgttgttggtgaaccagttgatcaaaagggagatttaaaagcgtctaaaacaagacctattcatcaaaatgctcctgagtttgtggatcaatcaacagaaaaagaaatcctagttacgggtattaaggtagtagatttattatgcccatactcaaaaggtggaaaaattggtttatttggaggtgctggtgtaggtaaaacagtactgattatggaattaattaataatattgctaaggctcatgggggatattctgtttttgctggggttggtgaaagaactcgagagggtaatgacctttattgggaaatgattgaatctggtgttaataaagaaggcggaggtgatggatctaagtgctctcttgtttatggtcagatgaatgaacctccaggggcgcgtgcaagagttgctctttcagggctttcagttgctgagcattttagagaagaggggcaagatgttctcttcttcgttgataatatctttaggtttactcaagcaggttctgaagttagtgcgcttttaggtagaatcccatctgctgttggttaccagcctactttagctattgatatgggtaatcttcaagaaaggataacttctactaataaagggtctattacttctgttcaggctatttatgtgccagctgatgatctaactgatcctgcgcctgctacatcatttgctcatttagatgcaactactgttttatcgagagcgatatcagaaaagggtatttatcctgctgttgatccacttgattcaaatagcagaattcttgaggcagatatagttggtgaagagcattacaatgttgccagggatgtgcaagaaattcttcaaaaatataaatcacttcaagatattattgccattctaggtatggatgaattaagtgaagaagataaattgactgttgcaagagctagaaaaatagaaagattcttctctcagccattccatgttgctgaggtctttaccggctcaccaggaattttggtagatataaatgataccattaaaggttttaaaggtttgtgtaacggcgattatgaccatttaccagaagccgcattttatatggtgggaacaattgaggatgccattaaaaagggcgaagagttagctaaggaagaataa

SEQ ID NO: 273963 - DNA, 1522 bp, Unknown
  Bacterial polypeptide expressing nucleotide sequence isolated from the Sargasso Sea
atggtttccatccgtcccgacgagatcagcgccatcctcaaaaagcagattgaggattacgacaagtctgtctccgtcagcaatgttggctccgttctccaggtgggagacggcatcgcccgtgtctacggcctgcaagaggccatggctggtgagcttctcgagtttgaagatggcaccgaagccatcgccctcaacctcgaagacgacaacgtcggcgccgtgctgatgggcgaaggccttggcgttcaggaaggcagcaccgttaaagccaccggcaagatcgcttcagtccccgttggagaagcgaccctcggacgggtggtcaactcgttgggtcagcccatcgacggcaagggcgacatcgctgcaacagagatgcgcctgatcgagtcgatggctccgggcatcattcagcggaagtcggtgcatgagccgatgcagaccggcatcaccgccatcgacgccatgatccccgtcggtcgtggccagcgggagctgatcatcggagaccgccagaccggcaagaccgctatcgcgatcgacacgatcctgaatcagaaggatcaggacatgatctgcgtctacgttgccgtgggccagaaagcggcatcagtggccaacgtggttgaagtgctccgcgaacgtggcgctctcgattacacggtggtggtggccgcgaacgcctctgagcccgctgccctgcagtacctggctccttatacgggtgcttcgatcgccgagtacttcatgtacaagggcaaggcaaccctggtgatctacgacgacctgtccaagcaggcggctgcttaccgccagatgtccctgctgctgcgtcgtccgcccggtcgtgaggcctatcccggagacgttttctaccttcacagccgtttgcttgaacgtgccgccaagctctccgatgccatgggcaaaggatcgatgaccgctctccccatcatcgagacccaagccggtgacgtttcggcgtacatccccaccaacgtgatttcgatcaccgatggccaaatcttcctgagttctgacctgttcaactccggtctgcgcccggccatcaatgtgggtgtgtccgtgagtcgggtgggcggtgccgcccagaccaaggcgatcaagaagattgccggaaccctgaagctggagcttgctcagttcgatgaactggctgccttctcgcagttcgcttccgatcttgatgcggccactcagaagcagctcggccgcggcaagcgtctgcgtgagctgctcaagcaaccccagttcagcccgctgatccttgctgagcaggtcgccattgtttacgccggcgtcaaaggcctcatcgatgatgtcccggtcgaaagcattgttgatttctcgcgtgagctgcgcgagtacctgaagtccaacaagcctgagttcatcaatgaaattcaggagaaaaaggtgatgagccctgaggctgaggccatcctcaaggacgccatcaacgaagtcgtgtccaacctcgtggcttcggccagctgaa

SEQ ID NO: 273964 - DNA, 800 bp, Unknown
  Bacterial polypeptide expressing nucleotide sequence isolated from the Sargasso Sea
ttttagagacaagggtgaagatgcattaatcgtttatgatgatctttctaagcaagcagtcgcttatagacaagtatcacttttattaaaaagacctccaggaagagaggcatatcctggtgatgttttttatctgcattccaggttgctagaaagagccgcaagagtaaatgcagactatgttgagcaaattaccggtggtgaggttaagggcaaaaccggctctttgacagctctaccaattattgaaactcttgctggagatgtttcggcttttgttccaacaaatgtgatttcaattacagacggacaaatatatttagagacagagttatttaattcaggtattaggcccgccatcaatcctgggctttcagtctcaagggttggcggatcagctcaaacaaaaattatgaaaaagttggctggtggagttaggactgcattagctcaataccgtgaattggctgctttctctcagttcgcatcagacctcgatgaagcaaccaaacagcagctcgctaatggtagagcatttacagagctgctgaaacaaaagcaatatgctccaatgagtgttgcccagcaagcactaagtctatttgctgcagataggggctacatggcagatatagaagttgagaaaatcttggactttgaagaagctttacatggttacttaacagcagaaaagggcgagctagaacagcaaataaattcaacaggtgattggaatgatgatatagaaaatcaatttaaagagcttgttgaagattttaaaaaaacacaaactttttaat

SEQ ID NO: 273965 - DNA, 1080 bp, Unknown
  Bacterial polypeptide expressing nucleotide sequence isolated from the Sargasso Sea
gagaaattaaaacagagatgactgctccagtagaagttgtagcccccggtgtgattgccaggcagtcagttgatcaaccggttcaaattggtttaaaagcagttgatgcaatggtaccaattggtcgaggtcaaagagagcttattattggcgacagacaaacaggtaagaccgctgttgcggttgatgcgatcatcaatcagaaaggaacaggtatcaaatgtatatatgttgctattggccaaaaacaatcaaccgtcgttaatgttgttaaaaagcttgaagaacatggagctctagaacatacgattattgtttcagcatcagcatctgatcctgcgcccatgcaatatctttctgcatactcaggttgttcaatgggtgaatattttagggataaaggtgaagacgctttgattgtgtatgatgacctctctaaacaagccgttgcatatagacaagtatctttacttttaaaaagaccgccaggaagagaggcctacccaggagatgttttttatcttcattcaagattgctagaaagagccgccagggtaaatgctgattatgtagaaaaagctacaaacggaaaggtgaaaggaaaaactggatctttaaccgcacttccgattatcgaaacacaagcaggagatgtttctgcttttgttccaaccaacgttatatcaattaccgatggtcaaattttcttagaaactgacctttttaattcaggtattagacctgctattaatcctggtatttctgtttctagggtaggtggagcggctcaaactaagattatgaaaaaactaagtggaggtgtcagaactgcattagctcaatacagagaacttgcagctttttctcagtttgcgtctgatctagacgacgcaaccaaagctcagcttgctagaggaataagaattaccgagctgattaagcagaagcaatattctccaatgagtgttgcccagcagtcactgagtatttttgctgcagatagaggctatatggatgatgttgaggttgaaaagattggcagttttgaagaaggcattgcatggctactttacatctgaa

SEQ ID NO: 273966 - DNA, 1126 bp, Unknown
  Bacterial polypeptide expressing nucleotide sequence isolated from the Sargasso Sea
ggaattaaatcaattgacgctatgatacctattggaagaggccaaagagaattagtaattggtgacagacagactggtaaaacaactgtttgtattgacacaattctaaatcaaaaagaattttacgatgctggagagcctgtcttttgtatttatgttgcaattggccaaaaggcatcaacagtagcagggattgcaaaaactcttgaagaaaaaggtgctttagattacactgttatcgttgcagctaacgcttcagatcctgcacctatgcaagtatttgctccattctctggcgcatgtattggtgagtactttagagatactggtagaccagcattaattatatatgatgatctatcaaaacaggcagttgcttatagagaggtttcactacttttaagaagacctcctggaagagaggcatatcctggtgatgttttttaccttcattcaaggcttttagaaagatctgcaaaggttgtgaatgatgataaagttgcaagtggtatgaatgatttgcctgcctcattgaaatctaaggtaaaaggtggcggttcattaactgcacttccaattattgaaactcaagccggagatgtatcagcatatattcctacaaatgtaatttctattacagatggtcaaatattcttggagtcagacttattcaattcaggagttagacctgcaattaatgttggaatctctgtttcaagagttgggggttctgcacagataaaatcgatgaaaaaagttgcgggtactctaaaacttgatcaagctcaatatagagaacttgaagcattttcaaaatttggttcagaccttgatgctgctacattaaatgtgatagaaaagggtagaagaaatgttgaaattttgaagcaaaatcaaaatgatccatttcaagttgaggatcaagttgcaataatttatgcaggatctcaaaaccttcttaaagaggttcctgttgaaaaagtaaaagcattcgaagaagcatttctacaagaactcagaaaaaataataaaaaactattagcagaattaaaatcaggaaaaatttctgataaagaaacagacgaaataaaaaaggtagctgaaaaagtcgcaaaatcattttaat

SEQ ID NO: 273967 - DNA, 1114 bp, Unknown
  Bacterial polypeptide expressing nucleotide sequence isolated from the Sargasso Sea
atgagtaaaggaataatcacacaagttattggagcggtagtagacgttatgtttgatggagaacttccagaaattttaacagcattggaatgtaaaaatggagacaatagacttgttttagaagttgcccaacatttaggtgaaactacagtacgaacaatcgcaatggatgctactgaagggttgaaaagaggtgatgaagtaactaatacaaatgcaccaatacaagttccagttggacctgaaactcttggaagaattatcaacgttattggagaaccaattgatgaaagaggtgaggttaaaacaaaagagagctggccaattcaccgagctgcacctgaattcaacgaccaatcaactgagactgagatacttgtaactggtattaaagtaattgatctacttgccccctacgcaaaaggaggaaaaattggattatttggtggtgctggtgtgggtaaaacagttttgattatggaattaattaataacgttgcaaaagcccatggtgggttttcagtttttgcaggtgttggagagagaactagagaaggaaatgatctttatcatgagatgatggagtcaggggttattaaacaagatggccctggatctaaagcagcattagtttatggacaaatgaatgaacctccaggagcaagagctagagttgcacttacaggattgactgtagctgaatactttagagatcaagaagggcaagacgtacttttctttgttgataatatttttagatttactcaagcgggttcagaagtttctgctcttttaggaagaattccatcagcagttggttatcaaccaactctggctactgacatgggtaatcttcaagaaagaattacaacaacaaacaaaggatcgattacttcagttcaagcgatttatgtgccagctgatgatttaactgatccagctccagcgacgtcatttgcacacttggatgcaacaacagtactttcaagacaaatagctgagattggaatttatccagctgttgatccactagactcaacttcaagaattttggaccctagaattgttggagacgaacattataaagtggctagagattacaaaaaatattaca

SEQ ID NO: 273968 - DNA, 868 bp, Unknown
  Bacterial polypeptide expressing nucleotide sequence isolated from the Sargasso Sea
aagagaaggaaatgatctctatcacgaaatgattgagtctggtgttataaagccagacggagcaggatcaaaagctgctttggtgtatggtcaaatgaatgaacctcctggagctagagcaagagttgccttatcggggcttacagttgctgagtattttagagatcaagaaggtcaagatgtattatttttcgttgataatatatttagatttacacaagctggctcagaggtttcagcattattagggagaattccatctgctgtaggttaccaacccacattagctaccgacatgggaaatcttcaggaaagaataacaactacaaataaaggttctataacatcagttcaggcgatctatgtacctgctgatgacttaacagatcctgcccctgcaacttcattctcacaccttgatgcaacaaccgttttatcaagacaaatagccgaactaggaatttatccagctgttgatccactagattcgacttcaagaattttagatccaagaattgtaggagatgagcattatagagttgctagagaagttcaaaaagttttacaaacctataagtctttacaagatattatagcgatccttggtatggatgagttatctgaggaagataaattgacagtagcaagagcaaggaaaattcaaagatttttatctcaacctttctttgttgctgaagtcttcacaggatcaccaggaaaattagtagagctagaagctaccattaagggctttgatgcaatctgcaaaggtgagtatgatcatttacctgaagcagcattttatatggtaggaactattgaagaagccatagaaaaagcagaaaaaatgtcaaaagatgctgcataa

SEQ ID NO: 273969 - DNA, 1088 bp, Unknown
  Bacterial polypeptide expressing nucleotide sequence isolated from the Sargasso Sea
agctgcacctgtatttaacgaccaatcaactgagactgaaatacttgtaacgggtattaaagtaattgatctacttgccccttacgcaaaaggaggaaaaatcggattatttggtggtgctggtgtgggtaaaacagttttgattatggaattaattaataacgttgcaaaagcgcatggtgggttttcagtttttgcaggtgttggagaaaggactagagaaggaaatgatctttatcacgagatgatggagtcaggcgttattaaacaagacggccctggatctaaagcagcattggtttacggacaaatgaatgaacctccaggagcaagagctagagttgcacttacaggattaactgtagctgaatattttagagatcaagaagggcaagacgtacttttctttgttgataatatttttagatttactcaagcaggttcagaagtttctgctcttttaggaagaattccatcagcagttggttatcaaccaactctggcaactgatatgggtaatcttcaagaaagaattacaacaaccaacaaaggatcgattacttcagttcaagcgatttatgtaccagctgatgatttaactgatccagctccagccacgtcgtttgcacacttagatgcaacaacagtgctttcaagacaaatagctgagattggaatttatcctgctgttgatccactagactcaacttcaagaattttagaccctagaattgttggagacgaacattataaagtagctagagatgtacaaaaaatattacagtcttataaatcattacaagatattatagctattttaggtatggatgaattatctgaagaggacaaattagttgtcgcaagagcaagaaaaattcaaagatttttatctcaacctttctttgtagcagaagtgttcactggatcaccaggtaaattagttgatttagagtcaactattaaagggtttgatgcaatctgcaaaggtgaatatgatcaccttccagaggcagcattttacatggttggtacaattgaggaagctatagaaaaagctgagaaaatgaaaaaagaagcagcagcttaat

SEQ ID NO: 273970 - DNA, 772 bp, Unknown
  Bacterial polypeptide expressing nucleotide sequence isolated from the Sargasso Sea
atctggtgcactaaaaagaagtgtactgtttttgaaccttgcagacgatcctgcaattgagagaattatcacacctagagtcgcattaacagttgctgaatatcttgcatatgatttgggaatgcacgtactagtcattcttactgacatgacaaactatgctgaagcacttcgtgaaattagtgcagcacgagaagaagtaccaggaagaaaaggttatcctggatatctttacactgacctttccacaatttatgaaagagcaggaagactaagaggcaaaaaaggaagtgttacacaagtacctatcttaacaatgccatctgatgatatcacacacccaattccagatcttaccggttacattacagaaggacaattagtacttggaagagatttgttcagacagggagtctatccaccaattaacatcttaatgagtctaagtagaatcatgaaagacggaattggtgagggaagtactcgtgctgatcaccaagaaatctctaaccaaaactatgatgcatactctcgtgctcaagaagttagagcactagcaggaattgtaggaaaagcaggtcttacaccagttgatctaaattacatgaactttggcgatgagtttgaaaagaaattcttaacacaagcaattgatgaaaacagaactattgaagaaacacttggcttacaatggaactgtgtctcaaaacttccaaagaatgaacttaccaaagtcaaagacaaatacgtagaacaatactataaggaataa

SEQ ID NO: 273971 - DNA, 357 bp, Unknown
  Bacterial polypeptide expressing nucleotide sequence isolated from the Sargasso Sea
gtcaattagatcctttggttattggaaatgagcattatgatgtagccagaaatgttcaaaatatgcttcagaaatataaagagctaaaagatataattgctattcttggtatggatgaattatcagaagaagataagcttgttgttgctagagcaagaaaaattcaaagatttttatcacaaccattttttgttgctgaagttttcactggcagccaaggaaagtatgtttctcttaaagaaacaattaaaggctttaaggcgattgctgatggagaatatgaccatcttcctgaacaagcattttatatgattggggccattgaagaagcggaagaaagagctaaggaactttaac

SEQ ID NO: 273972 - DNA, 895 bp, Unknown
  Bacterial polypeptide expressing nucleotide sequence isolated from the Sargasso Sea
aatgccaagtcttaaagatattaaaaaccagatcaactctgttggatctacaaaaaaaattacttctgctatgaaaatggtggcagcaagtaagttaagaagatctcaagaaaaggctgaagcagcaagaccttactcatcaagattggaagaaatgttagtttctcttgcttcgtctgtagcatctggcgatggaattattaaactattgaccggcacaggtaatgaccaaaattatgttataataccagtaagtgctgacagaggtttgtgtggtggttttaatagcagtataaacagggaaacttttaaattagtaaaatctctagaaaaagatggtaaaaaagttgaactaatgccagttggcaaaaaaagtagagactttttcaatcgcgtcatgaaagatcaaatacttgagagttttgttgacttaaatgtttctcaatctggatatgactcagcactccaggtttctaataagctgcaagaattattctttgaaggtaaatttgataaatgcattttagtatttaataaatttaaatcagtaatttctcaagaagttactcagcaacaattaattcctttagatgtttcaaattcacctaaagaagaaaatcctgacgataatgtagttaaggcaatttatgattatgaacctgatgaagaaacaatcttaaaagatttacttcctaaaaatgtttctattcagatttttaaagtcttgttagagagtgatgccggtgagcatggagcaagaatggcagcaatggataatgcaactcgtaatgctggtgagatgattgatagtttaacactaaaatataacagaacgcgccaagcgtttataactaaagaattaattgaaattatttctggagctgaatcagtttaa

SEQ ID NO: 273973 - DNA, 440 bp, Unknown
  Bacterial polypeptide expressing nucleotide sequence isolated from the Sargasso Sea
tctttctagacaaatagctgaactaggaatttatccggcagttgatccacttgactctacttctagaatcttggatccaagaattttgggagaggaacattatagagtagcaagacaagttcaaaaaatcttgcaaacgtataaatctcttcaagatataattgcaattcttggtatggatgagctttccgaagaggataaattgactgtagcacgagcaagaaaaattcaaagattcttatcacaaccattttttgtagcagaagtatttactggaacaccaggtaaacttgtaagtttggatgctacaattaagggtttcgattcgatttgcaagggagagtacgatcacttgcccgaggctgctttttatatggtaggtactattgaagaggctattgcaaaagcagaaaaaatggcaaaagaagctgcagcttaaa

SEQ ID NO: 273974 - DNA, 1180 bp, Unknown
  Bacterial polypeptide expressing nucleotide sequence isolated from the Sargasso Sea
ttcctcagaccaaacagcaccaatagaaaaagttgcaccaggcgtcatctcaagactttcagtcgaccaaccagttcaaaccgggcttaagtcgattgatgcaatggtaccaatcggaagaggccagcgagagcttatcattggtgatagacaaacaggaaaaacagcggttgctgttgacaccataatcaaccaaaaaggcacagggattaaatgtatctatgttgcggtgggccagaaaaactcttcggttgccaatgtggttaagaagttagaggaagaaggcgcattagagcacacgatcattgttaatgctgcagcatccgattcagctgccatgcagtatattgctccatattcaggctgtgccatgggcgagtacttccgagacaaaggagaagacgccctaattatttttgatgacttaactaagcaggcgtgggcatataggcaagtatcacttctattaaaaagacctcctggaagagaggcttatcctggcgacgtattttatcttcactcaagattgcttgaaagagcagcaagggtgaatgcagagtatgtagaaaaagaaacaggcgggaaagtgaagggccaaacaggctcgttaactgcattgccaatcattgaaacacaagcgggggacgtttctgctttcgtgccaacaaacgtgatttcaattacagatggacaaatatacctagaaagtgatttattcaatgcgggcattaggccagcaataaatgcaggtttatcggtttccagggttggcggcgcagcgcaaacaaaaatcattaaaaaactcggtggtggtgtcaggttggcattggcacaatatcgtgagcttgcagcatttgcccagttcgcatctgatcttgatgaagccacgaggaaacagttagaaagaggccagagagtaacagagttaatgaaacaaaaacaatacgcaccattaactgtagcagaaatggccgtatctctttatgctgcgaacgagggctatcttgatgatgtcccagcagataagattgtcgattttgaggcagcactacacgcaaactttgttgaatcagcctctgatcttgcccaaaaaatcaatgacactggcgactacaacgatgaaattgaaaccgagctcaaaaagttcgttgaagactttaaagcaaccggcacctattaa

SEQ ID NO: 273975 - DNA, 287 bp, Unknown
  Bacterial polypeptide expressing nucleotide sequence isolated from the Sargasso Sea
tatggcaaacgaaaaggaaattcgaacaaaaattgggagtgttaaaaacacccaaaaaattacgaaggccatggaaatggttgcggcaagcaagatgcgtagaacacaagaaaccatgaaaaaagcattgccatatgcagacaaaatcagagcagtgataggacatatctataaagcgaatccggactacaaacacccctttcttgaaaagcgtgaagtcaaaacaactggctacattgttgtcagttctgatagaggactttgtggcggactcaatgtaaacatgt

SEQ ID NO: 273976 - DNA, 1537 bp, Unknown
  Bacterial polypeptide expressing nucleotide sequence isolated from the Sargasso Sea
atggaaataaatccttcagaggtaacaaaaatattaaaagaacaaattaaaaaatttggcgataaagctgaggtcactgaagtaggacaagttttgtctgtgggtgatggtatagcgagaatttatggattagataatgttcaagctggtgagatggtagagttttctgatggatcaaaaggtatggccttaaatcttgagagtgaaaatgtaggggttgtaatttttggggatgataaagctgtaaaagagggagacactgtaaaaagaacaggtgcaattgtagatacaccagttggaaaagaattattaggtagagttgttgacggtttgggaaatccaattgatggaaaaggtgctttagataaaagtgtaaaaagaagtagggttgaggtaaaagctcctggtattattccacgtaaatctgtaagtgagccaatgcagactgggcttaaatcaattgatagtttagttccaatcgggagaggtcaaagagaactaatcattggcgatagacaaactggtaaaacagccgtagctatagatgccattataaatcagaagaaaattaatgagtctggtgatgagaagataaaactttattgtatttatgttgctgtaggtcaaaaacggtcaactgttagacaaattgaaaaaactttagaagaagcgggtgcgatggagtatacaacgatagttgctgctaccgcatcagatgcagcacctttacaatttctagctccatatactggatgtgctatgggtgagtactttagagataatggtatgcatgctttgataatatatgatgatttatcaaaacaggcagtagcttatagacaaatgtctcttttattaagaagaccaccagggagagaagcttatcctggtgatgtcttttacttacacagcagattgcttgaaagagctgcaaaattaggggacgagcatggtggaggatctttaacagcacttccaatcattgaaactcaaggtggagatgtgtcggcatttataccaacaaatgttatttcaattactgatggtcaaatattccttgaaactgaactttttaatcaaggtataaggccagcgataaatgttggtttgtctgtatcaagagttggatcttcagctcaaactaaagcgatgaaaaaggtatctggctcaatgaagttagaactagcacaatatcgtgaaatggcagcatttgcacaatttggttcagatcttgatgcatctacccagaaattacttaatagaggctcaaaattaactgaacttttaaaacaaaatcaatattctccaatgactgttgcagaacaagtcatttctgtattttgtggggtgaaaggacatcttgatgatattgatcagaaagacatagctagttttgagaataaaattattgaaaaatgtaaagctgaaaaatcagatataattgattcaatttcaagctctggaaaacttgaagatgacaaagagaaggaattgaatgaaattattcttgaacttaagaaagattttaaatcataaa

SEQ ID NO: 273977 - DNA, 1126 bp, Unknown
  Bacterial polypeptide expressing nucleotide sequence isolated from the Sargasso Sea
atgaaaaaagggaaaattacacaaatcattggagcggtagtagatgtcaaatttgaaggagatctaccagaaattttaacagcattagaatgtaagaatggagacaatagattagttttagaagttgcacagcatttaggagaatctagcgtaagaactatcgctatggatgcaacagagggcttgaaaagaggagatgaagtattagatacaggcgcaccaattaaagttccagttggaccagaaacattaggaagaattgttaatgttataggtgaacctattgatgaaaaaggtgaagttaaaactaaagaaagttggccaattcatagagcagcacctgaatttaatgaccagtcgacagagacagaaattttagtcacaggaattaaggtagttgatttattagctccgtatgcaaaaggtggaaaaattggattatttggtggtgcaggagtaggaaaaacagttttaattatggaattaattaataacgtagcaaaagcgcatggaggcttttcggtttttgctggcgttggtgaaagaaccagagagggaaatgatctttatcatgaaatgatagaatcgggagttataaaaccagaaggaactggttcaaaagcagcattagtctacggccaaatgaatgaaccgcctggagcaagagcaagagtagctttatcaggattaactgtagctgaatattttagagaccaagaaggtcaagatgtactttttttcgtcgataatatatttagatttacacaagctggttctgaagtgtctgcacttcttggaagaattccatcagctgttggatatcaaccaacattagcaactgatatgggtaatcttcaagaaagaattactacaacaaataaaggttcaataacatctgttcaagcaatttatgtacctgcagatgatctaactgaccctgcgccagctacatcattttctcacttagatgcaacaacagtattatcccgtcaaattgctgaattaggaatttatccagctgtagatccattagattcaacttctagaattttagatccaagaatagttggagatgaacattatagagttgcaaagagaagttcaaaaaattttacaaacatataaa

SEQ ID NO: 273978 - DNA, 304 bp, Unknown
  Bacterial polypeptide expressing nucleotide sequence isolated from the Sargasso Sea
ttgcaaagagaagttcaaaaaattttacaaacatataaatcactgcaggatattatgcaaattttaggaatggatgaattatctgaagaagataaattaactgtagctagagcaagaaaaattcaaagatttttatcacaacccttttttgttgctgaggtgtttactggttcaccaggaaaacttgttgatttagaatcaaccataaaaggttttgatgcgatttgtaaaggtgaatacgatcatttgccagaagctgcattctatatggtaggaactatcgaggaagttatcgaaaaagcag

SEQ ID NO: 273979 - DNA, 883 bp, Unknown
  Bacterial polypeptide expressing nucleotide sequence isolated from the Sargasso Sea
atggctagtttagacgatcttaaaaaaagaatttcgagtgtaaagtccacacaaaagattactaaggcgatgaaaatggttgcggctgcaaaacttagaagagctcaggaaagtgcggaaaaaggcagaccttactctgaaaagatgaacaatattattttaaatttatctaatggaatatcagatatagaaaatgctccaaaattgttgtcgggaactggagaagataaagttcatttatgcgttgttatgacctcagatagaggtctgtgtggaggatttaatactaatatcataaaaaaagctaaaatattttttcaaaaaattttagatgagggaaaaactttaaaaattattactgtaggatctaaaggttatgatcaattaaaacgtgtttatggtgataatattatagaaagaatatcctttaaagattctaaaaatgtaaattattttgatgcagataaagttggtaagttagtaatcgaaaaatttgaaaaaaaagaatttgatgtatgtacaattttttataatcaatttaaaaacgtaattacacaaatacctcaagagcaacaaataattcctttaaaaatatctgagaaaaagaaagatgatagcttgtcagaagatacttacgaatttgaaccagaagaagatgaaattttaagtaatttattgccaaaaaatatttcaactcaaatttttaaagcaatgttagaaaatgcggcaagtgagcaaggttcaagaatgagtgctatggataatgcaactcgaaatgcaggcgaaatggttgataagcttactattgagtataatagaagccgtcaagcagcaattactaaagaattaattgaaataatatcaggagcagaaagtttataat

SEQ ID NO: 273980 - DNA, 822 bp, Unknown
  Bacterial polypeptide expressing nucleotide sequence isolated from the Sargasso Sea
aatggaaataaatccttcagaagttacaaaaatattaaaggaacaaattaaaaaatttggtgataaagcagaagttacagaagtgggtcaagttttatcagtgggagatggtatagcaagaatatatggattagataatgttcaagctggagaaatggtagaatttgcagatggatctaaaggtatggcacttaatttagaaagtgaaaatgttggagttgtaatttttggagatgataaagcagtcaaagaaggagatactgtaaaaagaactggagctattgttgatactccagttggaaaagaattacttggaagagtagttgatggattgggaaatccaatagacggcaagggagcacttgataaaggtgttaaaaaaagtagagttgaagtaaaagctcctggaataattcctagaaaatcagttaatgaaccaatgcaaactggacttaaatcagtagatagtctagtgccaattggcagaggacaaagagaattaataattggcgatagacaaacaggaaaaactgctgttgcaatagatacaatcattaatcaaaaaaaaataaatgaatcgaatgatgaaaaattaaaactatattgtgtctacgtggcaattggccaaaaaagatctacagttagacaaattgaaaaaactttagaggaagctggtgcgatggaatatacaacaatagtagctgctacagcttcagatgctgcgccacttcaatttttagcaccatatacaggatgtgccatgggagaatattttagagataatggaatgcatgcattaattatttatgatgatttatcgaa

SEQ ID NO: 273981 - DNA, 973 bp, Unknown
  Bacterial polypeptide expressing nucleotide sequence isolated from the Sargasso Sea
tggagctggagttggtaaaactgttttaattatggaattgattaacaacgttgcaaaggctcatggtggattttcagtttttgcaggagtaggagaaagaactagagagggaaatgacctttaccatgaaatgatagattcaggtgttattaaaactgatggggaaggttctaaagcagcattagtatatggacaaatgaatgaacctccaggtgcaagagcgcgagttgctttaactggattaactgttgctgagtattttagagatcaagaaggtcaagatgtattattcttcgttgataatatatttaggtttacacaagcaggatctgaggtctctgcattgcttggtagaataccttcagctgtaggatatcaaccaacattagcaactgatatgggtaacttacaggaaagaattacaacaacgaataaaggttcaattacatctgttcaggcaatttatgttcctgcagacgacttaactgaccctgcgcctgcaacttcatttgctcacttagatgcaacaacagtactttctagacagattgctgaaattggaatttacccagcggtagatccactagactcaacgtctagaattttagatcctagaatagttggtgacgaacattatagagttgctagagaagtacaaaaagttctgcaaacttataaatctttacaagatattatcgcaattttaggtatggatgaattgtcagaagaggataaattagttgttgctagagctagaaaaatacaaagatttctttctcaacctttctttgtagctgaagtatttactggctcgccaggtaagcttgtagatttagagtcaactatcaaaggctttgatgctatttgcaaaggtgaatatgatcacttaccagaagctgcattttatatggttggcactattgaagaagctattcaaaaagctgagagtttagctaacgaagctgctgcataa

SEQ ID NO: 273982 - DNA, 1543 bp, Unknown
  Bacterial polypeptide expressing nucleotide sequence isolated from the Sargasso Sea
catgcaactgaattccactgaaatcagcgatctgattaagcagcggatcgagcagttcgaagtcgttagcgaatctcgtaacgaaggtactatcgttgcggttagtgacggcattatccgcatccacggcctagccgatgtgatgcaaggtgaaatgatcgaactgcctggtagccgttttgcaatcgcgttgaaccttgaacgtgattctgtcggtgccgtagtaatgggtccttatgctgatttagcagagggcgtaaaagttaaaactactggccgtattctggaagttccagtcggtcgcggtctgttaggccgtgtagttaacactctgggtgagccaattgacggaaaaggcgctatcgataacgatggtttctctcctgttgaagtgatcgcaccaggtgttatcgagcgtaagtcagtagatcaaccagttcaaactggttataaagccgttgacgctatgatcccaatcggtcgtggccaacgtgaattgatcattggcgaccgtcaaactggtaaaacagcgatggcgatcgacgcaatcatcaaccagcgcgattctggcatcaaatgtgtgtacgtagctgtaggccaaaaggcttctactatcgctaacgtagtacgcaagctagaagagcacggtgcattagctaacactatcgttgtagtagcaacagcttctgaagctgcagcactgcaatacttagcaccatactctggttgtgctatgggtgaatacttccgcgaccgcggtgaagatgctctgatcgtatacgatgacctgtctaagcaagctgttgcttaccgtcagatctcgttactgctgaagcgtccaccaggccgtgaagcttatcctggtgacgtattctatctacactctcgtttattagagcgtgcttcacgcgtaaacgaagaatatgtagagaagttcactaagggtgctgtaacaggtcaaaccggttctttaaccgcgctgcctattattgaaactcaggcgggtgacgtatctgcattcgtaccgaccaacgtaatttctattactgacggtcagatcttccttgagaccgatctgtttaactctggcttacgtccagcggttaacccaggtatttctgtttctcgtgttggtggtgcggctcagactaagatcatcaagaaactgtctggtggtatccgtaccgctcttgcacagtatcgtgaacttgctgcgttctcacagtttgcatctgacttagacgatgcaactcgtgctcaacttgagcatggtgtgcgtgttaccgaactgatgaagcaaaaacaatatgctcctatgagcgtagccgctcaagctgtgtcaattttcgcagctgaaaaaggttacctgaagggcgttgagctgaaaaaagttggtgatttcgaagccgctctgctctcgtacatgaacagcgagcatgctgctttaatcaagcttatcaacgagactggcgattataacgccgatatcgaagctgaattaaaagctggcctcgacaagttcgtagcaacccaaacctggtaa

SEQ ID NO: 273983 - DNA, 862 bp, Unknown
  Bacterial polypeptide expressing nucleotide sequence isolated from the Sargasso Sea
gatggccggcgctaaagagattaaaaccaagatcgcgagtgtgaaaaacactcagaagatcacgtccgccatggaaatggtggcagccagcaaaatgcgcagagcgcaggaacgcatggctgcaagccgtccatacgcggaaagcatgcgtaaggtgatcggtcacgtagcgcaaggttctctcgagtataaacacccctacttagaggtgagagaggccaagcgggttggttacattgttgtagcaaccgaccgtggcctttgtggtggtttgaacgtcaacctctttaaaaaggttgtttcagacgtgaaaagctggaaagagcaaggtgcagaatttgaattctgcccaatcggtgctcgtagtgtgcagtttttcaaaagcttcggcggtcaagtatctgcccatgcttcaggtttaggcgatgcgccaaagctcgctgacctgatcgggacagtacgtgtaatgctagatgcttacaacgaaggcaaactggatcgtctgtatgtagtgttcaacaagtttgtaaacactatgacgcagactcctgtgatcgagcagctgctacctttgcctaaatcggaagatgatgaggttgctcatcgttgggactacatctacgagcctgatccaaaagcccttttggataccttattggttcgttatgtagaatctcaggtttaccaaggtgttgttgaaaacattgcttccgaacaagctgcccgtatggtggcgatgaaggcggcaacagacaacgcgggtacactgattgacgatttgcaattggtctataacaaggctcgtcaggctgcgattacgcaggaactgtcggaaattgtttctggtgcctctgcggtttag

SEQ ID NO: 273984 - DNA, 1393 bp, Unknown
  Bacterial polypeptide expressing nucleotide sequence isolated from the Sargasso Sea
catgagcacaggtactgttgtccaagtgattggcgcggttgtggacgtagagtttccacaagatgccgtacctcaggtatatgacgctctgaagatcacaggtgaaggctcctgtaatggtttggtgctggaagttcagcaacaactaggtggtggtgtagttcgtaccatcgctatgggtacttctgatggtctgcgtcgtggtcttgaggtagtaaactcaggttcacctatttctgttcctgttggtaccgccactcttggccgtatcatgaacgttttaggcgaccctattgatgaagctggtgcaattggcgaagaagaacgttatgtgattcaccgcagcgctccttcatacgaagagcaatcaaacacgactgaactgttagagacgggtatcaaggttatcgaccttgtatgtccattcgctaagggtggtaaagtaggtctgttcggtggtgcgggtgttggtaagacagttaacatgatggaactgattaacaacatcgctaaagctcactcaggtctttctgtattcgctggtgtaggtgagcgtactcgtgagggtaacgacttctactacgagatgaaggattctggcgttctcgacaaagtagccatggtttatggtcaaatgaacgagccaccaggaaaccgtctgcgtgtagcactgaccggtctgactatggctgaaaagttccgtgacgaaggtcgtgacgtactgttgttcgttgacaacatctaccgttacaccctagccggtactgaagtatcagcactgttaggtcgtatgccttctgcggtaggttaccaacccactctggctgaagaaatgggcgttctgcaagagcgtattacttcaactaagacgggttctattacctctgtacaagcggtatacgtacctgcggacgacttgactgacccgtcaccagcaacaaccttcgctcacttagatgcgactgttgtattgtcacgtcaaatcgcttctctgggtatttacccagcggttgacccattggattcgacttctcgtcaattagatccattagtggttggtcaggagcactatgacgtagctaacggtgtacaaactgttctgcaacgctacaaagagctgaaagacattattgcgattctcggtatggacgaattgtcagatgatgacaagatgaccgtttcccgtgcacgtaagattgagcgtttcttgtctcagcctttccacgtagcagaagtctttactggttctcctggtaagtacgtttctctgaaagacactatccgtggcttcaagggaattctgagtggtgagttcgatcacattccagaacaagcgttctacatggttggttctatcgacgaagctgtcgagaaagctaacaaaaagaaataa

SEQ ID NO: 273985 - DNA, 1120 bp, Unknown
  Bacterial polypeptide expressing nucleotide sequence isolated from the Sargasso Sea
aatggatataaacccttcagaagtaacaaaaatattaaaagagcagataaaaaaatttggagataaagctgaaataagtgaagtagggcaagttctatcggttggagacggtattgctcgtgtatatggtttagataatgttcaggcaggtgagatggttgaattttcagatggttctagaggtatggctttaaacttagagagtgagaatgtaggagtagtaatttttggcgatgataaagctattaaagagggagatacagttaagagaacaggagcaattgttgacactcctgttggtaaagaactattgggaagagttgttgatggattaggaaatccaattgatggcaaaggcgcattagataaatcaatcaaaaaaagtagagtagagataaaagctccaggaattataccacgtcaatcagttaacgaaccaatgcaatctggtttaaaagcaatagatagtttagttcctattggaaggggtcaaagggaattgattattggagacagacaaactggtaaaactgcagttgcagtcgatactatcataaaccaaaaaaaaattaatgaaagcggtgatgaaaaacaaaaactttattgtatttatgttgcaataggtcaaaagcgatcaactgttagacaaatacaaaaaactttagaggaagctggagcaatggattatacaactattgttgcagctacagcgtctgatgcagcaccattacagtttcttgctccttatacaggttgtgcaatgggtgaattctttagagataatggcatgcatgctttaattatttatgatgatttatccaaacaagctgtagcctataggcaaatgtcattattattaagaagacctccaggaagagaagcttatcctggtgatgttttttatttacacagcagacttttagagagagcagcaaaactaagcaacgaacatggaggtggatcgttaactgcacttccaataattgaaacacaggctggagacgtttcagcttatatacccactaatgtaatttcaattaccgacggtcaaatttttttagaaactaatttattcaatcaaggcataagaccggcgattaatgttggactatctgtatca

SEQ ID NO: 273986 - DNA, 1384 bp, Unknown
  Bacterial polypeptide expressing nucleotide sequence isolated from the Sargasso Sea
ttgagtaaccaaggtggagttcaatacagcaagattgctgagattaaaggaccactagtaattgttgatggtgtagataacgcagcatttgatgagctagtagaaattgaaacacttgatggtgaaaaacgtctaggaaaagttctagaggttggaaacggtaaagcagtcgttcaggtctttgagggcacaacaggtctttctgtttcaggaaccaacgcaaaatttgtcggtaaagttatggaaatgccagtatcagaacaagtacttggtagagtttttgatggtttaggaagagcaaaagatggtttaccagaaccagttgcagattcatttttagatattaacggcgcaccaatgaatcctgaacaaagagagtatccaaaagatttcatccaaacaggtgtatctgtaattgatggaatgctcacacttgtaagaggacagaaacttccaatattttctggctctggtatgtcacacaacatcttggctgcacaaattgcacgtcaagcagcaattattggaacagatgatagtttcgctgtcgtctttgcagcaattggtgtacagtacagtgaagcagaatatttcaaaagaagtctagaagaatctggtgcactaaaaagaagtgtactatttttgaaccttgcagatgatcctgcaattgagagaattatcacacctagagtcgcattaacagttgctgaatatcttgcatatgatttgggaatgcacgtactagtcattcttactgacatgacaaactatgctgaagcacttcgtgaaattagtgcagcacgagaagaagtaccaggaagaaaaggttatcctggatatctttacactgacctttccacaatctatgaaagagcaggaagactaagaggcaaaaaaggaagtgtcacacaagtacctatcttaacaatgccatctgatgatattacacacccaattccagatcttaccggttacattacagaaggacaactagtacttggaagagatttgtttagacaaggagtctatcctccaattaacatcttaatgagtctcagtagaatcatgaaagacggaattggtgagggaagtactcgtgctgatcatcaagaaatctcaaaccaaaactatgatgcatactctcgtgctcaagaagttagagcacttgcaggaattgtaggaaaagcaggccttactccagttgatctcaattacatgaactttggcgatgagtttgaaaagaaattcttaacacaagcaattgatgaaaacagaactattgaagaaacacttggcttacaatggaactgtgtatcaaaacttccaaagaatgaacttaccaaagtcaaagacaaatacgtagaacaatactataaggaataat

SEQ ID NO: 273987 - DNA, 1774 bp, Unknown
  Bacterial polypeptide expressing nucleotide sequence isolated from the Sargasso Sea
atggtagcacaaggaaaaattgtatggattagcggaccggcagtaaaagctgacggtatggctgatgcaaaaatgtatgaaaccgtatcagttggagatgcaaaactaatcggtgaggtaattcgtcttaccggagatgtagcattcattcaagtttacgaatcaacaagtggtctaaaaccaggtgaacctgtagttggtacaggaaacccactcagtgttttactaggacccggaattattggtcaaatttatgacggaattcaaagacctctaaaggatttggcttctcaatcaggctctttcattggaagaggaattacaactactcctgttgatatgacaaaagaatatcactttgtaccatctgttgcagttggcgatgaggttcaagcaggaagcataattggaaccgttccagaaacatcattaattgagcataaaattctagtcccaccagatcacaaaggtggaaaaattacaaaaattgtttcagaaggtgattacgcattggagactgagattgcgacagttgaaggttctgacataccactcaaaatgtatcacaaatggcctgtcagacaaccaagaccatatctcaaaagatatgatccaactgtcccattacttaccggtcaaagagttatcgacacatttttcccattagcaaaaggcggtactggttcaattccaggtgcatttggtactggtaaaactgtaacattacatcaaattgcaaaatgggctgactctcaagtcgtagtctacattggatgtggtgaaagaggaaacgaaatgactgaggtacttgtagagttcccagaactcaaagacccaagaactggaaaaccactcatggacagaactgttcttgtagcaaacacaagtaacatgccagtagcagcaagagaagcaagtatctacacaggtgtaacaattgcagagtattatcgtgatatgggttatgacgttgtacttgtagcagactctacaagcagatgggccgaagcacttcgtgaaatgtcaggtagactcgaagagatgcctgcagaagaaggttatccatcataccttgcatcaagattagcagaattttatgaaagagcaggacgtgtacaagcacaaggttctcctgaaagagacggttcagtatctctggtaggtgcagtttcgccatctggtggtgactttacagaacctgttacaacacacacaatgagatttatcaaaactttctgggctctagatgcaagtttagcatattcaagacattatccatcaatcaactggatgaactcctattctggttatctagcagatattgcaaaatggtggtctgaaaacatcagtcctgactggctcaaccttagaagtgaaacatatggaatcttacaaagagaagacacactaaaagaaatcgtaaaactactaggacctgaagcacttccagacgaagaaaaactaatcttagaagttgcaagaatgattaagattggaatcttacaacaaaactcctttgatgatgtagatacctactgtagtcctgaaaaacaattcaaattaatgaaattacaagttgacttttacaatcaaggtcaacaagcactaaaagatggtgcatcactagctgacattcgttcaatggaagtaatttcatcactactcaaagcaagaatggatgtaaaagatgatgagatggataaattagataaacttgcaactgacatggttgagcaattcaaaagcgttacaggagttaaagttcaaaattgag

SEQ ID NO: 273988 - DNA, 1456 bp, Unknown
  Bacterial polypeptide expressing nucleotide sequence isolated from the Sargasso Sea
atgtcaataaaagcatcggagatctcttcgatcatcagagatcaaattaataactttgaaagccaagcggatatatcagaagtaggaactgtcctaaaggttggtgacggagttgcacaagtttatggtttggataatgttcaagctggtgaaatggtagaattcacggggggtgttcaaggaatggcacttaacctagaagaagacaatgtcggtatcgttatttttggtgatgatagaggtatcaaagaaggagatactgttaaaagaactcaaaagattgttgaagtacctgtcggtaaaggtttgttaggaagagttgtcgatgcactcggaaatcctattgatggtaagggtcctattcaaagtagtgagtcaagtagaattgaagttaaagctccaggtattattccaagacaaagtgtgagtgagcccatgcagacagggcttaaagcgcttgactctcttgtacctgtgggtcgaggtcaacgagaattaattattggagatagacaaactggaaaaacagccgttgctatcgatacgattataaatcaaaaggaaattaaccaatcagatgatgagtctaaaaaactttattgtatctatgtagcgattggtcagaaaagatctacagttgctcaggtcgttaaaactttggaagaaaatggggcgatggaatacactattgtcgtcgcagcttctgcctctgatccagcacctcttcaatttttagcaccttacgcaggttgctctatgggtgagttttttcgtgacaacggaatgcacggtctaatcgtttatgacgatttatcaaaacaagcagttgcatatagacaaatgtcattactactaagaagaccaccaggacgtgaagcgttcccaggtgatgttttttatcttcactctcgtcttttagaaagagcagctaaaatgaatgatgaaaatggtggtggaagtttaacagctttacctgttattgaaacacaagcgggtgatgtgtcggcattcatcccaacaaatgtgatttcaattactgatggccagattttcttagagacagaattattcttctctggtatcagaccagcgattaatgttggtttatccgtgagtcgtgtgggatctgcagctcaaactaaagctatgaaaaaagttgctggtaaaattaaattagaactggcccagtaccgtgaaatggctgccttttctcagtttgcatcagacctagacgcatctactaaacaactattggcaaggggtgaaagattaacggaactattaaaacaagatcaatatgttcctatgtctgttgctgaccaagttttaagtttgtactcgggtgttagaggctttttggataaaattgatttagctaaaatcactgattttcaagttaaattcttagaaggtcttcgcgctgatcactctgatatttttgaagaaattaacaata

SEQ ID NO: 273989 - DNA, 877 bp, Unknown
  Bacterial polypeptide expressing nucleotide sequence isolated from the Sargasso Sea
atggccagtttagatgatttaaaaaaaagaatttctagtgttaaatctacacagaaaattactaaagcaatgaagatggtcgcagcagcaaaattaagaagagctcaagaaaatgctgaaaagggaagaccttattctgaaaaaatgaataatataattcttaatctttcaaacgggatatctgataaagaaaatgcaccaaaactacttgctggaacaggagaagaaaaaactcatttatgtgttgttatgacttcagatagaggtttatgtggaggttttaatacaaatattatcaaaaaagctaaacagtattttcaaaaaatattaaaagaaaataaaacattaaagattataaccgttggatctaaaggttatgatcaattaaaaagacaatataaagataatataattgaaaaaatttcatttaaagattctaaaaatattaattattttgatgctgataaggtaggcaaaattataattgatagattcgaaaaaaaagaatttgatgtatgtgcaattttttataatcaatttaaaaatgttattactcaaataccacaagaacagcaaattatacctttgaaatctaatgaagaaaaagaggctaattctgacagtagttatgaatttgaaccagaagaagatgaaattttaagtaacttattacctaaaaatatttctacacagatttttaaagcaatgttagagaattcagctagcgagcaaggttcaagaatgagcgctatggataatgcaacaagaaatgcaggtgaaatggtggacaaacttacaattcagtataatagaagtcgtcaagctgcaattactaaagaattaatcgaaataatatcaggagcagaaagtttataat

SEQ ID NO: 273990 - DNA, 745 bp, Unknown
  Bacterial polypeptide expressing nucleotide sequence isolated from the Sargasso Sea
aatgagtaatggagttgtgacacaaattatcggagcggttatagatgtcgaattcgatagagagaacataccaagcgtgtatgaggctcttaatattgtcggtcttgaaaccgtgcttgaggttcagcaacaattaggtgatggaattgtaagaactatcgctatgggctcaacagaagggctaaaaagaggtttagaggttgttagaactaatgcacctatttcagttcctgttgggcaagaaactctgggaagaattatggatgttttgggaaatcccatagatgaaaaaggtgacattggtgaaaaagaaagacaacctattcataaaagcccgccaagctacactgatcaagcaggatcaaacgagttactagaaacaggcatcaaagttattgacctaatgtgtccttttgcaaaaggaggaaaagttgggttatttggaggagctggagtaggtaagaccgttaacatgatggaactcataagaaacattgcgattgagcattcaggattttctgttttcgctggggttggtgaaagaactcgagaaggtaatgacttttatcacgaaatgaccgaatcaaatgttttagacaaagtttcacttgtgtatgggcaaatgaatgaacctccaggcaacagattaagagttgctcttaccggcttaacgattgctgagaaattcagagacgaaggaagagatgtgcttctttttattgataatatttacagaatatacact

SEQ ID NO: 273991 - DNA, 682 bp, Unknown
  Bacterial polypeptide expressing nucleotide sequence isolated from the Sargasso Sea
agctcctaaattactatcgggctcagggaaagaacaagttcacctttgtgttgtgctgacatcagatagaggtttatgtggaggttttaatgcaaatataattaaaaaagctaaaagttattttgccaagttaaataaagagggtaaggaattaaagattattacagttggttctaaaggaaatgatcagttgaaaagggtttatggaaataaaattattgagaacatctcttttaaaaagtcgaaaaatgcaaattattttgatgccgaaaaagttggaaaaatagttattgaaaagtttgaaaaagaagaatttgatatttgtactattttttacaatcaatttaaaaacgtaataactcaaatacctcaagctcaacaaattatccctttaaatacaaaaagcgatgatcaaaataattcagaagataattacgaatttgaaccagatgaggatgaaattttaagtaatttattaccaaaaaatatttcgacgcaaatatttaaagcgatgttagaaaattcagctagcgaacaaggcgcaagaatgagtgcaatggataatgcaacccgaaacgcaggtgaaatggttgacaagcttactattgagtataatagaagccgtcaggcggcaattacaaaagaattaatagaaattatatcaggagcagagagtttataa

SEQ ID NO: 273992 - DNA, 657 bp, Unknown
  Bacterial polypeptide expressing nucleotide sequence isolated from the Sargasso Sea
tatggcaaatattggaaaaatatctcaaataatgggcgcagttgttgatgtcacttttgaagatggtaatttacctgaaataatgaatgcattacatgttgatagagaggatgaaggtgatttaatattagaagtagcccagcatctaggagaatcaactgttcgtacagttgcgatggattctacggatgggctcgtcagaggagtagatgcaaaagattctggcaaaccaatttcagtaccagtcggccctgaaacattgggtaggttgtttgatgtgacgggtaatgttatagatgggaaaggtaaggtatctgcaaagaaagaatatccaattcatcgttcagctccaaagcatgaagatttatctacctctacagaaatgctagttactggtattaaagttgtggatatgatggaaccgtatacaagaggaggtaaaacaggactattcggtggcgcaggtgttggaaaaactgttttaattcaagaattgattagaaacatagcaactgagcatggcggttattctgtatttgctggagtaggagaaaggaccagagaaggaaatgatttatataatgaaatgacagaatcgggagtcatagaaaaaacgactatggttttcggtcaaatgaatgaacctcccaggcgcaa

SEQ ID NO: 273993 - DNA, 351 bp, Unknown
  Bacterial polypeptide expressing nucleotide sequence isolated from the Sargasso Sea
taggagatgaacattataattgtgctcaaagagtaaaggagttattacaaaagtataatgagcttcaagatataattgcaattctaggtatggaggagctatcagaagaagataagcttgctgtagctagggcaagaagagtacagcgttttctctctcaaccatttcatgttgcagaacaatttactggaataccaggcgcactagtagacataaaggatactatcaaagggttcaatatgataatggacggtgagctagaccatcttccagaagctgcttttaacttaaaaggaaatattgaagaggcaattgaggcaggagagaagatgttatcagaagcaaaataaa

SEQ ID NO: 273994 - DNA, 1519 bp, Unknown
  Bacterial polypeptide expressing nucleotide sequence isolated from the Sargasso Sea
aatggatattaagacaaatgaaatcggtgatttgctacgaagtcagattaaaaatatcaatgaaagtgttgatgttaatgaagttggcgaagttttagaaattggcgatggtgttgctagaacaagcggacttggaagtgtaatgagttctgagctcgttgagtttccaaataatgtatttggaatggctttaaatttagaagaagaaaatgttggtgcagtactatttggtgatagtagtcttgtaaaagaaggtgataccgttaaaagaactggtaaagttgttgaagtgccagtgggtaaagaacttttaggtcgtgtcgttgaccctctaggtcagccaatggatggtaagggccctataaacgctaaagaaactttaccaattgaaagaaaagcattaggtgttatgcaaagatttccagtcaaagaacccctacaaactggattgaaatcaattgacagcatgattccaattggtagaggtcaaagagagctaattattggtgataggcaaactggaaaatcagcaattgcaattgatgctattattaatcaaaaatccactcatagttcagatagccctgtatattgcgtttatgttgctgttggtcaaaaggcatcaacagttgctaagcttgttgccgagcttgaagccaacggagcaatggagtatacaactgtagtggtagcaaatgcttctgatccagctccattacaatatattgctccttattcaggatgtgctatgggagaatattatagagataatggtatgcatggtttaattgtttatgatgatttatcaaaacaagctactgcatataggcagatgtctcttgttttgagaagacctcctggtagagaagcattcccaggtgatgtattctacttacatagtagattgttagaaagagcttcaaagctttcagaagatttaggttctggctcgcttacagcgcttccagttattgaaactcaagaaggtgatgtatctgcatatattccaacaaacgtaatatcaattacagatggacagatttatttagatacaaacttgtttaacggaggagttagaccggcagttgatgttggattatctgtttcaagagttggtggtagtgctcagattaaagctatgaaaaaaattgcaggtaaattaaggttagacttagctcaatttagagaattggaagcttttgcaaaatttgcatcagatttggatgaatcaactgcagctcaaattacaagaggaagaagaatggttgaaattctaaaacagaatcaatatgtacctatgacaactgaaaagcaggttgcaattatttatgctgcaagtcagggttatttagatgatattgaattagagtcagttaaggaatttgaagtaggtcttcttgagcattttgaatcaaaacattctgaatgcttaaaagaaataaatagctcaggagatatttcagacgatcttggtgaaaagatgaataaggcaatagaggaattcaaaaagagcttctaa

SEQ ID NO: 273995 - DNA, 1420 bp, Unknown
  Bacterial polypeptide expressing nucleotide sequence isolated from the Sargasso Sea
tatgaaaaaaggaaaaattacacaagttattggagctgtagtcgatgtaaaatttgacggagaattaccagaaattttaacagcactagaatgtaaaaatggagatatcagactaattttagaagttgctcagcatttaggagagtcaagtgttagaactattgcaatggatgcaacggagggactaaaaagaggagatgaagttatagatactggagcaccaataaaagtaccagttggcccagagacattaggaaggataataaatgttgttggagaacctattgatgaaaaaggtgaagtaaaaactaaagaaagttggcctattcatagagctgcaccagaatttaatgatcaatcgaccgaaacagaaatattggttacaggaattaaggtaattgatttgttagcaccttatgcaaagggtggtaaaataggtttatttggtggagcaggtgttggcaaaacagttataataatggagcttattaacaatatcgctaaagctcatggtgggttttcagtatttgctggagttggagaaagaactagagaaggaaatgatctttatcatgaaatgatggagtcaggagttattaaacctgaaggttctggatccaaagcagcattagtgtatggacaaatgaatgaacctccaggagctagagctagagttgctttaacaggattaactgtagcagaatattttagagatcaagaaggacaggatgtattattctttgtagataatatttttagatttacccaggcaggctctgaggtttctgctttattaggaagaattccttcagcagtagggtatcaacctactctagcaactgatatgggaaatttgcaagaaagaataaccacaactaataaaggatcaattacatcggtacaagccatctacgttccagctgacgacttaacagaccctgctcctgctacatctttttcacacttagacgctacgacagttttatctagacaaattgcagaacttgggatttatcctgcggttgatccattggactctacttctagaatattagacccccgagtcgttggagatgaacattatagagttgcaagagaagttcaaaaaattcttcaaacatataaatctctgcaagatattatcgcaattttaggaatggatgagttgtcagaagaagataaacttactgttgcaagagctaggaaaattcagagatttttatcacaaccatttttcgtagcagaagtatttactggatcaccaggaaaacttgttgatttagaatcaacaattaaaggttttgatgcaatttgcaaaggtgaatatgatcatttacctgaagctgctttttacatggttggaactattgaagaagcaattgaaaaagctgaaaaaatggccaaagaagcagctgcttaa

SEQ ID NO: 273996 - DNA, 889 bp, Unknown
  Bacterial polypeptide expressing nucleotide sequence isolated from the Sargasso Sea
tatgccaagtttagatgatttaaaaaaaagaatttcaagtgtaaaatccacacaaaaaattacaaaagctatgaaaatggttgctgcagcaaagttaagaagggcacaagaaaatgctgaaaaaggaagaccatactctgaaaaaatgaataatataatacttaacttatctaatggagtttctgataaagaaagtgctccacagcttcttataggcaacggtgaagaaaaaattcatttatgtgtagttttgacttctgatagaggactttgtggtggattcaataccaatataataaaaaaagcaaagatatattttcaaaaaatcttaaatgagaacaaaacattaaaaataataacagttggttctaaagggtatgatcaattaaaaagagcttataaagaaaatataattgaaaatatttcttttaaagaatcaaaaaatactaattattttgatgcagataaagttggaaaaattataatcgaaaagtttgaaaaaaaagaatttgatgtatgtgcaattttttacaatcaatttaaaaatgttattacccaaataccacaggagcaacaaataatacctttaaaaaattctgaaacaaaggaaagtgtctcgtccacaagtgatggagatagttatgagtttgagccagaagaagatgagattttaggtaatttgttacctaaaaatatatccactcagatttttaaagcaatgttagagaattcagctagcgaacaaggttcaaggatgacagcaatggataatgcaactcgaaacgcaggtgaaatggttgataaacttactattcagtataatagaagtcgtcaagcagcaattactaaagaactaattgaaattatatcaggagcagaaagtttataa

SEQ ID NO: 273997 - DNA, 640 bp, Unknown
  Bacterial polypeptide expressing nucleotide sequence isolated from the Sargasso Sea
ttttatttacacagtagactactagaaagagcagcaaaactaagtgatgagcatggtggaggatctttaacagctcttccaattattgaaacccaaggtggtgatgtatcggcttttattcctacaaatgtaatttctatcactgatggacaaatatttcttgaaactaacttatttaaccaaggaattagacctgcaataaatgtaggcctatctgtatcgagagttggttcatcagcacaaactaaagcaatgaaaaaagtatcaggttcaatgaaacttgagcttgctcaatatagagagatggcagcttttgcacaatttggatctgacttagatgcatcgactcaaaaacttttaaatagaggttctaagctgacagaacttttaaaacaaaaccaatatactcccatgactgttgctgaacaggtagtttcagttttttgtggagtcagaggttatttagatgatattgaacttaaagatatctctgaatttgaatccaaaattatcgaaaaatgtaaaagtgaaaagcctgaaataatagatgctatttctagttcaggaaaattagacgataatacagaaaaattattagtggaagtaataaaaaatttaaagaccaatagtagcacttaag

SEQ ID NO: 273998 - DNA, 829 bp, Unknown
  Bacterial polypeptide expressing nucleotide sequence isolated from the Sargasso Sea
atgagtcaattaaatccatcagaaatttccagcgttctaaaagaaaagattgctggccttgatctttcagcagaaagaaaaaatgaaggcatcgtagtcagcgtctcagacggtatcgtaaggatacacggcatgggagatgttatgtatggtgaggtgatagagtttgaaaacggaacaaaaggcatggctctaaatttagaacaagactctgttggtgctgttgtacttggagattatctcgagattattgaaggccaaaaagcagtatgtactggaaaggttctagaagttcctgttggtgaagggttgttggggagagtggtaaatacgttgggaattcctattgatggaaagggagaaattaaagcagaaagcagttcgccagttgaggtagttgctccaggcgttattgctcgtcaaagtgtagatcaaccagttcagattggccttaaagctgttgatgctatggttccaatcggcagagggcaaagagagcttataattggagacagacagacaggaaaaaccgccgtagctattgatgcaattattaaccaaaaaggcacaggaattaaatgcatatatgttgctattggtcaaaagcagtccactgttgcaaacgtagttagaaaactggaagaatatggcgccatggaacatacaatagttgtttcagcaacagctgcggacccagctccaaatgcatatctttcagcatattctggttgcactatgggtgaatattttagagataaaggcgaagacgcattaattgtttatgatgacctttcaaaacaagctgttgcatatagacaagtatcacttc

SEQ ID NO: 273999 - DNA, 1420 bp, Unknown
  Bacterial polypeptide expressing nucleotide sequence isolated from the Sargasso Sea
atgagcaaaggaataatcacacaagttattggagcggtagtagacgtgaaatttgatggtgaactaccagaaattttaacagcattggaatgtaaaaatggtgataacagactagttttagaggtagcacaacacttgggtgaaaccactgttagaacaattgctatggatgccactgaaggactaaaaagaggtgatgaagttactaacacaaatgctcctattcaagttcctgttgggcctgaaactcttggaagaattataaatgtaattggggaaccaattgatgaaagaggcgaagttaagactaaagaaagttggccaattcatagagctgcacctgaatttaatgaccaatcaacagaaactgaaatacttgtaacaggtattaaagttattgatttgcttgcaccttatgcaaaaggtggaaagattggattatttggtggagcaggagtaggaaaaacagttttaattatggaattaattaataacgttgcaaaagctcatggtggtttttcagttttcgcgggtgttggagagagaactagagaaggaaatgacctttatcatgaaatgattgagtctggagtaattaaaaaagaaggagccggttcaaaagcggctctagtttatggacagatgaatgaaccccctggagcaagagcaagagttgcacttacagggttgactgtagctgaatacttcagagaccaggaaggtcaggacgtacttttcttcgtagataatatttttagatttactcaagcaggatcagaggtttcagctttgttaggaagaattccatctgctgttggatatcaaccgacattagctactgacatgggtaacctacaagaaagaattactactacaaacaaaggttcaattacatctgtacaagcaatttatgtacctgctgatgatttaactgaccctgctccagcgacatcatttgctcacttagatgcaacgactgtactttcaagacaaattgctgaaattggtatttatccagcagtagatccacttgattctacatcaagaattttagatccaagaattgttggagatgagcattatagagtagcaagagatgttcaaagaattctacaatcatataaatcactacaagatattatagctattcttggtatggatgagttatccgaagaagataaattagttgtagcaagagctagaaaaatccagagatttttatctcaaccattctttgttgcagaagtatttactggttctccaggaaaacttgttgatcttgactcaactatcaaaggttttgatgcaatctgtaaaggtgagtacgatcacttacctgaagctgctttttatatggttgggacaattgaagaagctatagaaaaagctaagaaaatggaacaagaagctgctgcttaat

SEQ ID NO: 274000 - DNA, 877 bp, Unknown
  Bacterial polypeptide expressing nucleotide sequence isolated from the Sargasso Sea
aatggctagtttagacgatctaaaaaaaagaatatcaagtgttaagtctacacaaaagattaccaaggcaatgaaaatggttgctgctgcaaaactgagaagagcgcaggaaaatgcagagaaaggaagaccttactcagataaaatgaataatattattttaaacttatcaaatggtatctcagatattgataatgctccaaaacttttatctggcactggagaagataaagtacatttatgtgttgtaatgacatccgatagaggtctttgtggaggttttaatacaaatattatcaaaaaagctaaactatattttcaaaaaattttagatgaaggaaaaactctaaaaattataacagttggaaccaaaggttatgaccaactaaaacgtctttatggtgataatattatagagagaatatcttttaaagattcaaaaaatgtaaattattttgatgctgacaaagttggtaagattgttatagaaaaatttgataaaaaagaatttgatgtatgtgcaattttttataatcaatttaagaatgtaattactcaaattccacaagaacaacaaatcattcctttaaaaacatctgaaaaagaggaaaattcatcagaagacaattatgagtttgaacctgaagaagatgaaatattgagtaacttattaccaaaaaacatttcaactcagatttttaaagcgatgttagagaattcagctagcgagcaaggttcaagaatgagtgcaatggataatgcaaccagaaacgcaggtgaaatggttgacaaacttactattgagtataatagaagtcgtcaggcagcaattactaaagagttaatagaaataatttcaggagcagaaagtttataa

SEQ ID NO: 274001 - DNA, 409 bp, Unknown
  Bacterial polypeptide expressing nucleotide sequence isolated from the Sargasso Sea
atcgcagaacttggtttatatccagcaattgatcctctagattcaactagcaggcaactagatccattggttgttggtcaagagcattatgatgttgctcgtggtgttcaaaatacattacaacgatataaagaactgagagacataatcgcaatcttgggtatggatgaattatcagaagaagataaattagttgtagcgcgtgctcgtaagatacaacgttttctaacccagccttattttgttgctaaggtttttaccggcatggacggagtattcgtacctttaaaagaaacattacggggattcaagggcatcattgaaggtcagtatgatgatataccagagcaagcgttctataatgttgggacaattgatcaagcagtagagaaagcaaagaatctttaat

SEQ ID NO: 274002 - DNA, 608 bp, Unknown
  Bacterial polypeptide expressing nucleotide sequence isolated from the Sargasso Sea
tatggcaagtttagatgatttaaaaaaaagaatagtgagtgtaaaatctactcaaaagattactaaggcgatgaaaatggtagcagcggctaaacttaagagagcacaagaaaatgctgaaaaaggaagaccatattcagaaaaaatgaataatattattttaaatctagctgatggaatatctgacaaagaaaatgcacctaaattattagcgggaactgggcaagacaaaatacatttatgtgttgtattaacttctgacaggggtctttgtggtggttttaattcaaatattattaaaaaagccaagaattattttggaaaagtattaggagaaggtaaaacgctaaaaattattactgtaggatcaaaaggatacgatcaattaaaaagattatatagtgataaaattgttgaaaaaatatcttttaaagagtcaaaaaatgcaaattattttgatgctgaaaaagttggaaaaataataattgaaagttttttaaaaaaagaatttgatgtatgtacgattttttataataagtttaaaaatgtgataacccaaatacctcaagaacaacaaataattcctttaaaatcatctgagtcagaaa

SEQ ID NO: 274003 - DNA, 1321 bp, Unknown
  Bacterial polypeptide expressing nucleotide sequence isolated from the Sargasso Sea
atgcaacaactgaatccatcagaaataagcgacattattaaaagcagaatagagggccttgatgttaagtcggaggcacaaaatgaaggcacaatcgttggggtgtctgatggtattgtgagagtccacgggttagccgatgcccaatacggagaaatgatagagtttgagggcagcctttacggtatggctttgaatctagaacgggattccgtagggattgttgtattgggtgactacgagggcttatcagaggggatgaccgcgcgctgcacaggccgaattctagaagtgcctaccgggcctgaattgttaggtagagtggtagattctttgggcaaccccatagatggtaaagggcctatagaggcatcttcgtcttctccaatagaaaaggtggctcctggtgtaattgctaggcaatctgtagatcaaccggtacaaattggtttgaaatgcgttgattccctcgtccctattggtagagggcaacgggagttaataattggtgatagacagattggtaaaactgctgtcgcaatcgatgcgataatcaaccagagaagtacaggaattaaatgtatttatgtggcgatcggtcaaaagatgtcgaccattgctaatattgtaagaacgttagaagaaaatggcgcaatggagtacacgactgttgtggctgctagtgcatcagatccggcgccccttcaatttatttctccttattcgggttgcgccatgggtgagtattttagagaccatggtgaagacgcgttagttatatacgatgatctaaccaagcaggcctgggcctatagacaaatttctttgttattaaaacgacccccaggtcgtgaagcgtaccctggagatgtcttttatttgcattctagacttttggaaagagcggcgagagttaatgcaaaatatgttgaagattatacgaatggagaagttaaggggaagacggggtcgctaacggccttgcctattattgaaactcaaggcggtgatgtttcggcgtttgtcccaacaaacgttatatcgattactgatggccagattttcctagaaacagacaactttaatgctggtttaaggcctgccatgagccctggaatctctgtgtcaagagttggtggttcggctcaagtcccgtatatgaaaaaactatcgggaggtgtaaaacaagcactagcggcgtaccgtgagttagccgcattttcacagttcgcttcggaccttgatgacgcaacgaaaaggcagcttgataagggtgctcgtgttacagagctgatgaagcaaaaacaatattcgccaatgt

SEQ ID NO: 274004 - DNA, 1156 bp, Unknown
  Bacterial polypeptide expressing nucleotide sequence isolated from the Sargasso Sea
aatggatataaatccctcagaaattacaaaaattttaaaagagcaaataaagaatttaggagataaagccgaagtttcagaaattggaaaagttctttctgtaggagatggtattgctagagtttatggcttggacaatgtccaagctggggaaatggttgtgttccaggacaattcaaagggtatggctcttaacctagaaaacgataatgttggtattgttatttttggagatgatagatcaattaaagaaggcgatacagtaaaaagaacgggagcaatagttgatgtgcctgttggtaaagagctgcttggtagagtagttgatgcattaggaaatccaattgacggtaaagaaaatttagataaaaatattaaaagaaaaagggttgaagttaaggctccaggaattataccaagaaagtctgttggtgaacctatgcaaacaggtttaaaagcaattgacagcttaattccagttggaagaggacaaagagaattaataattggagatagacaaaccggaaaaactgcagttgcagtagatacaataattaaccaaaaaaaaataaatgagtcagatgatgaaaaaaagaaactttattgtatttatgttgcaattggtcaaaaaagatcaacggttgctcaaatagttaaaactttacaagatgctggagcaatggattatacaattgttgtttcagcaacagcatctgatcctgccccattacaatttttagcaccatacacaggatgcacatttggtgaatttttccgagataatggaatgcatgctttgataatttatgatgatttgtccaaacaagcagttgcttacagacaaatgtcacttttattaagacgtccaccaggtagagaggcatacccaggcgatgtattttatttgcatagtagattacttgaacgagcagcaaagctaaatgatgataatggcggaggttcactgaccgctttaccaataatcgaaactcaggcaggtgacgtatccgcttatattcccacgaatgttatttcaataactgacggccagatctttttagaaacagaactttttaatcaaggtatacgacctgcggtaaatgtaggtttgtctgtttctcgagttggttctgcagctcaaactaaagcaatgaaa

SEQ ID NO: 274005 - DNA, 856 bp, Unknown
  Bacterial polypeptide expressing nucleotide sequence isolated from the Sargasso Sea
aatgagcacaggcaagatcgtacaggtaatgggaccggttgttgatgtggaattcgaaacagaagaacttcctgaaatattctcagcacttgaaatcaaactggaaggagactctagattgatttgtgaagtacagcagcatctcggagaaagtacggtacgcacagtatcaatgggatcaactgacggcctttaccgcggaatggatgtaaaggatttaggtgaaactatctccacacctgtaggacagggagtacttggtagaatcataaacgttacaggagaccctgttgatgaagcaggaccaataaaaacaaaagaaaggtggtctatacaccgtgaagcaccggcatttgctgaccaggatacagaagcacaaatgctggttacgggagtaaaggttatggacctgctttgtccctttcttaaaggaggtaagatcggcttatttggcggagcaggagtcggaaaaacagttgtgatcatggaactgatccgaaacattgccgcagaacatggtggcttctctgtttttgcaggagtgggggaacgtacacgtgaaggaaatgatctttggaatgagatgaaagagtccggagttctggacaaaacaagccttgtatatggacaaatgaatgagcctccgggagcacgtgcccgggtagcactgactggtttgaccgtcgcagaatatttccgtgatgaagaagctgcagatgtactgatgttcatagataacattttccgattcactcaggcaggctcagaggtttcggctttgcttggtcgaataccttccgcggtgggttaccagcccacactttccacggaaatgggaaatttgcaggagcgtatt

SEQ ID NO: 274006 - DNA, 430 bp, Unknown
  Bacterial polypeptide expressing nucleotide sequence isolated from the Sargasso Sea
catggcagagatgatctcctttcacctggacgtggtgagcgctgaaggaaaactgttttccggtcgcgtgcagtccgctcaggtatcaggctccgaaggtgagctgggtctccgccacggtcatgctccgttgctgactgccatcaagccgggcctggtccgcttggtgaagcagaatggaactgaagaggtgctgtacatctccggcggcatgctggaagtacaacccgaagccgtgaccgtgctggcggacaccgcgattcgtgccgacgatttggatgaggcgaaagcccaggaagccaaacgcgcggcggaagagcggatccacagctcccatggtgatatcgactacgcccaggccgctaccgagctggccaaggcgatggctcaactgcgggtcatcgatatcgtcaaaaagaattaccgttaa

SEQ ID NO: 274007 - DNA, 1456 bp, Unknown
  Bacterial polypeptide expressing nucleotide sequence isolated from the Sargasso Sea
atggcaacagcaaccgcctctgacaaaaagaatggcaaggtcacacaggtcattggatcgacgtttgacgttgagttccctgaatccaccctgcctgcaatctacaacgcagtccgaattgatgctgatcataaaggtatcaaacttgaattagtgggcgaagttcagcaacacctcgggggaggaaaagttcgctgcgtcgcactcggttcaacagacggccttatcaggggacaagaggtcgtcgacaccggatctccagtcagcgtacctgtaggacctgctacgcttggccgcgtctttaacatgctgggtgagccaattgataatggtggtgaagtagatgctgacgagcggtggtctatccatcgtgatgctccacctatctctgaactttcaacaaaaacagaactcttcgaaacaggcattaaagttattgacctgctcacaccattcgttcgaggtggtaaggcaggcctattcggcggtgccggcctcggcaaaactgttattctgactgaactgattgcacgaattgcgagcgctcacggcggaaattcagtttttgccggtgttggagaacgcacacgagaaggaactgacctgtggctcgagatgcaggatgccaaaattggtgataccggccgaagcgtcatcgagcagacatgcatggtctttggccagatgaatgaaccacctggtgcaaggctacgagttgccctgtctgccctcacaatggctgagtattttcgtgacacgactggaacagatacgctccttttcgtagacaatattttccgcttttcacaagccggcagtgaagtcagtgcacttcttggccgaatgccaagtgcggtgggctaccagccaacacttgcgactgaaatgggtgcgttacaggaacgtattacatcaacagagaagggtgctatcacttctgtccaagcggtctatgttcctgctgatgaccccacagacccagcacctgcaaccgcttttggcaacctcgatgcgtttatctatcttgaacgatcaatttctgaaaaaggcatctatcctgctgtcgatccactggctagttccagccggattcttgatccacaatatgttggagaacggcactataatgtcgcgcggcgcgtccaaaccacattacaacgctatcgagaactccaggatattatcgcaattctgggcgtcgatgaactttctgaagaagataagcttgttgttcatcgcgctcgacgaatggaacgcttcttatcacagcctttccttgtagctgaagtatttacagggaaaccaggcgaaatcaccagtcttgaggatacaatccgatccttcgaagaaatcgctgatggcaaatgggaccaccttccagagcctgcatttatgtatgtcggccccattgaacaggctgaagagcaggccaagaagatggaacaaaaagcataga

SEQ ID NO: 274008 - DNA, 1273 bp, Unknown
  Bacterial polypeptide expressing nucleotide sequence isolated from the Sargasso Sea
atgagaaaaggaaagattacacagattattggggcggtagtagatgttaaatttgaaggagaactaccagaaatattaaccgcattagaatgtgataatagtggcaatagacttgtcttagaagttgcacaacatttaggagagtcaagtgtaagaacaatagctatggatgctactgagggtcttaagagaggcgatgaggtaacagatacgggagctccaattaaagttcctgttggaccagaaactctaggaagaattgttaatgtaattggagaacctatagatgaaaaaggagaagttaaaaccaaagaaagttggcctattcatagatcggctccagaatttaatgatcaatcaacagaaacagaaattttagttacaggaattaaggttgttgacttgctggcaccatatgcaaagggtggtaaaattggtttatttggtggtgctggagtaggtaagacagttcttataatggaattgatcaacaacgttgctaaagctcatggtggattttcagtttttgccggggttggtgaaagaacgagagaaggaaatgacctttatcatgagatgatagagtcaggagtaattaaaccagaaggatctggatctaaagctgcattagtttatggtcaaatgaatgaacctccaggagcgagagctagagtagcattatcaggattaacagttgcagaatattttagagatcaagaagggcaagatgtactttttttcgttgataatatttttagatttactcaagctggatcagaggtgtcagcactattaggaagaattccctctgcagtggggtatcaaccaacattagctactgatatgggaaaccttcaagagagaattactactaccaataaaggctctattacatctgttcaagcaatatatgtaccagcagatgacttgactgatcctgcgccagctacatcattttcacacttagatgcaacgacagtattatcaagacaaatagctgagattggaatttatccagcagtagatcctttagattctacatctagaattttagaccctagaattgttggtgatgaacattatagagttgcaagagaagttcaaaaagttttacaaacatataaatctttacaagatattattgcaatattaggtatggatgaattatcagaagaagataaattaattgttgctagagctagaaaaattcagagatttttatctcaaccattttttgtagcagaagtatttacaggatcaccaggaaaactta

SEQ ID NO: 274009 - DNA, 877 bp, Unknown
  Bacterial polypeptide expressing nucleotide sequence isolated from the Sargasso Sea
atggcaagtttagacgatttaaaaaaaagaatatctagtgttaaatctactcagaagattacaaaggcaatgaaaatggttgcagcatcaaaattaagaagagcccaagaaaatgcagaaaaaggaagaccttattcagataagatgaacaatatcattcttaatctttcaaatagtatctcagataaagaaaattcccctaaattacttacaggctcaggcgaagacaaaattcatttatgtgttgttatgacttctgacaggggactttgcggaggttttaatacaaatataattaaaaaagcaaaagcatattttcaaaaaattctaaaagagggaaaaaatttaaaaataataactgtaggatcaaaaggttatgatcaactaaaaagaatttataaagataatattattgaaaaaatttcctttaaagaatctaaatatgctaattattttgatgcagataaagttggaaaaataattattgataaatttgaaaaaaaagaatttgatgtatgtacaattttttataaccaatttaaaaatgtaataactcaaataccacaagagcaacaaattatccctttaaaaacatctgagtccgaaggatcatcatcagaagataactatgaatttgagccagaagaagatgaaattctaagcaatttattgcctaaaaatatatctactcagatttttaaagcgatgttggaaaactcagctagcgaacaaggttcaagaatgagcgcaatggataatgcaacaagaaacgctggtgaaatggttgacaagcttactattcagtacaatagaagtcgtcaagcagcaataactaaagaactaattgaaattatatcaggagcagaaagtttataat

SEQ ID NO: 274010 - DNA, 650 bp, Unknown
  Bacterial polypeptide expressing nucleotide sequence isolated from the Sargasso Sea
agatgttttctatattcacagtcgtcttttagaaagagcagctaaaatgagtgatgagcatggcgggggaagtttaactgctcttcctattattgaaacacaagcaggtgatttgtcagcttatattccaacaaatgtaatctcaattacggatggacagattttcttagaaacaaaccttttctttgctggtattcgtcctgcaattaacgttggactgtctgttagtcgtgttggttctgccgctcaaacaaaagcaatgaaaaaaattgctggacctgttaaacttgagttagcacagtatcgtgagatggctgctttcgctcagtttgcatcagatttagatgcatcaacaaaacaactactagatcgtggtgcaagactagttgaaattttaaaacaaggtcagtattcgccattaacagtatcagaacaagttatatctatatatgctggtgttcgtggatatttggataaagtagctgtaggagatgttgtacgttttgagtcagaaattttaagcgaaattagaactaatcatgcagacttattagatgctatcgcaaatgaaaaagaattatcaaaagaaaatgatgataaattaaaatccattttagataatcttgttgaaaaatttacgagtaactaat

SEQ ID NO: 274011 - DNA, 1114 bp, Unknown
  Bacterial polypeptide expressing nucleotide sequence isolated from the Sargasso Sea
aatgagtaatggagttgtgacacaaattatcggagcggttatagatgtcgaattcgatagagagaacataccaaatgtgtatgaggctcttaacattgtcggtcttgaaactgtgcttgaggttcaacaacaactaggcgatggaattgtaagaactatcgctatgggatcaacagaaggactaaaaaggggtttagaagttgttagaactaatgcacctatttctgttcctgttgggcaagaaactctaggaagaattatggatgttttgggaaatcccattgatgaaaaaggtgatattggtgagaaagaaagacaaccaattcacaaaagcccaccaagctataccgatcaagcaggatcaaatgaattattagaaacgggcatcaaagtaattgacttaatgtgtccttttgcaaaaggaggaaaagttgggttatttggaggagctggagtaggtaagaccgttaacatgatggaactcataagaaacattgcgattgagcattcaggattttcagttttcgctggagttggtgaaagaactcgagaaggtaatgacttttatcatgaaatgactgaatcaaatgttttagacaaagtttctcttgtttatggacaaatgaatgaacctccaggcaacagattaagagttgctcttaccggcctaacgattgctgagaaattcagagatgaaggaagagatgtgcttctttttattgataatatttacagatatacacttgctggtgttgaggtatcagctctattaggaagaatgccatccgctgttggatatcagccaacgctagcgggggaaatgggagcactacaagaaagaattacctcaacaaaaacaggctctattacttcaatacaggctgtatatgttccagctgatgacttaacagacccttcacctgcaacaacatttgcacacttagacgctacagtggttctttcaagaaatattgctgagctcggtatttatccagcagttgatccactagattcaaccagcagacagcttgacccgcttgtagttggagaagagcactataaaagaacacaagctattcaaggcgttcttcaaagatataaagaactaaaggat

SEQ ID NO: 274012 - DNA, 1051 bp, Unknown
  Bacterial polypeptide expressing nucleotide sequence isolated from the Sargasso Sea
tatgagaaaagggaaaattacacaaattataggagcggtagttgatgttaaatttgatggagaactaccggaaatattaacagcattagaatgtgataatagcggtaatagacttgttttagaagttgcgcaacatttaggagaatcaagtgtaagaacaattgctatggatgcaacagagggattgaaaagaggagacgaagtaatagatactggggctccaattaaggtacctgttggtcctgagaccttgggtaggatcataaatgtaatcggtgaacctattgatgagaaaggaaaagttaaaacaaaagaaagttggcctatccatagagctgcaccagaatttaatgatcaatcaacagaaacagaaattttagtaacaggtattaaagtagttgatttattagctccttacgcaaaaggtggtaaaattggattatttggtggtgctggagttggtaaaacagttcttattatggaattaataaataatgtagcaaaagctcatggaggtttttcagtttttgcaggagttggtgaaagaactagagaaggaaatgatctttatcatgaaatgatagagtcaggagtgatcaaacctgatggcgcaggatcaaaagctgcattagtttatggtcaaatgaatgaaccaccaggcgcaagagctagagttgcattatcaggattaacggtagccgaatactttagagatcaagaaggtcaagacgttcttttctttgtagataatatattcagatttactcaagcaggatctgaagtgtcagcattattgggaagaattccctcagcagtaggatatcaacctacattagctactgacatgggaaatcttcaagaaaggattacaactacgaacaaaggctcaataacgtcagttcaagcaatttatgtacctgctgacgatttaacagaccctgctcctgcaacatctttttctcacttagatgcaacaacagtactatctagacagatagcagaaattggaatttatccagctgtagatccattagattcgacttctagaatt

SEQ ID NO: 274013 - DNA, 808 bp, Unknown
  Bacterial polypeptide expressing nucleotide sequence isolated from the Sargasso Sea
tatgaaaatggttgctgcgtctaaactaagaagagctcaggaaagcgcagaaaaaggcagaccatactccgaaaagatgaataatattatattaaatctttcaaataatgtttcagataaagaaaattctcctaaattgcttgtaggttctggagaagataaaattcatttatgtatagttatgacttctgacagaggattgtgtgggggatttaatacaaatataattaaaaaagctaaatcatattttcaaaaaatattaaatgaagggaaaacattaaaaattattacagttggatcaaaaggttatgatcaattaaaaagaacgtataaagacaatataatcgaaaaaatttcttttaaagaatcaaaatatattaatttttttgatgctgataaagtaggtaaaataattattggaagatttgaaaaaaaagaatttgatgtatgtacaatcttttacaatcaatttaaaaatgtaatcactcaaattccacaagaacaacaaattattccattaaaaacctcaaagtcggataaaaattcatctgaagataattatgattttgaacctgaagaagatgaaattttaagtaatctactacctaaaaatatatctactcagatttttaaagcaatgttagaaaattcagctagcgaacagggttcaagaatgagtgcaatggataatgcaacaagaaatgcaggtgaaatggttgacaagcttactattcagtataatagaagtcgtcaggcagcaattacaaaagaactaattgaaattatatcgggagcagaaagtttataa

SEQ ID NO: 274014 - DNA, 760 bp, Unknown
  Bacterial polypeptide expressing nucleotide sequence isolated from the Sargasso Sea
gctgagaaaggaaggccttattctgaaaaaatgaataatgttattttgaatttatcaaatggtatatctgataaagaaaatgcaccaaagttattatcaggtactggtcaggaaaaaactcatctttgtgtagtgatgacttctgatagaggtttatgtggtggatttaattctaatattattaaaaaagctaaaagttattttgcaaaaattttagaagaaggtaaagaactaaaaattattacagtaggctcaaaaggaaatgatcaattaaaaagagtttatggtgataaaataattgaaaatatttctttcaaagagtctaaaaatgcaaattattttgatgctgacaaagttgggaaaatggtaattgaaaaatttgaggcaggtgaatttgatgtttgtacaattttttacaaccaatttaaaaatgtaattactcaaattcctcaagcacagcaaataatccctttaaataatgagggagaagaaaatagttcagaagaaagttatgaatttgaaccagatgaagatgaaattttaagcaatttattgccaaagaatatttctacgcaaatatttaaagcaatgttagagaattcagctagtgaacaagggtctagaatgagtgcaatggataatgcaacccgaaacgcaggtgaaatggttgacaaacttactattgaatataatagaagtcgtcaggcagcaattacaaaagaactaatagaaatcatatcaggagcagaaagtttataat

SEQ ID NO: 274015 - DNA, 1387 bp, Unknown
  Bacterial polypeptide expressing nucleotide sequence isolated from the Sargasso Sea
catgagtcaaggtaaggtagtccaaatcattggcgccgttgtggatatcgactttccacaagaatcggtacctggtatctatgacgcgttaaacgtaacaagcggcgacctggctggtttagtacttgaagtacaacagcaattaggcggcggtactgtacgtgctatcgcgttaggttcaaccgacggtttacgtcgtggcgaagctgtgtctaacactggcaaagccatccacgtaccagtaggtaaagcgactttaggtcgtatcatgaacgtattaggcgagccaatcgacgaagctggtcctatcggtgaagatgagcgtatgcctatccaccgtgcagcaccaagctacgaagatcaagccgcttcaaacgctctgttagaaacaggcatcaaggttatcgacctggtatgtccgtttgctaaaggtggtaaagttggtctgttcggtggtgccggtgtgggtaaaaccgtaaacatgatggaactgatccgtaacatcgcgattgagcacagtggttactctgtattcgccggtgtaggtgagcgtactcgtgaaggtaacgacttctatcacgaaatgaacgattcaaacgtactggacaaagtatcactggtgtatggccagatgaacgagccgccaggcaaccgtttacgtgtagctctgaccggtctgactatggccgagaagttccgtgacgaaggccgtgacgttctgttcttcgtggacaacatctaccgttacaccctggccggtactgaagtatcagctctgttaggccgtatgccatctgcagtaggttaccagccaacgctggccgaagagatgggtgtactgcaagagcgtatcacttcaactaaaactggttctatcacatctgtacaagcggtttacgtaccagcggacgacttaactgacccgtcaccagcgactacgttctctcacttagatgcgactgttgtattgtctcgtaacatcgcttcactgggtatttaccctgcgatcgatccactggactctacttcacgtcagttggacccgttagtgatcggcaaagaacactacgatacagcccgtggtgttcagtcagtgctacaacgttacaaagaattaaaagacatcatcgccatcttaggtatggatgaattgtctgatgaagacagaactgtggtttaccgtgcacgtaaaatccaacgtttcctgtctcagccattcttcgtagccgaagtattcactggctctccaggcaaatacgttccgctgaaagaaactatccgtggtttcaaaggcattctggacggtgaattcgatcacatgccagaacaagccttctacatggttggttctatcgacgaagcgatcgaaaaagcgaagaagctgtaa

SEQ ID NO: 274016 - DNA, 862 bp, Unknown
  Bacterial polypeptide expressing nucleotide sequence isolated from the Sargasso Sea
catggccggcgcaaaagagataaaaagtaagatcgggagtattaacaatactcgtaagatcaccagcgcaatggaaaaggtagcagtcagcaaaatgcgcagagcgcaagagcgggttgcacatagccgtccatacgctgaaggtatgcgcaaagtgatcggcaatatcgcaaacggcaacatcgaataccgtcatccgtatttaacggaacgtccggtaaaaaatgtcggctacattgtgatatcgacagaccgtggcctttgcggcggcttaaataccaacgagttcaaacgtgttgctctggagctgaaaagctggaaagagcagggagctcaggctcaaattgcggtgatcggtaacaaagctacagcgtttttcaaacgttttggcggtaaagtgctggcacaacaaactggtcctggtgacaacccacgtttggctgatgtgattggttcggttcaggtgatgctcaaagcatacgaagaaggccgtatcgaccgcttgttcctggtgttcaacaagtttgtaaataccatgaaacaagagccagtgatcgaacaactcttacctttgccaaaagcagacgtaacagcgaaaagccatagctgggattatatttacgaaccggatccaaaggtgattttagataaattactgagccgttacgtagagtctcaggtgtaccagggtgtagttgaaaacgcggcgagcgaacaagctgcccgtatggtggcgatgaaagccgctacagacaacgctggtagcttaatggatgacctgaagttggtttacaacaaagcacgtcaagcagctattacccaggaactgagcgaaatcgtcggtggggccgctgccgtttaa

SEQ ID NO: 274017 - DNA, 1090 bp, Unknown
  Bacterial polypeptide expressing nucleotide sequence isolated from the Sargasso Sea
gaaggggcctgtcatgcgcctgaaaaattaccgattcaccgaaaacctcccaagtatgaagatcaaaagggaggaaatgaaattctcgaaaccggtattaaagtcatcgatttaatctgcccattttccagagggggtaaggtaggcctttttggcggtgctggagttggtaaaactgtaaccatgttggaactcattagaaatatcgctgttgaacactcggggctgtccgtttttgctggcgttggagagcgaactagagaggggaacgacttttactacgagatggaagaagcaggagtgcttgataagatatctcttgtatttggccagatgaatgagccccctggtaacaggctgcgagtcgcgttaacgggtttaacgctcgcagaaaagtttagagacgatggccgtgacgtacttctttttgtggataatatctaccgttatacgttggcgggtactgaggtgtctgccttactaggaagaatgccttctgctgtgggttaccagccaaacttggcagaagaaatgggcacacttcaagaacggatcacaacaaccaagacagggtctgttacttctattcaagctgtatacgttccagcggatgacttaactgacccgtctccggctacaactttcgcgcaccttgactctacagtaactctatcaagggcaattaccgacttaggcatatatcctgcggtagaccctttagattctactagtcagcagctagaccctctgattgtcggtgaagagcactacaacgtcgcgcaagaggttatgcaagtactacagagattgaatgaactaaaagatattatcgccatattgggcatggatgagctttctgaggaagacaagcaactagtttacagagctagaaaaatccaaaaattcttctcgcaaccttttttcgttgcagagcaattcagtggcagccctggcacttatgtctcacgagatgacactgtgagaagtttcaaagcgattttgaatggtgagcatgatgatttgcctgaggatgcctttatgatggtgggtagcatcgaagatgcggttgaaaaggctaaaactctgtagg

SEQ ID NO: 274018 - DNA, 450 bp, Unknown
  Bacterial polypeptide expressing nucleotide sequence isolated from the Sargasso Sea
ctgcgattaacgttggattatctgttagtcgtgttggttctgctgctcaaacaaaagcaatgaaaaaaattgctggtccagttaaactagaattagctcaatatcgtgaaatggcagcatttgctcagtttgcatctgatctagatgcttcaacaaaacaattgctagaccgtggtgcgagattggttgaaattttaaaacaaggacaatattcaccgctgacagtatctgaacaagttgtatcgatttatgcaggtgttcgtggctacttagataaagttgctgtgaatgatgttgttcgttttgagacagaagttttaaatgaaatgagatctagtcattctgatttattagaagccatcgcaaatgaaaaagagttatcaaaagataatgatgataaattaaaatcaatcttagatactattgttgaaaaatttacgagtaactaat

SEQ ID NO: 274019 - DNA, 1525 bp, Unknown
  Bacterial polypeptide expressing nucleotide sequence isolated from the Sargasso Sea
tatgaatatcagagcagaagaaatcagtaaaataattcagcagcaagttgaaaactttgacaaaaccgcaaccaaatcagaagtaggaactgtgctggaagtcggagatggaatagcacgtgtctttggactggacaatgtgcaggcaggggaacttgttgaatttccaggcagtgtaacaggcatgactttaaaccttcaggaagacaacgtaggggtggttatttttggtaatgaccgtgccatcaaggaaggggacgaggtcaagcgtaccgagagaattgccgagattcctgtaggtgagggcctgctaggaagagttgtggaccctcttggaaacccaattgacggcaaggggccgattgaatcctcagataatcgactgattgaaaccattgccccgggaattgttgcaagaaagtcagtacatcagccgatgcagaccggactgaaagcgattgactcaatggtaccgataggtcgtggacagcgtgaattgatcataggcgacaggcagacaggaaaaaccgcaattgcgatagacaccatcatcaaccaaaaaggtggtgacatgatctgcatctatgttggaatcggccagaagcgctcaaccatggcccagattgttcagagactagaaaacgaaggagcgatggaacatacaatcgtggtttcctctactgcctctgaacctgcaccactgcagttcctggctccgtattccggtgtaagcataggtgaatatttccgagatcagggcaagcacgtgctttgtgtttatgatgatctttccaaacaggcagtagcctatcgtcagctttcactgctgctgcgacgtccgcctggacgcgaagcatatccgggtgatgtattctatctgcacagccgactgctggaaagagcctgcaaacttaatgatgagcttggcgcaggttcacttacagcactgccgattatagaaacacaggccggagatgtttctgcatacattcccaccaacgtgatttcaattacggatggacagatttttctcagtacagaccttttcaattctggaattcgtccggcaattaacgttggtctgtcagtatcccgggtaggaggtgcagcacaggttaaagcaatgaagcaggtagccggaactttgcgtcttgaccttgcacagtacagggaaaaagaagcatttgcccagtttggaagcgacctggaccaagctacccaaaaacagcttgcacgcggacagcgactggtggaaattcttaagcaggcacagtaccagccgatgccctgggtggatcaggccatttccatttttgctgctactaacggattcctggacgatcagccgatcaacaagctgagtaaatttgaatccgaattcctaacattcattcaaaccaaaaaagcagatttacgtaaatcaatcgaagaaaaagaaatgattgatgaaactgcagaaaaggatttgaaatcagcattgaatgagttcgcagaagctttttctgcagaaaacagtacagcttaa

SEQ ID NO: 274020 - DNA, 1534 bp, Unknown
  Bacterial polypeptide expressing nucleotide sequence isolated from the Sargasso Sea
aatggaaataaatccttcagaagttacaaagatattaaaagaacagataaaaaactttggagaaaaagcagaagtatcagaggttggacaagtactatcagtaggtgatggtattgcaaggatatacggattgaacaatgttcaagctggagaaatggtagaattttctgatggatctaaaggaatggctctaaacttggaaagtgacaatgttggtgttgtaatatttggagatgataaagctgtaaaagaaggagacatagtaaaaagaaccggagcaattgttgatactcctgttggaaaagaattattaggaagagtagttgatggattgggaaatcctatagatggtaaaggagctttagataaaggaataaaaagaagcagagtagaaattaaagcaccaggaatcattccaagaaaatcagtgagtgaaccaatgcaaacaggattgaaatcaattgacagtctagttcctattggaagaggtcaaagggaattgattatcggagatagacaaactggaaaaacagctgttgcaattgatgcaatcattaatcaaaaaaaaataaatgagtcaggcgatgaaaaacaaaaattatattgtgtatatgtcgcgataggtcagaaaagatcaacagtaagacaaatagaaaaaacattacaagaagctggagcgatggaatacacaacaattgttgctgcaactgcatcagacgctgcccctcttcagtttttagctccatatacaggttgtactatgggagagtattttagagataatggaatgcatgctcttattatctatgatgacctttcaaaacaagctgttgcatatagacaaatgtcattattgctaagaagacctccggggagagaagcataccctggagacgttttttatttacacagccgattgcttgaaagagctgcaaaattaagtgatgaacatggtggtggatcgcttacagctcttccaataattgaaactcaaggaggagacgtttcagcgtttatacctacaaacgtaatttcaattactgatggtcagatattcttagaaactgaactttttaaccaaggaataagacctgcgattaacgtcggtttatcagtatcaagggttggatcttcagcacaaactaaagcaatgaaaaaagtttcaggttcaatgaaacttgagctagcccaatacagagaaatggctgcatttgctcagtttggttcagatttagatgcatctactcaaaaactattaaatagaggttcaaaattaacagaacttcttaaacaaagacaatattcaccaatgacagttgctgaacaggtgatatcagttttctgtggtgtaagaggtcatctagatgatattgagcaaaaagatatatcgaattttgagactaagattatagaaaaatgtaaatcagaaaaaccggaaataattaactcaattaatgcttcaggtaaattagaggaagatagtgaaaaagcattaacagaattgattgttgaacttaaaaaaaattttaattaa

SEQ ID NO: 274021 - DNA, 1420 bp, Unknown
  Bacterial polypeptide expressing nucleotide sequence isolated from the Sargasso Sea
atgagaaaaggaaagattacacagattattggagcggtagtagatgttaaatttgaaggagaactaccagaaatattaaccgcgttagaatgcgataatagtggcaataggcttgtcttggaagttgcacaacacctaggagagtcaagtgtaagaacaatagctatggatgcgaccgagggccttaaaagaggtgatgaggtaaaagatacaggagctccgattaaagttcctgttggaccagaaactctaggaagaatagtaaatgtaattggtgaacctattgatgaaaaaggagaagttaaaactaaagaaagttggcctattcatagatcggctccagaatttaacgatcaatcaactgaaacagaaattttagttactggtatcaaggtagttgatttattggcaccatatgcaaagggtggtaaaattggtttatttggaggagctggagttggaaaaacagtacttataatggaattaatcaacaacgttgcaaaagcacacggtggattctcagtctttgctggagttggagaaagaactagagaaggaaatgatctttatcatgagatgatagagtcaggagtaattaagccagaaggatctggatcaaaagctgcactagtctatggtcaaatgaacgaacctcctggagcaagagccagagtagcattgtcggggttaactgttgcagaatattttagagaccaagaaggacaagacgtactttttttcgttgataatatttttagatttacgcaagctggatcagaggtatcagcattattaggaagaattccctctgcagtgggatatcaacctacattagctacggatatgggaaatcttcaagaaagaattacaaccacaaacaaaggatctattacatctgttcaagcaatatatgtaccagctgatgacttgactgatcctgcaccagcaacatcattttcacacttagatgcaacgacagttttatcaagacaaatagctgagattggaatatatccagctgtagatcccttggactctacatctagaattttagatcctagaattgttggtgacgaacattatagagtcgcaagagaggttcaaaaagttttacaaacatataaatctttacaagatattattgcaatcctagggatggatgagctttcagaagaagataaattaattgttgccagagcaagaaaaatccaaagatttttatctcaaccattttttgttgcagaagtatttactggatcgccaggaaagcttgttgacttagaatcaacaattaaaggttttgatgcaatttgcaaaggtgaatacgatcatttacctgaagcagctttttatatggttggcacaatagaagaagctatagaaaaagctgagaaaatggctaaggaagccgccgcttaat

SEQ ID NO: 274022 - DNA, 717 bp, Unknown
  Bacterial polypeptide expressing nucleotide sequence isolated from the Sargasso Sea
tctcatctttcaatagtatctcagataaagaaaattctcctaaattacttactggctcaggtgaagataaaattcacttatgtgttgttatgacttctgacagaggactttgtggaggttttaatacaaatataattaaaaaagcaaaagcatattttcaaaaaattataaaagagggaaaaaatttaaaaataataactgtaggatcaaaaggttatgatcaactaaaaagaatttataaagaaaatataattgaaaaaatttcctttaaagaatctaaatatgctaattattttgatgcagataaagttggaaaaataattattgataaatttgaaaaaaaagaatttgatgtatgtacaattttttataaccaatttaaaaatgtaataactcaaataccacaagagcaacaaattatccctttaaaaacatctgagtccgaaggatcatcctcagaagataactatgaatttgagccagaagaagatgaaattctaagcaatttattgcctaaaaatatatctactcagatttttaaagcgatgttggaaaattcagctagcgaacaaggttctagaatgagcgcaatggataatgcaacaagaaacgctggagaaatggttgataagcttactattcaatacaatagaagtcgtcaagcagcaataactaaagaattaattgaaattatatcaggagcagaaagtttataat

SEQ ID NO: 274023 - DNA, 877 bp, Unknown
  Bacterial polypeptide expressing nucleotide sequence isolated from the Sargasso Sea
atggctagtttagacgatctaaaaaaaagaatatcaagcgttaagtctacgcaaaagattacaaaggcaatgaaaatggttgcagctgcaaaactaagaagagcacaagaaaatgctgagaaaggaagaccttactctgataaaatgaataatattattttaaatttatcaaatggcatctcagatattgaaaatgctccaaaacttttatctggaactggggaagacaaagtgcatttatgtgttgtaatgacatcagatagaggtctttgtggaggttttaatactaatattattaaaaaagctaaactatattttcaaaaaattttggatgagggaaaaactttaaaaattattacagtgggaaccaaaggttatgaccaacttaaacgtctttatggtgataagattattgagagaatttcttttaaagaatcaaaaaacataaattattttgacgctgataaagttggaaagatagtaattgaaaaatttgaaaaaaaggaatttgatgtatgtgcaattttttataaccaatttaaaaatgtgattactcaaatacctcaagaacaacaaattattcctttaaatacatctgaaaaggaggaaaattcatcagaggataactatgaatttgaacccgaagaagatgaaatattgagtaacttgttaccaaaaaatatttctactcagatttttaaagcgatgttagagaattcagctagcgagcaaggttcaagaatgagtgcaatggataatgcaaccagaaacgcaggtgaaatggttgacaaacttactattgagtataatagaagtcgtcaggcagcaattactaaagagttaatagaaataatttcaggagcagaaagtttataat

SEQ ID NO: 274024 - DNA, 1537 bp, Unknown
  Bacterial polypeptide expressing nucleotide sequence isolated from the Sargasso Sea
atggaaataaaagcagctgaaatttcatcagtaataaaagatcagattgccaattttgaaactaaagcggatgtagctgaagttggaacagtactaagtgtaggagatggtatcgcgcgtgtatatggtcttgatcaagtacaagctggtgagatggtagaatttccaggtggaatcaaaggtatggcccttaaccttgaaatggataatgttggtgtttcaatctttggcgatgatacaggtattaaagaaggcgacacagtaaaacgtacaggagaaattgttgatgttcctgttggaaaagaattattaggacgtgttgtagatggcttaggaaatccaattgatggtaaagggcctattcaatcttcagaaaaaagaagaattgaattaaaagctccaggaataattcctcgtcaaggcgtatctgaacctatgcaaactggaatcaaagcgcttgatgctttagttcctgttggaagaggacagcgtgagctaattattggagataggcaaactggtaaaacagctgttgctattgatacaattcttaaccaaaagtctgttaaccaatctaataacgaaaaagataagttatattgtatctatgtagctataggtcaaaaaagatcaacagttgcacaaattgttaaaactcttgaagataatggggctatggaatacactattgttgtatctgctactgcatctgaaccagctcctcttcaattcttatctgcttacacaggttgtacaatgggagaattcttcagagataacggaatgcatgctcttatagtttatgatgatttatctaaacaagcagttgcttatagacaaatgtctttgttgttaagaagacctccaggacgtgaagcatacccaggagacgttttttatattcatagtcgtttacttgagagagctgctaaaatgagcgatgaacacggtggtggaagtttaacagccctaccaattattgaaacgcaagcaggtgatttatcagcttatattccaacaaacgtaatttctattacagatggccaaatcttcttagagactaacttattttttgctgggattcgtccagcgattaacgttggattatctgttagtcgtgttggttctgcagcacaaactaaggcaatgaaaaaaattgctggtccagttaaactggaattagctcagtatcgtgaaatggcagcattcgcacagtttgcatctgatttagatgcatcaactaagcaattattagatcgtggtgcaagattagttgaaattttaaaacaaggacaatactctccacttacagtatctgaacaagtagtatctatttatgcaggagttcgtggctatttagataaggttgctgttaatgatgttgttcgttttgaaacggaagttttaaatgaaatgagatctagtcacactgatttgttagaggctattgcaaatgaaaaagaattatcaaaagataatgatgataaattaaaatctatcttagataatcttgttgaaaaatttacgagtaactaat

SEQ ID NO: 274025 - DNA, 895 bp, Unknown
  Bacterial polypeptide expressing nucleotide sequence isolated from the Sargasso Sea
atgccaagtttaaaagatattaaaacacagatcaattctgttggatctacaaaaaaaattacttcagctatgaaaatggttgcggcaagtaagttgcgtagatcacaagaaaaagctgaagccgcaagaccttattcttcacgtcttgaagaaatgttagcatctttggcttcttcagcagcatctggagaagggattattaagcttcttacgggtactggtaatgatcaaaattatattgttgttccagttagtgcggatagaggtttatgtggtggttttaatagcagcattaatagagagacttttaaacttgtaaagtcacttgaaagtgacggtaaaagtgtccaactcatgcctgttggaaaaaagagtagggattttttcaaccgagtaatgaaaaatcaaattgcagaaagttttgttgatttgaacatttcaaatagtggttatgagtcagcgttaaaagtatcgaacaaacttcaagaattatattttgatagtaaatttgataaatgcattatagtatttaataaatttaaatcagcaatttcacaagaggtgacgcaacaacaacttataccattagatgtatcagattcatctgaggaagagaatgcagaaactactgctgctaaagcaatttatgattatgaacctgatgaggaaactattttgaaagatttacttcctaaaaatgtttctattcagatttttaaagttttactggagagtgatgcaggagaacatggggcaagaatggctgcaatggataatgcgacacgtaatgctggtgagatgattgatagtttaacattaaaatataacagaacgcgacaagcgtttataactaaagaattaattgaaattatttctggagctgaatcagtttaaa

SEQ ID NO: 274026 - DNA, 1077 bp, Unknown
  Bacterial polypeptide expressing nucleotide sequence isolated from the Sargasso Sea
atgcaaactggtcttaaatcaattgatagtctagttccgataggaagagggcaaagggaattaattatcggtgatagacaaactggtaaaacagcagttgcagtagatgcaattattaatcaaaaaaaaattaatgaatctggtgatgaaaaacaaaaactgtattgtatatacgttgcagttggacaaaaaagatcaacagtaagacaaattcaaaaaacattagaagaagctggagctatggagtacacaacaattgtcgctgctactgcatctgactctgctcctttacaattcttagcaccatatacaggttgtactatgggtgagtattttagagataatggaatgcatgcgttaataatttatgatgatttgtctaaacaagcagttgcttatagacaaatgtcattgctattaagaagaccgccgggacgtgaggcttatcctggagatgtattttatcttcatagtagattacttgaaagagcagctaaattaagtgatgaacatggtggtggatcacttacagcactgccaattattgaaacacaaggtggagacgtatccgcgttcattccaactaacgttatttcaattacagatggacaaattttccttgaaacagaactatttaaccaaggtataagacctgcaattaacgtaggtttatcagtgtccagggttggttcatcagctcaaacaaaagcaatgaaaaaagtttctggttcaatgaaattagagctagcacaatacagagaaatggcagcttttgctcaatttggatctgatttagatgcatctactcagcaacttttgaatagaggctctaaactaactgaacttttaaaacaaaaacaatattcacccatgactgttccagaacaagttatttcagtattttgtggagttaaaggttatctggatgatattgatttaaaagacgttgctgaatttgagagcaagattattgaaaaatgtaaatcagataagcctgaaattatagagtcaattttaagttcaggaaaacttgaggaagataaagaaaaattacttgttgaggtaatcactcaaatt

SEQ ID NO: 274027 - DNA, 877 bp, Unknown
  Bacterial polypeptide expressing nucleotide sequence isolated from the Sargasso Sea
atggctagtttagacgatctaaaaaaaagaatatcaagtgttaagtctacgcagaaaattactaaggcaatgaaaatggttgctgctgcaaaattgcgaagagcccaagagagtgctgagaaaggcagaccttactctgataaaatgaataatattattttaaacttatcaaatggtatatctgacattgataacgctccgaaacttttatctggtactggagaagataaagtgcatctatgtgtagtaatgacatcagatagaggtctttgcggaggttttaatacaaatattattaaaaaagctaaactatattttcaaaaaattttagatgaaggaaaaactttaaaaattattacagtgggaactaaaggttatgaccaactaaaacgtctatacggtgataatattatcgaaagaatatcttttaaagaatcaaaaaatattaattattttgatgctgataaagtcggtaagatagttattgaaaaatttgaaaaaaaagaatttgatgtatgtgcaattttttataaccaatttaagaatgtaattactcaaataccacaagaacaacaaattattcctttaaaaacatctgaaaaagatgaaaattcatcagaagataactatgaatttgaacccgaagaagatgagatattgagtaacttgttacctaaaaatatttcaactcagatttttaaagcgatgttagagaattcagctagcgagcaaggttcaagaatgagtgcaatggataatgcaaccagaaacgcaggtgaaatggttgacaaacttactattgagtataatagaagtcgtcaggcagcaattactaaagagttaatagaaataatttcaggagcagaaagtttataat

SEQ ID NO: 274028 - DNA, 431 bp, Unknown
  Bacterial polypeptide expressing nucleotide sequence isolated from the Sargasso Sea
ggttttctgtatcagagttggatcatccgctcaaactaaagcaatgaaaaaagtttcaggatcaatgaaattagaactcgcgcaatatcgtgaaatggctgcgttcgcacaatttggttcagacctcgatgcatctactcagaaattacttaacagaggatcaaagttaactgaacttttaaagcaaaatcaatattctccaatgacagttgcagaacaagtcatttctgtattttgtggagttagaggacatcttgatgatattgaacaaaaggatatttcaagttttgagagtaaaattattgaaaaatgtaaatctgaaaagccagatattattgagtcaataacagcttcaggaaaacttgaagatgataaagaaaaagaattgaatgaaattattttacaacttaagaaagattttaactcataaa

SEQ ID NO: 274029 - DNA, 727 bp, Unknown
  Bacterial polypeptide expressing nucleotide sequence isolated from the Sargasso Sea
atgttttttaattccttgctaacaaattttgcagcattagaagttggtcaacatctttattggcaaattggaaatatcagactacatgggcaggtatttttaacatcttggattttattaggagctttaatagtttttatttctttaggaactaaaaagatggaaaatgatcctaaaggccttcaaaacttgcttgagttcctatgggattacataagagatcttgctaggacgcaaatcggtgaaaaagtttatagagattggatgccatttataggtactttatttttattcgtgtttgttagtaattggggaggagctttaattccttggagattgattaaattaccaagtggagaattaggagcacctactgctgatatcaatacaactatagccttggctttattggtttcactttcttatttctatgcaggtttaagcaataagggttggagatacttcgaatactatgttcacccaactccgattatgcttcctttcaaaattctagaggattttacgaaaccgttatcactctctttcaggctatttggaaatattttggctgatgaacttgttgttggtgttctagtctttttggttccgctcattctcccaatacctgttatgtttctaggattgtttactagtgcaattcaggcattgattttcgcaactttggcggcctattacattggagaagctgttgaagaacatcattagc

SEQ ID NO: 274030 - DNA, 1420 bp, Unknown
  Bacterial polypeptide expressing nucleotide sequence isolated from the Sargasso Sea
atgagaaaaggaaaaataactcaaatcatcggagcagttgtcgatgtaagttttgaaggagaattacccgagattttaactgcactagaatgtaaaaatgctgggaacaggttagttttagaagtagcccaacatttgggagagtctagtgtgagaaccattgctatggactctacagagggtcttaaaaggggagatgaagtaacagatacaggcgcaccaattaaagtaccagttggaccagaaactttaggaagaattataaatgtcattggtgaacctattgatgaaaaaggtgatgttaagagtaaagaaaattggccaatccatagagcggccccagaatttaatgatcaatctacagagactgaaatattagttacaggtattaaagtaattgatcttttagcgccatatgccaaaggtggaaaaattggattatttggtggcgcaggtgttggaaagactgttttaattatggaattgataaataacgttgctaaagcacatggtggcttttcggtttttgcaggtgtaggggaaagaactagagaaggaaatgacctttatcatgagatgattgactcaggagtaattaagccagaaggcaaaggttcaaaagctgcattagtctatggtcaaatgaacgagcccccaggagcaagagcaagggtcgcgttaactggattgactgttgctgaatattttagagatcaagaaggccaagacgtattatttttcgttgataatatttttagatttacgcaagctggctcggaagtttcagcattattaggcaggataccttcagctgttggatatcaaccaactcttgctaccgatatgggtaacctacaagagagaattacgacaacaaataagggctccattacttcagtacaagcgatttatgtgcctgcagatgacctaactgaccctgcaccagcaacatcttttgctcacttagatgcaacaacagtattatcgagacagatagcagaaataggtatttatcctgcggttgatcctttagactctacttcaagaatactagatccaagaattgttggtgatgaacattatagagtagctagagaagtacaaaaagtgcttcagacctacaaatctttacaagatatcattgcaattctcggaatggatgaactatccgaagaggacaaattaattgtagccagagctagaaaaatacaaagatttttatctcaaccattctttgttgcagaggtttttactggatcacctggaaaattagtagatctagactcaactataaaagggtttgatgcaatttgtaaaggtgaatatgatcatcttcctgaggcagcattttatatggttggtactatcgaagaggccattgagaaagctaaaaaaatggagaaagaagccgctgcataat

SEQ ID NO: 274031 - DNA, 877 bp, Unknown
  Bacterial polypeptide expressing nucleotide sequence isolated from the Sargasso Sea
atggctagtttagacgatttaaaaaaaagaataacaagtgtaaaatctacacaaaaaattacaaaagcaatgaaaatggttgcagctgcaaagcttagaaaagctcaggaaagtgctgaaaaaggaaggccttactctgataagatgcataatataatcttaaatttgtctaagaatataaatgataaggaaaatgcaccaaagcttttagctggctcaggtaaagataatgtgcatctctgtgtggtaatgacctctgacagaggtttatgtggaggttttaattcaaacatcaccaaaaaagcaaagtcctatttcaaaaaaatattagatagtggtaaggagcttaagatagtaactgttggatcaaaaggatttgaccaacttaaaagagcttataaagagcatataattgagaatatttctttcaaagaatctaaaaatgtaaattactttgacgctgataaagtaggaaaaatgataattgagaaatttgagaaaggagaattcgatgtttgcacaatcttctttaacaaatttaaaaatgttattacccaaatacctcaagaacaacaaattatcccattaaaatcagagaaatcagacgataaaaatgatgttatgaattacgagtttgagcccgaagaggatgaaatattaaataacttgttaccaaagaatatttcaacacaaatttttaaagcaatgttggaaaattcggctagcgaacaaggatcaagaatgagtgcaatggataatgcgacaagaaatgctggggaaatggttgagaaactcacaattgaatataatagaagtcgacaagcagctattacaaaagaattaattgaaataatatcaggagcagaaagtttataat

SEQ ID NO: 274032 - DNA, 1537 bp, Unknown
  Bacterial polypeptide expressing nucleotide sequence isolated from the Sargasso Sea
atggatattaacccatcagaagtaacaaaaatattaaaagaacaaatcaaaaaattcggagataaatctgaagttacagaaattggtcaagttttatctgtaggagacggaatagcaagaatttacggactcgacaatgttcaagccggtgagatggtagaatttgctgatggttctaaaggtatggcgttgaatttagaaagtgataacgttggggtagttatttttggtgatgatagagcagttaaagaaggtgatacagtcaaaagaactggagcgattgttgacacaccagttggtaaagaattacttggaagagttgttgatggattaggaaacccaatagacggcaaaggagctttagacaaaagtattaaacgaagtagagtcgaggtgaaagcaccaggaattattccaagaaaatctgtcagcgaaccaatgcaaacaggtttaaaatcaattgatagtttggttccaataggtagaggtcaaagggaattaattattggagatcgtcaaacaggaaaaactgctgttgctattgatgcgataattaatcaaaaaaaaataaacgagtcaggtgatgaaaaacaaaaactttattgtatttatgttgcaataggtcaaaaacgatcgactgtaagacagatagagaaaactttagaagaggctggagctatggaatatacaacaattgttgcggcaacagcttcagatgcagctccattacaatttttagctccatacactggatgtgctatgggtgaatattttagagacaatggaatgcatgctttaattatttatgacgatctttcaaaacaagcagtagcctacagacaaatgtcacttcttttaagacgtcctccaggaagagaggcatatccaggagatgttttttatttacatagtcgattacttgaaagagcagcaaaattaggtgacgaacatggcggaggatcattaactgcgttgccaatcatcgaaactcaagcaggagacgtatcagcttacatacctactaacgtaatctcaattactgatggacaaatatttttagagacagaactattcaatcaaggaataagacctgcaattaatgttggcttatcagtttcaagggtaggatcttctgctcaaacaaaagctatgaaaaaagtttctggatctatgaaacttgaacttgctcaatatagagagatggcagcttttgcacagtttggatctgacttagatgcgtcaacccaaaaacttttaaacagaggagcaaaattaactgaattattgaaacaaaaacaatattctccaatgacagtagctgagcaagttatttctgtcttttgtggtgtaaaaggtcacttagacgatattcaacaaaaagatatatcaaaatttgagaaagatataattgagaaatgtaaatctgaacaaccagatttgataaattcaataatttcatcaggaaaacttgaagaagataatgagaaaaaattaacgagtattattttggatttaaagaaaaatttcgataaataat

SEQ ID NO: 274033 - DNA, 382 bp, Unknown
  Bacterial polypeptide expressing nucleotide sequence isolated from the Sargasso Sea
atggcaagtttagacgatttaaaaaaaagaatatcgagtgtaaaatctactcagaagattacaaaagcgatgaaaatggttgcagcatccaaattaagaaaggcacaagaaaatgcagaaaaaggaagaccgtattcagaaaaaatgaataatattattcttaacctttcaaataatatttcagataaagaaaattcacccaaattacttacaggctcaggtgaaagtaaagttcatttatgtgttgttatgacttctgacagaggactttgtggaggttttaatacaaatataattaaaaaggctaaatcatattttcaaaaaatcatagaagagggaaaaaatttaaaaattattactgtaggatcgaaaaggttatgat

SEQ ID NO: 274034 - DNA, 979 bp, Unknown
  Bacterial polypeptide expressing nucleotide sequence isolated from the Sargasso Sea
tacaggaattaaatgtatttatgtagctattggtcaaaaacaatcaacaatagctaatgtcgtagcaaaacttgaagagtatggagcaatggagcacacaattgttgtttcagcggcagcagctgatccagctgcgatgcaatacctctcagcatattcaggttgtgcaatgggagaatattttagagacacaggtcaggatgcattaattgtttacgatgatttgtcaaagcaagcagttgcttacagagagatatcactattacttagaaggcctccaggtagagaagccttccccggagatgttttttatcttcactcaagacttttagagagagcagctagagtaaatgcggaatacgtagaaaaaattacagaaggaaaggtaaaaggcaaaacaggatctttaacagccttgcctattattgaaacacaagccggagatgtatctgcttttgttccaaccaatgtaatctcaattactgacgggcagatatttttagaaacggatctttttaattcaggtgtcagaccagctatcgatccaggactttctgtatcaagagttggtggagccgcacaaactaagataattaaaaagcttagtggcggaattagaacagaccttgctcaatatagagagcttgcggcattctcacagtttgcatctgatctagatgatgcaacaaaagaacaattagaacacggtaaacgaattactgagcttctaaaacaaaaacaatactctccaatgagtgttgctgatcaagcaatgagcttatatgcagctgataaaggctatatgaaggatgttgatatagataaagtaggtgactttgaatcagccttattggcttattttgaatcagaaaagtctgacctaaaaaagcaaattaatgataccggagattgggatgacgatattgaaaaccagtttaaggaattagttgaagactttaagaaaacacaaacatattaa

SEQ ID NO: 274035 - DNA, 1468 bp, Unknown
  Bacterial polypeptide expressing nucleotide sequence isolated from the Sargasso Sea
atggccgcagcagcaaaagcctcaaccggtacgaaaggaatcgtccgccaggtcattggtcctgtgcttgacgtggaattccctgccggcaagctgccccgcatctacaacgctctgcggatcgaggggaaaaacaccgcagggcaaaccattgctctgactgctgaagttcagcagctgctcggtgaccaccgcatccgcgcggtggccatgagcggtaccgacggtctggttcgtggcatggatgccatcgacactggcgccccgatctccgtccccgtgggtgaaggaactctgggccgaatcatgaacgtgctcggcgagcccgttgatgagcagggtcccgtcaagaccgaaaccacctctccgattcaccggggcgctcccaagctcaccgagctcgagaccaagccccaggtctttgagaccggcatcaaggtgatcgaccttctggctccctatcgccaaggcggcaaggtcggcctgttcggtggtgctggcgtgggcaagaccgtgttgatccaagaactgatcaacaacatcgccaaagagcacggcggtgtatctgtgtttggcggtgtgggcgaacgcacccgcgagggcaacgacctttacgaggaattcaaggattcaggcgtgatcaacgccgaagacctctccaaatcaaaggtggctctctgctacggccagatgaatgagccccccggcgcacggatgcgtgtgggtctctcagctctgaccatggctgagcacttccgcgatgtgaacaagcaggacgtactgctgttcgtagacaacatcttccgctttgtgcaagccggttccgaggtgtccgcactgctagggcgcatgccttcagctgtgggctaccagcccaccctcggcacggacgttggtgagctgcaagagcgcatcacctccaccctcgagggttccatcacctcgattcaagccgtctacgtccctgctgacgacttgaccgacccggcccctgccaccacatttgctcacctggatgccaccaccgtgctgagtcgcggcctggcctccaagggcatctatcccgctgtggaccctctcgactccaccagcaccatgctccaacccgccgttgtgggcgacgagcactacaagaccgcacgctccgtgcagtccacgctgcagcgctacaaggaactccaggacatcatcgcgattctgggtctggacgaactctccgaagacgaccgtctgactgtggatcgcgcccgcaaagttgagaagttcctctcccagcccttcttcgttgctgaaatcttcaccggcatgcctggccagtacgtgaagctcgaagaaaccatcaagggcttccagatgatcctggccggtgaactcgacgacctgcctgaggccgccttctacctggtcggcaacatcgatcaggtcaaggccaaggctgagaagatccgctctgaagccaagggttgat

SEQ ID NO: 274036 - DNA, 636 bp, Unknown
  Bacterial polypeptide expressing nucleotide sequence isolated from the Sargasso Sea
aggtctctacattattaggacgtatgccatctgctgtgggttatcaaccaacacttgcagacgagatgggtttcttgcaagagagaattacctctcttaaaggtagatctattacatcactacaagcagtgtatgtgcctgcagacgacattactgaccctgcaccacacacagcttttgctcacttagatgcaagaacagtgttgtctagaactattgctgaccttggtatttacccagctgttgatccccttgactcttcatcaagaatcttggatccaggagttgttggcgatgaccattacaacactgctagagaggttcagagagtgcttcagagatacaatgacttgcaagacattattgcaattcttggtattgatgaattatcagaagaagataagcaaatagtcggtcgtgcgagaagaattcagagattcttatcacaacctatgtttgttgctgaacagttcacaggtatcgaaggtaaattcgtatccattaaagacacagttgaagcgtttaagacaattttaagtggagagctagactcagtccctgagcaagctttttatatgactggtggacttgatgaagtcatgtccaaagctaaagaactagaagaaagcgtttaat

SEQ ID NO: 274037 - DNA, 858 bp, Unknown
  Bacterial polypeptide expressing nucleotide sequence isolated from the Sargasso Sea
taaaaaaaagaatatcaagcgttaagtctacccaaaagattactaaggcaatgaaaatggtagctgctgcaaagctgcgaagagcccaggagagtgctgagaaaggcagaccttattccgataaaatgaataatattattttaaacttatcaaatggtatttcagacattgaaaatgccccaaaacttttatctggttctggtgaagacaaagtacatttgtgtgttgtcatgacatcagacagaggtctttgtggaggttttaatacaaatattattaagaaagctaaactatattttcaaaaaattttagatgaaggaaaaacactaaaaattattacagttggaactaaaggttatgaccaattaaaacgtctttatggtgataatattattgaaaaaatatcttttaaagattcaaaaaatgtaaattattttgatgcagataaagtaggtaagatagtaatagaaaaatttgaaaaaaaagaatttgatgtatgtgcaattttttataaccaatttaagaatgtaattactcaaataccacaagaacaacaaattattcctttaaaagcatctgaaaatgaggaaaattcatcagaagataactatgaatttgagcctgaagaagacgaaatattgaacaacttattacctaaaaatatttcaactcagatttttaaagcgatgttagagaattcagctagcgagcaaggttcaagaatgagtgcaatggataatgcaaccagaaacgcaggtgaaatggttgacaaacttactattgagtataatagaagtcgtcaggcagcaattactaaagagttaatagaaataatttcaggagcagaaagtttataat

SEQ ID NO: 274038 - DNA, 448 bp, Unknown
  Bacterial polypeptide expressing nucleotide sequence isolated from the Sargasso Sea
atgagaaaaggacaaataacacagattattggggcggtagtagacgtaaaatttgatggagaactaccagaaattttaactgcactagagtgcgataacggtggaaatagattagtattagaagttgcacaacatttgggggaatcaagtgttagaacaattgcaatggatgcaacagaaggtcttaaaagaggagacgaggtaacagatacagctgctccaattaaagtcccagtaggaccagagacacttggaagaataataaatgtaataggtgagcctattgatgaacgaggagaagttaaaagttcagataactggccaattcatagagccgcacctgaatttaatgatcaatcaacagaaactgaaatacttgtaacaggaataaaagttattgatcttttagctccctatgcaaaaggtggtaaaatcggtttatttggtg

SEQ ID NO: 274039 - DNA, 1537 bp, Unknown
  Bacterial polypeptide expressing nucleotide sequence isolated from the Sargasso Sea
atggaaataaatccgtcagaagtaacaaagatattaaaagaacaaattaagaaatttggagataaggctgaagtaactgaagtaggtcaggttttatcagtaggagatggtattgctagaatatatggtttagataatgttcaagcgggtgaaatggtagaattttctgatggctcaaaaggaatggcattaaatttggaaagtgaaaatgtaggtgtcgtaatttttggtgacgataaatcagtaagagaaggtgatactgtaaaaagaacaggtgcgattgttgatactccagttggtaaggaattgcttggtagagtagttgatggtttaggaaatccaattgatgggaagggtgcactagataaaagtgtaaagagaagcagagttgaagttaaagctccaggtataattccacgtaaatcagttagtgaaccaatgcaaaccggtctaaaatcaattgatagtttggtaccaattggaagaggacaaagagagctaattatcggggatagacaaactggtaaaacagcagttgctattgatgcaattataaatcagaagaaaattaatgagtctggagatgaaaagaaaaaattatattgtatttacgtagcagttggtcaaaagagatctactgtgaggcaaatagaaaaaacattagaggaggctggagcaatggaatatacaacaatagttgctgcaacagcttcagatgctgcaccattacaatttttagcaccttacactggatgtgcaatgggtgaatactttagagataatggtatgcatgctctaataatttatgatgatttatcaaaacaagctgtagcttacagacaaatgtctcttttgttaagaagaccgcctggaagagaagcatatccaggtgatgtattttatttacacagcagattgctcgaaagagcagccaagttaagtgatgaacatggtggtggatctctgactgctttacctattattgaaactcaagggggggatgtttcagcatttataccaacaaatgtaatctctattaccgatggtcaaatatttttagaaacagagctttttaaccaaggtattagacctgcaataaatgttggattatcagtttcaagagtgggatcttcagcacaaactaaagcgatgaaaaaagtttctggttcaatgaaattagaactagcacaatacagagagatggcagcatttgcacaatttggttcagaccttgatgcatcaacccaaaaattacttaatagaggttcaaaattaactgagcttctaaaacaaaatcagtattcaccaatgactgtggcagaacaagtaatttctattttctgtggtgtaaaagggcatcttgatgatattgaacaaaaagatatctcaagtttcgaaaataaaataattgaaaaatgtaaagctgaaaaacctgaaatcatcgaaggcattactacatctggaaaacttgatgatgagcacgagaaaattttaaacgaaattattctccaacttaaaaaagattttaacgcttaaa

SEQ ID NO: 274040 - DNA, 1429 bp, Unknown
  Bacterial polypeptide expressing nucleotide sequence isolated from the Sargasso Sea
tatgacaacaaataataaaggtaccatatcacaagttatcggagctgtagttgatgtacgctttgaagaaaacttgccgccaattcttgcagcattagaatgtaaagttggtgataaaactgtgatccttgaggtcgcacagcatttaggtgagtccacagttagaactattgctatggagtcaactgatggaatgactagaggtgacgatgttgttgacaccggtaatcagatacaggttccagtaggccctgagactttgggtagaattatgaatgttgttggcgagcctgttgatgaaaggggtgaaattaaatctacagataaatggtcaattcatagagatgcccctgactttgttgatcaagctacagaaacagaaattcttgttacgggtattaaagttgtagatttgctagcgccttattctaggggaggaaaaattggtctctttggaggagcaggggttggtaaaacagttattatcatggaactaataaataacattgcaaaagctcatggtggttattcagtattttctggtgttggagaaagaactagagaaggtaatgacctttatcatgaaatgattgaatctggcgttattgatttagaaggtaaagagtcaaaatgtgcattagtttatggacaaatgaacgaacctccaggagcaagagctcgtgtagctttaacaggtttgacagttgctgagtattttagagatatggaaggccaagatgtattattttttgtagataatatttttagatttactcaagctggttcagaggtgtcagctctgcttggtagaattccatctgccgtaggttatcaacctactcttgcaactgatatgggatcacttcaggaaagaattacatctacaaataaaggttcaattacatctgtgcaggcaatatatgttcctgctgatgatttaaccgatcctgctcctgcaacctcgtttgcacaccttgatgcaacaaccgtgctttcaagacagattgcagagcttggcatttatcctgctgttgatccgttagatagtacttcaagaatattagaccctcgcgttgttggagatgaacattatcgagttgcaagaaatgtacaagctgtactgcagacttataagtctctacaagacatcattgcaattttaggtatggatgagttatctgaagaagataaattaacagtggccagagcacgtaagattcaaagatttatgtcccaaccgttctttgttgccgaagtctttacaggaactcccggaaaatatgttgaattagaggatacgatcaaaggatttgatgcgatctgtaagggtgaatatgatcatctacctgaggcagctttttatatggttggtacaatagaagaagctattcaaaaagcagaaaaaatggccgaagaagccgctgcgtaa

SEQ ID NO: 274041 - DNA, 1528 bp, Unknown
  Bacterial polypeptide expressing nucleotide sequence isolated from the Sargasso Sea
aatggacatacaaccatcagaaatatcaaaaatactcaaagaagaaattaaaaattttggatctgactctgaaattacagaagttggtcaagttctttcaattggagatggtatcgcaagaatttatggacttgataatgttcaggccggtgaaatggtaatgtttgatgatggtacaagaggaatggcccttaacctggaggatgataatgtgggtgttgtgctatttggaagtgatgcaaatattaaagaaggtgatacagttaaaaggacaaattctattgttgatgttccagtaggtaaagagctgctaggaagagttgtagatgctcttggaaatcctatagatggaaaaggaaacatagagtcacagaatagaagtcgtattgaagttaaagcgccaggtataataccaagaaaatcagtgtccgaaccaatgcaaacaggtcttaaagcgatcgacagcttgattccaattggcagagggcaacgtgaattaattattggtgacagacaaactggaaaaacagcaattgctattgatactatcataaatcaaaaatctattaatgaatctggcgatgaaactaagaaactttattgtatttatgtcggtataggtcaaaaaagatcttcgattgctcaaacagtgaaagccttagaagacgctggtgccatggaatatactacagttgttgcagcaacagcaagtgacgctgctccactacaatttcttgctccttatactggttgttcaatgggtgaatatttccgtgataatggaatgcatgctttaataatttatgatgatttatcaaaacaagcagtagcttatagacaaatgtcattacttcttagaagacctccaggacgtgaagcatttccaggagatgtattttatcttcacagtagattacttgagagagcagccaagatgaatgatgaaaatggaggtggttcattaacagcgttgcctgtgattgaaactcaagcaaatgatgttagtgcatttataccaacaaacgtgatttcaatcactgatggtcaaatttttctagaaactgaattgtttaaccaaggtatcagacctgcagttaatgtaggtttaagtgtatcccgagttggttctgcagcgcaaaccaaggcgatgaagaaggttgcaggctcgataaaacttgaactggcccagtaccgtgaaatggcagcatttgcccaatttggttcagacctagatgcctcgacacagaagctattaaatagaggttcaaaacttaccgaactattaaagcaaaaccagtattcaccgatgacaattgcagagcaagttgtttcaatttttactggtgtgaacggttacttagatgatctggagttgaatcagataagggatttcgaaaaagatctatttgaacttataaaatcatctcattcagatattattgagtctatcaattcatctggagacttgaacgatgatacttccagtaaattaacatcaataattgaagagtttaaaaaaaataggtaa

SEQ ID NO: 274042 - DNA, 886 bp, Unknown
  Bacterial polypeptide expressing nucleotide sequence isolated from the Sargasso Sea
aatgccaagtttagacgatctaaaaaaacgaattggtagcgttaagtctactcaaaaaataactaaagccatgaaaatggttgcggctgcaaaattacggcgtgcccaagaatctgctgagtcaagtcgtccttattctgagaccatggaagatcttatatcatctatatcatctgggtactctccaacttcaaatgaaagaaatttattaaccggagataataaggactcaattcatatgttgatcctctttacatctgagagaggactgtgtggtggatttaattcaattgtcactaaatcacttcgagataaagtagcaagtcttgaggagtcaggcaaacaagtaaaaattatttgtgttggaaaaaagggttatgacattattaaaagacagcatgaagaaaaaattgtcgaagttgttgatatgagatctgttaagtctgcttcttatcaggatgcaaaaaatatagctgacaaaataataaaaatgtattttgacgaagaatttgataaatgttctatcttttataataagtttaaatcagtaatatcacagattccaactgaacaacaaattgttccaattgatattcctgaaaacgagtcagatacaacgaaaaatgacaatactttttttgaatttgagcctggtgagagtgaaatactcgatgaactactcccgctgaactttacaatacaaatatttaaagctttactagaaagtgcagccagcgaacaaggtgctagaatgagcgctatggataatgcatcaagaaacgcgtctgatatgattgataatttaacactattttataaccgttccagacaagctgttattactaaagagcttattgagataatttctggagcagaagcagtttaa

SEQ ID NO: 274043 - DNA, 439 bp, Unknown
  Bacterial polypeptide expressing nucleotide sequence isolated from the Sargasso Sea
taccgtgcttgctagagctcttgcagctaagggaatttatccagcagttgatccattagactcaacgagcactatgctacaaccatcagttgttggcgatgagcattacaaaacagccagagctgttcaatcaactttacaaagatacaaagaacttcaagatattattgcaattcttggtttagatgagctttctgaagaagatagattaacagttgacagggccagaaaaattgaaaaatttctctcacaacctttcttcgtagcagaaatatttacaggaatgtctggtaaatatgtaaaattagaagataccattgctggtttcaatatgattttgtcaggtgaattggatgatttaccagagcaggctttttacttagttggtaatattgatgaagttaaagcaaaggctgaaaaaataaaatcagaaaaataa

SEQ ID NO: 274044 - DNA, 1744 bp, Unknown
  Bacterial polypeptide expressing nucleotide sequence isolated from the Sargasso Sea
aatgagtacagaaaatggagtgatataccggatttccggaccagttgtgaccgccacgggcattgccccgaggatgtatgaggttgtgcgagtcgggaatgaaggattgatgggagaagtaattgagctacacggagaacaatcggtaatccaggtctacgaagagacatcagggattgaaccgggagagcctgttatcaggactgggcagactctgtcggtacaactaggaccgggactattgacccagatatacgatggaattcagaggcctcttcccaaactagaggagacaatgggcgttttcatcaccagaggtgtcgatgcggacggactcgacctgactaaggaatgggagttcgttcccacggtcaaagtaggagacgagttatcggcaggacatgtgataggtacagtccaagaaactgagactattgaacacagagtcatggtaccgcccggaaaggagggagtcgtgaaaaccattgagtccggttcgttcaatatcacccagacggtatgcaagctggaagatgggtctgaaatagcgatgatgcaggagtggccagtaaggcaccctcggccattcgtacagaaatacgcgcctgacgtacccctcatgacaggacagagaatactggacttcctcttcccccttgccaagggtgggactgcaggaatccctgggcctttcgggtccggaaagaccgtcacacaacagcaactcgcaaagtggtccgacgctcagatagtggtgtacatcggatgtggggaacgtggaaatgaaatgaccgaggtcctcgacgagttccctcacctaattgatcccaatacgaacaagcctctgatgaacagaactgtgatgattgcaaatacttcgaacatgccagtcgcagcaagggaggcatccgtttacacgggagtgactatcgcagagtacttccgagatatgggttacaacgtggctctaatggctgactcgactagtaggtgggctgaggctatgagagagatttcatcgaggcttgaggagatgccaggagaagagggttatccagcatacctctcaagtagactggctgagttttacgagagagcaggaagggttgagacattgtccggagaggatggttcagtgtcggtaatcggagctgtttcccccccaggtggggacatctcagagccagtcagccaaggaactctcaggattgtcaaggtgttctggggactggacgctgggcttgccaggcaacggcacttccctgcgataaactggcttagttcctacagcttgtacccacaagccctggaccaatggtatagggataacattgcaaccgacttccctgaagttaggaccgagataagcactctactccaaatcgaagctgaattgcaagagattgtccagcttgtagggtccgatgcactaccaatagatcagcaactgacactagaagttgcgaggatgattagggagttcttccttcagcagaacgccttccatgatgtggatacgtatagcgatctgaagctgcaatatgacatggctaaagcaatactgaacttccaagaagaaggcaagaaggcaattgctggaggtgcacaactcgaagacgtggttaacgtgcctgctaggaccgacctgatgagagggagattcgaagaaggttatgacggtagaatagagggcctggttgcggagatgagcaagcagattgctgctagcatggaggaaaactga

SEQ ID NO: 274045 - DNA, 1396 bp, Unknown
  Bacterial polypeptide expressing nucleotide sequence isolated from the Sargasso Sea
tatgagtggaaaagagtacagaacaattacagacgtaaaggggcctcttgtgttcctaaacaaaaccgagcctgtttcgtataacgagattgtacaactgaggctcagtgatggatcaatcaaaaacggacaggttctagacacatccgatgaccaagtcattgtacaggtcttcgaaggtactgcatctgtggacaggcagacaggtgtaaagttcctaggtgatgtattcaagctccccgtgagcaagggactgattggtaggattctagatggtgctgggaggcccagagatggaggcccagaaatcgttgctgatgatatggccgacattatcggggccgcaattaatccctattcgaggcagagtccggagtcattcatacagacaggaatttcagcgattgacgcttgtacatctcttgtcagaggtcagaaacttccgatcttcagtgcaagcggactgcctcacaacgacatcgctttgcaaatcgcaagacaagccaaactagttggtagcgatgatgacttcgtcgtagttttctgcgcaatgggaattaccgcagaagagtacaacttcttcgtacacgacctagagaggactggggcactcgagaatgcggcgctattcgtaaacctggctgacgatccggcagtcgagaggctgatcactcctcgtctggcactcaccgctgctgagtacctagcattcgaacatgactatcacgtgctggtgatatacacggatatgacaaactactgtgagtcattgaggcaaatcggggctgctagagaagaagttcctggaaggaggggttacccaggttacatgtacacggatctggcgatgctttacgagagagcgggactggtcaaagggaagaagggttcaatcacgcagttccctatcctaactatgcctggtgacgatattactcacccgattccagatctctccggatacatcacagagggccagatagtcatctctagggagcttcatcagaaaggaatctaccctcccatcaacgttcttccatctctaagcagattgatgaatgcagggatagggcctggtaaaaccagagaggatcacaagtcagtatctgaccagctctacgcagcctacgctcaaggaaaggaattgagaggactggtagcaattgtcggagaggatgctctaaacgagagggatcttcaacttctcaagttcgcagatatcttcgaagataagttcctcaggcagagcagagacgaggacagatcgatagacgagggaactctagacctagcttggaacctactgtcaaacatcgacacaaagttccttgtaagactggatcagaagtggatcgataagtaccatcctggtgaaaagaagggagaagaagagtaa

SEQ ID NO: 274046 - DNA, 691 bp, Unknown
  Bacterial polypeptide expressing nucleotide sequence isolated from the Sargasso Sea
aatgctcccaaagttactggttgggacaggtgaagagaaagttcatttatgtattgttctcactgctgatagaggtttatgcggaggttttaatactaacattattaaaaaagcaaaaagttatttcgaaaaaataatatctgaaaataaaactttaaaaattattactgttggatctaaaggatatgatcaacttaaaagacagtataaaagttatattgtagagaacatttctttcaaagagtcaaaaaatataaattactttgatgcagataaagtaggaaaaattataattgaaaaatttgaaaaaaatgaatttgatgtttgcgcaatattttacaataaatttaaaaatgtaattacacaaattccacaagaacaacaaatagttccacttaatgaagataaagatgataaagatgactctggtaatgataatgactatgagtttgaaccagatgaagatgagattttaagtaatttattgccgaaaaatatttcaacgcaaatatttaaagcaatgttagagaattctgccagtgagcaaggttcgaggatgacagcaatggataatgcaaccagaaacgcaggcgaattggttgataggcttacaattgagtataatagaagccgtcaagcagcaataacaaaagagttaattgaaattatatcaggagcagaaagtttataa

SEQ ID NO: 274047 - DNA, 1129 bp, Unknown
  Bacterial polypeptide expressing nucleotide sequence isolated from the Sargasso Sea
aaagggagaagtaaagacaaaagagaaatggccaatacaccgagaggcaccaaaatttacagatcagtcaactgaaacagaaattttagaaactggtattaaagttattgatcttctggcaccatattcaaaaggtggaaagattggattattcggaggagctggagttggcaaaactgtaattattatggaattgataaacaacattgcaaaagctcatggaggattttctgttttcgcaggtgttggagaaagaacaagagaaggaaatgatttatatcacgaaatgattgagtcaggcgttattaaacctgagggtaagggttctaaagctgccttagtatacggtcaaatgaacgagcctcctggagcaagggcaagagtaggtttaacaggattaacagtagcagaatactttagagataaagaaggacaagacgtactattttttgtagataatatttttagatttactcaagcaggctcagaagtttcagcactattaggaagaataccatccgcagttggttaccaaccaactttggcaacagatatggggaatttacaagaaagaattacaacaacagggaaaggatcaattacatcggtgcaagctatttatgttcccgcagatgacttgactgatccagctcccgcaacctctttttcacatttagatgcaacaactgtattatctagacaaattgcagaattgggtatttatcctgctgttgatccattggactctacatctagaattttagatcctagaattgtaggtgaagagcattatagagtagcaagagaagttcaaaagattttacaaacctataaatctctacaagatattatagccatacttggaatggatgaactttcagaggaagacaaattgactgtagcaagagctagaaaaatacaaagatttctttcacaaccattttttgttgccgaagtatttaccggaactccaggtaaattagttaatttagactctacaataaaaagttttgatgcaatatgtaaaggtgagtacgatcatttaccagaagctgcattttatatggtgggatcaattgaggaagctatagcgaaagctgaaaaaatggcaaaagaagccgccgcataa

SEQ ID NO: 274048 - DNA, 1378 bp, Unknown
  Bacterial polypeptide expressing nucleotide sequence isolated from the Sargasso Sea
atgagcacaggaaatatcgtacaagtaatcggagcggtagtagacgttgagtttccaaaagaagcgataccgagcgtatatgacgcactcacccttaaagacggagaactagtttttgaggttcagcagcaacttggtgacggcattgtcagaaccattgctatgggagcaagcgagggtttaaaaagaggccttgaggttgaaaacactggagccccaattagcgtgcctgtaggacaggaaaccctaggaagggttctagatgttctaggaaacccaatagatgaaaagggccctgtgggcgccaaagcaaatagaccaattcacgcaaaagcacccacgtttgaagagcagtctacagaagcagatgtattggaaacagggattaaggttatcgaccttctctgcccatttgcaaaaggaggaaaggttggattgtttggcggagctggcgttggaaaaacagttacagttatggaactgattagaaatatagcagcagagcacgacggcttttccgtttttgctggagttggagaaagaacaagagaaggaaatgacttttatcatgaaatgatggagtcaaacgtcctagacaaggtcgcacttgtttatggacaaatgaacgagcccccaggaaacagattgagggttgcattgaccggactaacaattgctgaaaactttagggacgaaggaagggatgtcttgatgtttatcgataacatctacagatatactcttgcaggcacagaagtatctgcgttgcttggaagaatgccatctgcagttggttatcaacctaacctagcagaggaaatgggcgttcttcaagagaggattacctcaacgaaaacaggttcaattacctcaattcaagcggtgtatgtaccagcagacgacttgacagacccatcaccagcaactacttttgcccaccttgatgcaacagttgtattggcaagatcaattgctgagcttggtatttaccctgctgttgacccccttgattcaaatagccgccaattagatccgggaattgtagggcaagagcactacgataccgcaaggtctgttcagcaggttttacaaaggtataaggagttacaggacattatcgcaattcttggaatggatgagctatccgaagaagacaaactcaccgtacaaagagcaagaaaaattcaaagattcttgtctcaaccattttttgttgcagaggtctttacaggatcaccaggacagtacgtgtctttgagagattccattaaggctttccaaggaatagttgctggcgattatgacgacctaccagaacaggcattctatatggttggcacaattgaagaagcggttgaaaaagcaaaaagtatgtaat

SEQ ID NO: 274049 - DNA, 862 bp, Unknown
  Bacterial polypeptide expressing nucleotide sequence isolated from the Sargasso Sea
atggccaacgaaaaagaaatacgaacaaagattgggagcgttaaaaacacccaaaaaatcaccaaggccatggaaatggtagcggcgagcaaaatgcgccgaacacaggagaccatgaaaaaagcattaccctatgcagacaaaattagagcagtgatcggccatatctataacgcaaaccctgactataagcacccatttcttgagaagagagatgtcaaaaccgcaggctatattgtggtcagctcggacaggggtctttgtggaggattaaacgtaaatatgtttaggggcctcatagcagagctcaaagagaataaaaacaaccaagttgaatcaaaactttgtcttgtaggggctaaggcagtccaattttttaggtctgtagacgttgatgttgtagcggcagcatcccatcttggcgaagaaccacaagttgaagatttggttggctcaattaaaaccatgttagatgaatacatcgatgggaagattgaccagctctttattgtgcacaatgattttgtgaacacgatgacacaaaaaccagaaattaaaacgcttctcccaatagaccctgaagatagagaagagatgcaagaacactgggactatatttacgagccggactcaaaagagcttttggactatatattgatgagatatatcgagtcacaagtctatcgagcggtagttgaaaatgtagcgtgtgaaatggcagccaaaatggtggccatgaaaagcgctacagacaatgcaggaaaattaatagatcagcttgagcttgactataacaaagcaagacaggcggcaatcacacaagaaatttcagaaatagttggcggcgcagctgctgtttaaa

SEQ ID NO: 274050 - DNA, 1546 bp, Unknown
  Bacterial polypeptide expressing nucleotide sequence isolated from the Sargasso Sea
tatgagccaattaaatccatcagaaatttctagcgttttaaaagaaaaaatcgctggattagatctttcagcagagagaaaaaacgaaggtatcgttgtcagtgtttctgacggtattgtaagaattcacggcatgggtgacgtcatgtatggtgaggtgattgaatttgaaaatggtactaagggcatggcacttaaccttgagcaggactctgttggtgcagttgtactaggagattatttggagatcattgagggccaaaaagcagtttgtactggaaaggttttggaagttcctgttggtgaagagctcttaggaagagttgttaatactcttggaactcctatagatggaaagggcgagataaaagctgaaaaatcattgcctgttgaggttgttgctccaggtgttattgcaagacaatcggttgatcaaccagttcaaatcggtttaaaagcggttgatgcaatggttccaattggaaggggtcaaagagaattgataattggtgacagacaaactggaaaaacagctgtagctgttgacgcgataatcaaccaaaaaggaactggaataaaatgtatttatgttgctattggtcaaaaacaatccacggttgcaaacgttgttagaaaacttgaagaatatggagcaatggaacacaccattgttgtctcagcaacagctgctgatcctgctcctatgcaatacttatcagcctatgctggttgcacaatgggtgaatattttagagataagggtgaagacgccctaattgtatacgatgatctttctaaacaagcggttgcatacagacaagtgtctttattgctgaagaggcctcctggtagggaagcttatcctggcgatgttttttaccttcactcaaggttgttagaaagagctgcaagagttaacgctgaatatgttgaacaggttaccggcggtaaagtaaaaggtaaaaccggttccttaacagcattaccaattattgagactttggctggtgatgtttctgcattcgttccaacaaacgttatatctattactgatggacaaatatatttagaaacagaactatttaattctggtgtcagaccagccattaatccaggcctttcagtttcaagggttggaggctcagcacaaacaaagattatgaagaaattagcaggtggagtaagaacagctttagcccagtatcgtgaattggctgcgttctctcagtttgcatcagatctagatgatgcaacaaaacaacaacttgcaaacggcaaggcttttactgagctacttaaacaaaagcaatatgcgccgatgagtgttgcccaacaagcactcagcctatttgctgcagacagaggttatatggctgatgttgaggttgaaaaaatcttagcttttgaagaggcccttcatggttacctcacttcagaaaaaggtgagttggaagatcagataaattctactggtgattggaatgatgatattgaagctaaatttgttgagttagtagaagactttaaaaaaactcaaactttttaa

SEQ ID NO: 274051 - DNA, 1399 bp, Unknown
  Bacterial polypeptide expressing nucleotide sequence isolated from the Sargasso Sea
tatgagcagcggaatagttacacaaattattggagcggttatcgatgtcgaattcgacaaagataatattccaaaagtatatgaagcccttatggttgatgaaagcgggacaacactagaggtacaacaacaacttggtgatggtgttgtaagaactattgcaatgggagcaacagaaggtctaaaaagaggcttatctgcatcaagaactaacgcacctatttctgtacctgttggaccagaaactcttggaagaattgttgatgttcttggaaaccccattgatgaaaaagggccaattggtgaaaaatcgaaaatgcctattcatagaaaacctcctacttatactgatcaatccgcatcaagtgaagttttggaaactggcataaaagttattgacctaatgtgtcctttcgcaaaaggaggaaaaattggattatttggcggagcaggtgttggtaagacggtaaatatgatggagcttatcaataatattgctttacagcactccggtctttcagtattcgcaggtgttggagagagaacaagagagggtaacgatttctattacgaaatgcaggagtcaggagttgttaatattgacaatctgggtgagtcgaaggtggctatggtttatggacaaatgaatgagccaccgggtaacagattaagggttgctttaaccggattaacaatggctgaaagttttagagatgaaggcaaagacgttcttttatttatagataatatatatcgttataccttagcaggggttgaggtatcagcacttcttggaagaatgccttctgctgttggatatcagccgactcttgctgaagaaatgggtgcgcttcaagaaaggattacgtcaacaaagacgggatcaattacatctattcaggctgtatatgttcctgctgatgatttaaccgacccatcaccagctacaacttttgctcacttagacgcaacagttgtactttcaagacaaatctctgagttaggaatttatcctgccgtagacccacttgactctacaagtagacaacttgatccatttgtagttggcgatgaccactatgaggttgctcaaggagtccaaaagattcttcaaagatataatgagcttaaagacataattgcaatcttgggaatggatgaattgtctgaagaagacaaaggattggttgcaagagcaagaaaggcacaaagatttttatcacaaccattttttgtagctgaaatttttacaggtactccaggtaaatatgtctctcttgaagacacaattaaagcttttaaaggaatattaaatggagattatgatcatttacccgaacaggctttttatatggttggaacaattgaagaagctgttgaaaaagctaagactctataa

SEQ ID NO: 274052 - DNA, 880 bp, Unknown
  Bacterial polypeptide expressing nucleotide sequence isolated from the Sargasso Sea
atggaaataaatccttcagaagtaacaaaaatattaaaagaacaaattaaaaagtttggagataaagctgaggttacagaggttggtcaagttttatcagtaggagatggtatagcaagaatttatggattagataatgttcaagctggagaaatggtagaattctctgatggctctaaaggaatggcattaaacctagaaagcgaaaatgtaggtgttgtaatttttggtgatgataaagcagttaaagaaggtgatactgtaaaaagaactggtgcaattgttgatacaccagttggaaaagaattacttggtagagtagttgatggtttaggaaacccaattgatggaaaaggtgccctagataaaagtttaaaaagaagtagggttgaagttaaagcgcctggcataattccacgtaaatctgttagtgaaccaatgcagactggccttaaatcaattgatagtttagttccaattgggagaggacaaagagaattaattattggtgatagacaaactggtaaaacagcagttgcaattgatgctataattaaccaaaaaaaaataaacgagtctggtgatgaaaagaaaaaattatattgtatttatgttgccgtaggccaaaagagatctactgttagacagattgaaaaaacattagaagaagctggtgctatggaatatacaacaatagtagcagcaacagcatcagatgcagcgcctctacaatttttagctccttacactggatgcactatgggtgagtattttagagataatgggatgcatgccttgattatatatgatgatttatcaaaacaagctgttgcatatagacaaatgtcacttcttttaagaagacctcccggaagagaag

SEQ ID NO: 274053 - DNA, 1531 bp, Unknown
  Bacterial polypeptide expressing nucleotide sequence isolated from the Sargasso Sea
catggaaattcaaccagcagaaatatccgctattttaaagaaaaaaattaaggattttggcaaagatgctgaagtatctgagatagggcaggtattgtcagttggcgatggcattgcaagggtttatggattggataatattgaagctggtgaaatggtcgaatttcctggtgaaatcaaaggtatggcactgaatcttgaagaagataatgttggtgtcgttatttttggtgatgatactgatattaaggaaggtgatacagtaaaaagaacaggtgcaattgttgaagtacctattggaaaagagctattaggcagagtcgttgatgcgctaggtaacccaattgatgggaagggcccaattaattcatctgaaagtaaaagagtcgatattaaggctccaggtattattcctagaaaatctgttaatgaaccaatgcaaacaggattaaaagcaattgattcattgataccaattggaagaggtcaaagagagctcattattggtgacagacaaacaggtaaaacggctattgcagttgatgcaattttgaatcagaaagaagttaataaatccgataatgagtctgaaaaattatattgtatatatgttgcgattggccaaaaaagatcttcagttgcacaattagtaaaaacattagaagaaaatggagcaatggaatattcaattgtagtagcagctactgcatctgaacctgctcctttgcaatatttagcaccatttacaggttgtactatgggtgaatacttcagagataactcaatgcacgctctagttgtatatgatgatttatcaaaacaggctgttgcttatagacagatgtctctcttattaagaaggcctcctgggcgagaagcttatccaggcgatgttttttatctacattcaagattactagaaagagcagctaaattgaatgaagataatggagggggttctttaacagccctacctataattgaaacacaagcaaatgacctttctgcatatattccaacaaatgtaatctcaattactgatggtcaaatcttcttagagactgatctttttttccaaggaattagacctgctgttaatgttggtctttcagtttctagagtcggttcatctgcacaaataaaagcaatgaaacaagttgctggatcgattaaaggtgaattagcacaatatagagagatggctgcctttgcacagtttggatctgatctagatgcctctactcaaaaactcctagctagaggtgagagattaactgaacttcttaaacaaaaacaattttcaccaatatctacaaatgaacaggttgttcttctatttgccggcgtaaatggatatatggatgatattgccgtaaaccaaattggagattttgaagaaggacttcttaatcacataagaaataattacatacagatattagaaactattacatcaactaagagtcttgatgaagaaactgaagctacccttaaaagtgccgttgaagaatttactgcaagttttaattaa

SEQ ID NO: 274054 - DNA, 886 bp, Unknown
  Bacterial polypeptide expressing nucleotide sequence isolated from the Sargasso Sea
attggcaaatttaaaagaattaaggaacagaatttctagcgtatcttctactcagaagattactaaggctatgcaaatggttgcagcttctaaattgagaagagcgcaagaaaatgttgaaactgctagaccttattctgataaacttggtgatattctaaagaatttatctgcgtctttttctggccaagataatgctccagaactcttagcaggtaatggtaatgataaaagtcatttacttattatcgccacttctgaaagaggcttatgtggtggatttaatacatctatcgtgaagttagccaaagaacatattttgcaattaaaggaagagggaaaagaagtaaaactgattattataggaaaaaaaggaaaagaattactccaaagagattttggacaagagataattgatatttatgatttctctgaagttaaagatcttgggtttatcgaagcggagaaagttgcagaaaatattctgtcactatttgaagaaggaaaatttgatatttgcagcttatattttgcaaaatttgaatcagtgttaagccaagttcctgtctgtcaaaaattaattccttttgatattgaatcggaagttaatgaagaaaaagatattgagaatatctgctatgaatatgaacctgatgaggaagatatacttaaagaacttttaccaaagaatttatcggtccaaattttaagagctttactagaaaatgttgctagtgaatttggagcaagacttactgctatggataatgcaacaaggaatgcttcagatatgattgatgacctaactattacatataatagatcgcgtcaggcatccatcacatcagaattgatagaaattatttcaggtgctgaggcactataa

SEQ ID NO: 274055 - DNA, 799 bp, Unknown
  Bacterial polypeptide expressing nucleotide sequence isolated from the Sargasso Sea
atgagcggactaaacccatctgaaatttcaagtgttctcaaggacaaaatttcagggcttgatctaaaagctgaaaccaaaaacgaaggaaccatcgtcaatgtttctgatggaattatcagaatacacggaatgggcgatgttatgtatggtgagctcgtagagtttgaaaatggtgtctttggacttgcacttaacttagagcaagactctgtcggtgttgttgtacttggtgattaccttgggctaagtgaggggcaaaaagttacatgtacaggtaagatcttagaggttcctgtcggcgaggaaatgcttggtcgagttgtagacgctctaggaaatccaatcgatggaaagggtgaacttaaaacaaaacaaactgctcctattgaagtagttgcgccaggggttattgccagacaatcagttgatcaaccagtgcaaattggacttaaatcaatcgatgcaatggttccaataggaagaggccaaagagagcttattattggtgatagacaaactggaaaaacagctgtagcaattgacgcaataattaatcaaaaaggtacaggaattaaatgtatttatgtagctattggtcaaaaacaatcaacaatagccaatgtcgtagcaaaacttgaagagtatggagcaatggagcacacaattgttgtttcagcggcagcagctgatccagctgcgatgcaatacctctcagcatattcaggttgtgcaatggggaaatattttagggacacagggcaggatgcattaattgtttacgatgattgtcaaagca

SEQ ID NO: 274056 - DNA, 1537 bp, Unknown
  Bacterial polypeptide expressing nucleotide sequence isolated from the Sargasso Sea
atggaaataaatccttcagaagtaacaaaaatattaaaagaacaaataaataaatttggagataaagctgaagtttcagaagttggacaagtactttcagtgggagatggtattgctagaatatatggtttagacaatgttcaggctggtgagatggtagaattttcagatggttctaagggtatggctttaaacttagaaagtgataacgttggtgtagtaatttttggagatgatagagcagttaaagaaggtgatactgtaaaaagaactggtgcgattgtagatactccagtaggaaaagagttattggggagggttgttgatggactaggaaacccaatagatggaaaaggtgcattagacaaaggagttaaaaaaagcagagttgaagtaaaggcaccaggaattattccccgtaaatcagtaagcgaaccaatgcaaactggacttaaatctattgatagtttggtcccaattggaagaggtcaaagagaattaattattggagacagacaaacaggtaaaacagcagttgctattgatgcaattataaatcaaaagaaaataaatgagtcagatgatgagaaacaaaaattatactgtgtttatgtagcgataggacaaaaaagatcaacagttagacaaatcgaaaaaacactagaagaagctggagcaatggaatatacgactattgttgctgctacagcctcagatgcagctcctcttcaatttttagcaccttacacagggtgtgcaatgggagaatactttagagataatggaatgcatgcattaattatatatgatgatctttcaaaacaagcagttgcatatagacagatgtctcttttattaagaagacctccaggaagagaagcatatcctggagatgtattttatttacatagcagactacttgaaagagctgctaaattaagtgaagatcatggaggaggttcattgacagcacttccaataattgaaacacaaggtggagatgtttctgcatttatacctacaaatgtaatttcaattactgatggtcaaatctttttagaaacagaattatttaatcaaggaataaggccagctattaatgtaggattatcagtatctagagttggatcttcagcacaaactaaagcaatgaaaaaagtttcaggatctatgaaacttgaacttgctcaatatagagaaatggcagcatttgctcaatttggatcagatttagacgcttctacccaaaaacttctgaatagaggatctaaattaaccgaattattgaaacaaaaacaatactcacccatgactgtagctgagcaagtaatttcagtattttgtggtgttaaaggccatttggacgatgttgaacaaaaaaatattgctgagttcgaaaataaaattatagcaaaatgtaaatctgaaaaaccagaaattttagactcaataacaagctcaggtaaactcgaagaagacttagaaaaatctttaacagaagttattactgaacttaagaaaaactttaaaacttaga

SEQ ID NO: 274057 - DNA, 406 bp, Unknown
  Bacterial polypeptide expressing nucleotide sequence isolated from the Sargasso Sea
gatgccaagtttagacgatcttaaaaagagaataaaaagtgtgaaatctacacaaaaaattacaaaagcgatgaagatggtagccgcggctaaactgagaaaagctcaagaaaatgctgaaaaaggtcgaccatacagcaaaaaaatgcagaatataattcttaacttaacaagatccattagtgacccaaaaaatgctccaaaactactttctggtacaggaaacgataaaacctacctttgtgttgtcctaactgctgacagagggttatgtggcggttttaatacaaatatttgtaaacttgcaaaaactagctttaagaaaattcttaacgagcaaaaaaatttaaaaataataacagttggctctaaaggtttcgatcagattaaaagagagtacgggtaa

SEQ ID NO: 274058 - DNA, 931 bp, Unknown
  Bacterial polypeptide expressing nucleotide sequence isolated from the Sargasso Sea
aacatgatggagcttatcaacaacatagcaactgagcactcaggtttatctgttttcgcgggagtgggagaaaggactcgagaaggcaacgatttttactttgagatgcaagaatcaggagtggtaaatgttgataaacctcaagaatccaaagtagccatggtctatggccaaatgaatgaacctcctggtaacagattgcgtgttgcgctaactggcttaaccattgctgaaaaattcagagatgaaggcagggatgtgcttttatttatcgataacatttatagatatacattagcaggtgttgaggtgtctgcacttttgggtaggatgccatctgctgttggttatcagccaacacttgctgaagagatgggcgcactccaagaaagaatcacctctacaaaaacaggctctattacttcaatacaagcagtttatgttccagctgatgatttgactgatccatcaccagcaaccacctttgcccatttagatgcaacggtggtgttatctaggcaaatcgctgagcttggaatttatcctgctgttgatcctctggactcaacctcgaggcaattagatcctctggtagtgggtcaagatcattatgaagttgctcaaggcgttcaaggtgtattgcagcgctacagagaattaaaagatattatcgccatacttggtatggatgaattgtctgaggaagataaacttgcagtagcccgcgctagaaaggtggaaagatttctatcacaaccattttttgttgctgaagtctttacaggatcaccaggacaatatgtttctcttgaagatactattaaggcattcaaaggaatacttgccggtgattacgatgatcttccagaacaagcattttatatggtaggtaaaatagaggaggctgttgagaaggctaaaactctctagt

SEQ ID NO: 274059 - DNA, 1270 bp, Unknown
  Bacterial polypeptide expressing nucleotide sequence isolated from the Sargasso Sea
tatgagccaattaaacccatcagaaatctccagcgtattgaaggaaaaaattgctggccttgatctttcagcagaaagaaaaaatgaaggtattgtcgttagtgtatctgatggcattgtaagaattcatggcatgggagacgtcatgtacggagaagtaattgagtttgagaatggaactaaaggcatggccttaaacctagaacaagactcggttggagctgtggttttaggagattacctcgaaattattgaaggtcaaaaagcagtatgtactggaaaggttttagaagtaccagttggagaggcgatgctgggaagagttgtaaatactctaggtactccaatcgatggaaagggtgaaataaatgctgagggatcggcaccagttgaggttgttgcgcctggtgttattgcccgacaatcagtagatcagcctgttcaaattggtttaaaagctgttgacgcaatggttcccatagggaggggtcaaagagagttaattattggggataggcaaactggcaaaacggcggttgctatcgatgcaattattaatcaaaaaggtacaggaataaaatgtatttacgtagctattggacaaaaacagtccactgttgccaatgttgttagaaagctagaagagtatggggcaatggaacatactattgttgtatctgcaacagcagcagacccagcacctatgcaatatctttctgcatatgctggttgcacgatgggtgagtattttagagataagggtgaagatgcacttattgtttatgatgatctttcaaaacaggcagtagcatatagacaggtatcattacttctaaagaggcctcctggaagagaagcatatccaggagatgttttttatcttcattctagattgttagaaagagcagcaagagttaatgctgattatgttgagcaggttactggtgggaaagttaaaggtaagactggatcattgacagcattaccaattattgagacgttggcaggagatgtctcagcctttgttccgacgaatgtaatatcaattacagacggtcaaatttatttagaaacagaattatttaactcaggtgtgaggccggcaattaatcctggtctctccgtttcaagggtcggtggctcagctcaaacaaagataatgaaaaaattagctgggggagttagaacagctttagctcaataccgtgagttagcggccttctctcaattcgcctccgacttagatgatgcaacaaagcaacaacttgca

SEQ ID NO: 274060 - DNA, 1372 bp, Unknown
  Bacterial polypeptide expressing nucleotide sequence isolated from the Sargasso Sea
atagttgtaagtgtctcagacggtattgtaagaatccatggtatgggtgacgtcatgtatggtgaggttattgaatttgaaaatggtacaaaaggaatggcacttaacttagaacaagattctgttggtgcagttgttcttggtgattatcttgaaatcattgaaggtcaaaaagctgtttgtactggaaaagttctagaggtgcctgttggggaggctatgcttggtagagttgtaaatacattgggtgtacctattgatggtaagggtgaaattaatgctgaacactcttcaccagttgaggttgttgctcctggggttattgcacgtcagtcagtagatcaacccgttcaaattggcttaaaagctgttgatgctatggttccaataggaagaggccaaagagagctaattattggtgatagacaaactggtaaaacagctgttgcaattgacgcaatcattaatcaaaaaggtacgggtattaaatgtatctacgttgctattggtcaaaaacaatcaaccgttgctaatgttgttagaaaactagaagaatatggagctatggaacatacaattgttgtttcagcaacagctgctgatccagcacctatgcaatatttgtcagcctatgctggatgcacaatgggagaatactttagagacaagggagaagatgctctaattgtttacgacgacctttcaaaacaagccgtcgcatatagacaggtatcattgcttcttaaaagacctccaggaagagaggcatatcctggagacgtattctatcttcactcaaggttgcttgagagagctgcgagagtaaatgctgaatatgttgagcaagttaccggtggaaaagtcaaaggcaaaacaggctcattaacagcattgccgattatcgaaactttggctggagatgtttcggcttttgttccaaccaatgtaatttctattacagacggacaaatatacctggaaactgaattatttaattcaggcgtaagacccgcaattaacccaggtttatctgtatcaagggttggcggatcagcacaaacaaaaattatgaaaaaattagctggtggtgtgagaactgcgttagctcaataccgtgaattagctgctttctctcagtttgcttctgatttagacgatgctaccaaacagcaacttgcaaatggtaaagcttttacagaacttctaaaacaaaaacaatatgcgccaatgagtgttgctcaacaagcattaagtttatttgctgctgacagaggatacatggcagatgttgaggttgaaaagattcttgattttgaagaagcccttcatggatatttgacctctgaaaaaggtgatctcgaagaacagatta

SEQ ID NO: 274061 - DNA, 874 bp, Unknown
  Bacterial polypeptide expressing nucleotide sequence isolated from the Sargasso Sea
atggcaagtttagacgatctaaaaaaaagaatagcaagtgtaaaatctacacagaaaataaccaaagctatgaaaatggttgctgccgcaaagttaagaagagcacaagagagcgcagagaaaggcagaccttattcagaaaaaataaataatgttattttaaatttgtctactgggatatctgacaaagaaaatgctccaaaattattgtcaggaactggaaatgataaagtacatctttgtgttgttatgacttcagacagaggtttatgtggaggatttaattctaatataattaaaaaagcaaaaagttatttttcaaaaatcttagatgaaggtaaagagcttaaaattataactgttggttcaaaaggaaatgatcaacttagaagagtttacggtaataaaattattgaaaatatttcttttaaagagtcaaaaaatgctaattattttgatgcagataaagttggaaaaaaaataattgaaaaatttgaagccagtgaatttgatatttgtactattttttataatcaatttaaaaatgtaattactcaaattcctcaagctcaacaaataattcctcttaataatgatgttaaaaaaaatggttcggatgaaacttatgaatttgaaccagatgaagatgaaattttaaacaatttattgccaaaaaatatttcaacacaaatttttaaagcaatgttagagaattcagctagcgaacaagggtcaagaatgagtgcaatggataatgcaactcgaaacgcaggtgaaatggttgacaaacttactatcgaatataatagaagtcgtcaggcagcaattacaaaagaactaatagaaatcatatcaggagcagaaagtttataat

SEQ ID NO: 274062 - DNA, 883 bp, Unknown
  Bacterial polypeptide expressing nucleotide sequence isolated from the Sargasso Sea
atgccaaatttaaaagaattaaagaatagaatttctagtgtaaaatccactcgaaaaattacatctgcgatgaagatggtagctgcgagtaagttacgccgagctcaagaattagctgagtcatctagggtctacgcagatagcttaagttttattctttcatctttggctggaaatactaaaaatagctctgacttaccagaaatcttaactggtagagaaaattcaaaaattagtcttttaataattaactcttctgaccgtggtctatgtggaggtttcaactcaaatctttttagaaacgcaaaaaaatggattagtgatcaacaaggacaaggtaagtctgtcaaaataatgactgttggcaaaaaagcatccagtttttataaaaaaacagacttagatattgtggctagttttgaagatttaaattctaatgatagacaacttcaggtttcagaggaaataaaaaataaaattatggaactattcgaaaataatgaaatagatgaagtttctattttatttaataagtttgtttctgcgatttcacaagagcctacatatcaatcgttgatacctttaagtaatgaggaaactagtgaagatgagagtgaagccaataatgctatttttgaatttgaacctgataaaaatgaacttttagagtatctggttccaagaaattttttaacacaaatttatagaagtgttcttgaaagctctgcgtctgagcatgcagcaagaatgacttccatggacaacgcaacaagaaatgcgggagacatgattgatcggttgacactaacatataaccgaacaagacaagcattcatcacaaaagaacttatcgaaattatttctggagcagaagctgtttagg

SEQ ID NO: 274063 - DNA, 550 bp, Unknown
  Bacterial polypeptide expressing nucleotide sequence isolated from the Sargasso Sea
atgtcacaaattagaccagatgaaatatcctcaataattagagatcaattatccaattcaaaatcatcaactcaattagaagaggtaggaactgttttgcaaataggtgatggtgtagcaagaatttatgggctaactaatgctcaagcaggtgaaataatagagtttgaaaatggaaccaaaggacttgttttgaatttagaagaagataatgttggttcagtgctaatgggtgattatagcgatctaaaagaaggagattccgttaaaagaacaaaagaaatagcatcaattaaagtaggtgatggaatgtgtggtagagtagttgatactttaggtaatcccgtagatggaaagggtgcaataaaagggaaactttatgatatgccattagagagaaaagcacctggcgttatatatagagaacctgtttctgaacctcttcaaactggtataaaagcaattgattcaatgataccgataggtagaggacagagagagttaattattggtgatagacaaactggtaaaactgctgttgccattgaca

SEQ ID NO: 274064 - DNA, 895 bp, Unknown
  Bacterial polypeptide expressing nucleotide sequence isolated from the Sargasso Sea
aatgccaagtttaaaagacatcaaaacacaaattaactctgtagtatctacaaagaaaattactacggctatgaaaatggtcgcagcaagtaagttgcgtagatctcaagagaaagcagttgcagcgagaccatattcttcacgtttagaagaaatgttgtcttcattagcttcttcagcagtatccggtgaaggtatcattaaacttcttagtggtactggtaatgacaaaagttatatggttgttcctgttagtgccgatagaggtctttgtggtggttttaatagtagtattaatagagaaacttttaagttggtacaatctcttcagaaggatgggaagaacgttcaactaatgcctgttggaaaaaagagtagagatttttttatccgtgttatgaaagatcaaattgttgagagctttattgatttaaatgtttcaaataatggctacgaatcggcacagcaagtatcaaacaaacttcaagatttatattttgatggaaagtttgataaatgtattttggtattcaacaaatttaaatcagcaattactcaagaagttacacaacaacaacttattccgttagatgtatcagattcatcaaaagaagataaagaaggtaataatgcagcaaaggcaatctatgattatgagcctgatgaagaaactattttaaacgatttattgcctaaaaatgtttctattcagatttttaaagtacttttagagagtgatgctggtgagcatggagcacgaatggcagcaatggataatgctacacgaaatgctggtgagatgatagacggcttaacactaaaatataacagaacgcgacaagcgtttattactaaagaattaattgaaattatttctggagctgaatcaatttaa

SEQ ID NO: 274065 - DNA, 638 bp, Unknown
  Bacterial polypeptide expressing nucleotide sequence isolated from the Sargasso Sea
catggaaataaaaactgatcaattaacacaattacttcgagagcagatagaaaaacacgatggctcggttgatatctcagaagtaggagaagtgcttgaagtaggagacggcgttgcccgtgtttcaggccttgaaaatgtaatgagctccgaacttgttgagctaccaaatggtgtgttcgggatggcgctaaatcttgaagaagataacgtcggccttgtattatttggagaatctcgacttgtaaaagagggtgatcttgcaaaaagaacgggccgagtagttgaggtcccagttggagatgcgatgcttggtagggtagtaaatccccttgggcagccaattgatggcaagggcccaataaatacagagcactctttacccattgagagaaaggcactgggagtgatggccagatctccggttaatgaaccgcttcagaccggaatcaaagcagtcgatagtatgatcccgattggaagagggcaaagagaattaatcattggagatagacagaccggaaaaacagcagtggcaatcgatgcaatcattaatcaaaagtatacccatagtacagataatcctgtatattgtatttatgtggctattggccagaaggcatccactgtagcagcct

SEQ ID NO: 274066 - DNA, 960 bp, Unknown
  Bacterial polypeptide expressing nucleotide sequence isolated from the Sargasso Sea
gagttggaaaaactgttaccataatggagttaataaacaatatagcaaaagctcatggtggattttctgtatttgctggtgtaggagaaaggacaagagaaggtaacgatctttatcatgaaatgattgagtctggggtaattaaaacagatggcaaaggttcaaaagcagctttagtttacggccaaatgaatgaacctcctggagcccgagctagagtagcccttactggtttgacagtagcagaatattttagagataaagagggtcaagatgtacttttttttgtagataatattttcagatttactcaagcaggttcagaagtttcagctttattaggtagaattccatcagctgtaggttatcaacccactttagcaactgacatgggaaatttacaagaaagaataacatctactgacaaagggtcgatcacttctgtacaagcaatttatgttccagctgatgatttaacagatcctgctcctgctacttctttttctcacctagacgcaactaccgtcttatcaagacaaattgctgagattggaatttatccagctgttgaccctctggactcaacttctcgaatcttagatcctagaatagttggagatgagcactacagagttgcaagagatgttcaaagaattttacaggcttacaaatctttacaagatataatagctattttaggaatggatgaattatctgaagaggacaaattaactgtagcaagagctagaaaaatacaaagatttttgtctcaaccattttttgttgctgaagtatttacaggttctccgggaaaattagtagatttagattctacaatcaaaggatttgatgcaatttgcaaaggagaatttgaccatttgcccgagtccgctttttacatggttggtagcattgaagaagtcgtagaaaaagcagagaaaatgaataaaaacaattaac

SEQ ID NO: 274067 - DNA, 478 bp, Unknown
  Bacterial polypeptide expressing nucleotide sequence isolated from the Sargasso Sea
gatttaacagacccctcaccagcaacaacatttgctcatttagatgcaacagttgtgctttcaagacaaattgctgagcttggaatttacccagcggttgatccactagattcaaccagtagacagttagaccctcttgtagttggagaagagcattataatgttgcccaaggtgttcaaggcgtattacaaaaatataaagaactcaaggacatcattgccatactgggtatggatgaactttctgaagaagataagttagcagttgatagagctagaaaggttgaaagattcctttcgcaacccttcactgttgcagaggtttttactggttccccaggtaaatatgtaaaattagaggatactattaagtcatttaagggtatccttgctggagattatgacgatcttcctgagcaagccttctatatggttggaacaattgaagaagctgtagaaaaagcaaaaaccctataat

SEQ ID NO: 274068 - DNA, 1426 bp, Unknown
  Bacterial polypeptide expressing nucleotide sequence isolated from the Sargasso Sea
atggcaaaaaataaatctggaaaaattactcaggtcattggagctgtagtagacgttaaatttgatgaaaatcttcctccgatattaaatgctcttgaagtagataataacggaactaggctcgtacttgaggttgcgcagcacttaggagaaaatacagtcagatgtattgctatggatgctactgaaggtttagtgagaaatatggatgctattgatacaggagctccaataactgttcctgtaggcccagaaacattaggtagaataataaatgtagttggtgatgctattgatgaaaagaagcctattaagagtaagaaatcttatcctattcatagaccagcaccagaatttgttgagcaagctaccgaatctgaaattctagaaactggcattaaagtcgttgatttgcttgcaccatatgcaaaaggaggaaaaatcggcttatttggaggtgccggagtaggaaaaactgttcttattatggaacttataaacaacgtggccaaagctcatggtggatactcagttttcgctggagttggtgagagaactagggaaggaaatgatctttacaacgagatgattgaatccagcgtaattattccagatgggccaggatcaaaagctgcgcttgtatatggacaaatgaatgaaccaccaggtgcaagagcaagagtaggattaacaggattaacattagctgaatattttagagatgaagaaggacaagatgttttattttttgttgataatatatttaggtttacccaagcaggttctgaagtatctgcattgttaggtagaattccatcagctgttggatatcagcctacactatctacagatatgggcgctttgcaagaaaggataacaacaactacaaaaggatctattacttcagtgcaggcaatctatgttccagctgatgatttaacagaccctgctccagcaacatcttttgctcacctagatgctacaactgttttatcaaggcagatttctgagaaaggtatttaccctgctgttgaccctctagattcaacatcaagaatgctggacccaagagttgttggtgaggaacattatgaaacagctagatctgttcaatctattttacaacaatacaaggccttacaagacattattgcaattttaggtatggatgagttatctgaagaagataagttgacagttgcacgagcaagaaaaattgaaagatttttatcacaaccttttcatgttgctgaagtatttacaggctcacctggaaagcttgtatccttagcagatacaataaaggggtttaaaggtattgttaatggagaatatgatcatctaccagaggccgcattttatatggtagggacaattgaagaagctgttgagaaaggtgcaaaacttgaagcttctgcagcttagt

SEQ ID NO: 274069 - DNA, 241 bp, Unknown
  Bacterial polypeptide expressing nucleotide sequence isolated from the Sargasso Sea
aaactagttgtagcaagagctagaaaaatccagagatttttatctcaaccattctttgttgcagaagtatttactggttctccaggaaaacttgtagatcttgactcaactatcaaaggttttgatgcaatctgtaaaggtgagtatgatcacttacctgaagctgctttttatatggttggaacaattgaagaagctatagaaaaagctaagaaaatggaacaagaagctgctgcttaat

SEQ ID NO: 274070 - DNA, 1231 bp, Unknown
  Bacterial polypeptide expressing nucleotide sequence isolated from the Sargasso Sea
ttacttggtagagtagttgatggtttaggaaatccaattgatggaaaaggtgcattatttaaaagtttaaaaagaagcagggttgaagttaaagctcctggcataattccccgtaaatcagttagtgaaccaatgcagacaggtcttaaatcaattgatagtctagttccaattggaagaggacaaagagaattaattattggtgacagacaaactggtaaaacagcagttgcgattgatgctataattaaccaaaaaaaaattaatgagtctggagacgaaaagaaaaaattatattgtatttatgtagccgtaggacaaaagagatctacagttagacaaattgaaaaaacattagaagaagctggtgcaatggaatatacaacaatagttgcagcaacggcatcagatgcagcacctctccagtttttagccccatacactggatgcactatgggtgaatattttagagataatggaatgcatgctttaataatatatgacgatttatcaaaacaagctgttgcttacaggcaaatgtctctattgttaagaagacctcctggaagagaagcatatcctggtgatgtcttttatctacacagtagattacttgaaagagcagcaaaattaggtgatgaacatggtggaggctctttaacagctcttccaatcattgagactcaaggaggtgacgtttctgcatttataccaacaaacgtgatctcaattactgatggacaaatttttcttgaaactgaactttttaaccaaggtataagaccagcaattaatgttggtttatctgtatcaagagtaggatcgtctgcccagacaaaggccatgaaaaaagtttcagggtcgatgaagttagaattagcccaatatagagaaatggctgcgtttgcacagtttggttcagacctcgatgcatctactcaaaaattacttaacagaggttcaaaattaactgaactactaaaacaaaatcaatattcaccaatgacagttgcagaacaagttatttctgtattttgtggagtaagaggacaccttgacgatattgaacaaaaagatattgcaagtttcgagaataaaattattgaaaaatgtaaagctgaaaagccagatataattgagtcaattacagcctcaggaaaacttgaagatgacaaagaaaaagaattgagtgaaattatcattcaacttaagaaagattttaattcataaa

SEQ ID NO: 274071 - DNA, 877 bp, Unknown
  Bacterial polypeptide expressing nucleotide sequence isolated from the Sargasso Sea
atggctagtttagacgatctaaaaaaaagaatatcaagtgttaagtctactcagaaaattactaaggctatgaaaatggttgctgctgcaaaactgagaagagcccaagagagtgccgagaaaggtagaccgtactctgataaaatgaataatattattttaaatttatcaaatggtatctcagacattgaaaatgctccaaaacttttatcaggtaccggtgaggataaagtacatttgtgtgttgttatgacatcagacagaggtctttgtggtggttttaatacaaatattattaaaaaagctaaacaatattttcaaaaagttttagatgaaggaaaaactttaaaaattattacggtaggaactaaaggttatgaccaattaaaacgcctttatggtgataatattatagatagaatatcttttaaggaatctaaaaatgtaaattactttgatgcagataaagttggtaagatagtaatagaaaaatttgaaaaaaaagaatttgatgtatgcacaattttttataaccaatttaaaaatgtaattactcaaataccacaagaacaacaaataatccctttaaatacgtctgaaaaagatgaaaattcattagaagataattatgaatttgaacctgaagaagatgaaatattgagcaacttgttacctaaaaatatttcaactcagatttttaaagcgatgttagagaattcagctagcgaacaaggttcaagaatgagtgcaatggataatgcaaccagaaacgcaggtgaaatggttgacaaacttactattgagtataatagaagtcgtcaggcagcgattactaaagaaaaaatagaaataatttcaggagcagaaagtttataat

SEQ ID NO: 274072 - DNA, 1048 bp, Unknown
  Bacterial polypeptide expressing nucleotide sequence isolated from the Sargasso Sea
tatgaaaattagagcagaagaaatcagtaaaataattcagcagcaagttgaaaattttgacaaaaccgcaaccaaatcagaggtaggaactgtattggaagttggagatggaatagctcgtgtctttggactggataatgtccaggcaggggaactcgttgaatttccgggcagtgtcactggcatggctctaaaccttcaggaagacaatgtaggagtggtaatttttggagatgaccgtggaatcaaggaaggagacgaggttaagcgtaccgagagaattgccgaaattcctgtgggagaaggcttacttggaagagttgtggatccgctaggcaatcccattgacggcaaaggaccaattgaatcctcagacactagacttattgaaacaattgccccaggaattgttgccagaaaatcagtacatcagccaatgcagaccggacttaaagcaattgactcaatggtcccaataggtcgtggacagcgagaattgataataggagatagacagacaggaaaaaccgcaattgcaatagacactatcattaaccaaaaaggtggtgatgtgatctgcatctatgttggaatcggccagaagcgctcaaccatggcccagattgttcaaagactggaaaacgaaggcgcgatggaacatacaatcgtcgtttcctcaaccgcttctgagcctgcgccactacagtttctagctccgtattccggagtaagcatcggtgaatatttccgagataagggtggacacgtactatgtgtttatgatgatctttcaaaacaggctgtagcctatcgacagctttcacttctactgcgccgtccaccaggacgggaagcatatccaggtgatgttttttatctgcatagtcgcttgcttgaaagatcctgtaaactaagtgatgaacttggcgcaggttcactgacagcactaccgattattgaaacccaagctggagatgtttcagcatacattcccacaaaagtgatttcaattactgatggacagatttttctgagtacagacctttca

SEQ ID NO: 274073 - DNA, 1234 bp, Unknown
  Bacterial polypeptide expressing nucleotide sequence isolated from the Sargasso Sea
aatggaaataaatccttcagaagttacaaaaatactaaaagaacaaattaaaaaatttggtgaaaagactgaagttactgaagttggccaagtattatctgttggagacggtattgctagaatttatggcttagataatgttcaggctggtgagatggttgagtttgctgatggctcaaaaggcatggctcttaatttggaaagtgaaaatgttggtgtggtaatttttggtgacgacagaaatattaaagaaggtgatgttgttaaaagaacaggaaatattgttgatacaccagttggaaaagaacttttaggtagggtagttgatggcttaggaaatccaattgatggaaaaggagcgctggataaaggtgttaaaaaaacaagggtcgaggttaaagcccctggtattattcctagacaatcagttagtgaaccaatgcaaaccggattaaaatcaattgatagtttagtgccaattggaagaggtcaaagggaactaattattggagatagacagacaggtaaaactgctgttgctgtagatgcaattataaatcaaaaaaaaattaatgagacaggcgatgagaaacaaaaattatattgtatctatgttgcagttggtcaaaaaagatcaacggttagacaaattcaaaaaactttagaagaggcaggcgcaatggaatacacaactattgttgctgctacagcatcagactcagcgccattacaatttttagctccctatacaggttgtgcaatgggcgaatattttagagataatgggatgcacgcgttaattatttatgacgatctatcaaaacaagctgttgcatatagacagatgtctctacttttaagaagacctccgggaagggaagcttaccccggagatgtattttacttacacagcagattattagaaagagcagcaaaacttagcgaggaacatggtggaggatcactaacagcactaccaataattgaaacacaaggaggagatgtttctgcttttattccaacaaatgtaatttcaattacagatggccaaatattcttagaaacagaactttttaaccaaggtatcaggccagcaattaatgttggactatccgtatcgagggttggatcttcagcacaaacaaaagctatgaaaaaagtatcaggttcaatgaaacttgagttagcgcaatatagggaaatggctgcttttgcacaattggatcagacttag

SEQ ID NO: 274074 - DNA, 763 bp, Unknown
  Bacterial polypeptide expressing nucleotide sequence isolated from the Sargasso Sea
ggagctagagccagagtaggattaacaggattaacagtagcagaatattttagagataaagaaggacaagacgtactattttttgtagataatatttttagatttactcaagcaggttcagaagtttcagcattattgggaagaataccatctgcagttggttaccaaccaactttggcaacagatatgggaaatttacaagagagaattacaacaacagggaaaggatcaattacatcggtacaagctatttatgttcccgcagatgacttgactgatccagctcccgcaacttctttttcacatttagatgcaacaactgtgttatcgagacaaattgcagaattaggtatctatcctgcggttgatccgttggactctacctctagaattttagatcctagaatagttggtgaagagcattatagagtagcaagagaagttcaaaagattttacaaacttataaatctctacaagatattatagccatacttggaatggatgaactttcagaggaagacaaattgactgtagcaagagctagaaaaatacaaagatttctttcgcaaccattttttgttgccgaagtatttacgggcactccaggaaagttagttaatttagattctacaataaaaagttttgatgccatatgtaaaggcgagtacgatcatttaccagaagctgcattttatatggtgggatcaattgaggaagctatagcgaaagctgaaaaaatggcaaaagaagccgctgcataaa

SEQ ID NO: 274075 - DNA, 448 bp, Unknown
  Bacterial polypeptide expressing nucleotide sequence isolated from the Sargasso Sea
atgggcgccacctccgccttggtgttctcgtgcatgggcgcggcgtacggcacggcgaaatcgggggtcggcatcgcgagcatgggggtcatgcgtcccgagttggtgatgaaatccatcgttccggtggtcatggcgggcgtgctcgggatttacggactcatcatcgccgtcgtcatctccacgaacatcgatccgacgtcgtacacgctgtatcaagggtacgcgcatctcgggagtgggttggcgtgtggattgagcggattgagcgcggggatgtgcatcggcatcgtcggcgacgctggggtgcgcgcgaacgcgcaacaaccgaaactcttcgtgggggtgattttgatcttaatcttcgccgaggcgttggcgctgtacgggatgatcgtggggatcattttatcgagctcggcgtcggcggcgacgggcggagggtgag

SEQ ID NO: 274076 - DNA, 1519 bp, Unknown
  Bacterial polypeptide expressing nucleotide sequence isolated from the Sargasso Sea
atggtatctatacgccctgatgaaatcagttcaatcttaaaacaacaaataactgattatgaccaatctgtaagtgttagcaatgtaggaactgttctgcaaatcggtgatggcattgcaagaatatatggcttagatcaggtcatggctggtgagttgttggaatttgaggatggtaccgaaggtatagctttgaaccttgaagatgataatgttggtgctgttttaatgggtgaggcacttggtgtccaagaaggaagtaacgttaagtcaacaggtaaaatcgcatctgttccagttggtgaggcaatgcaggggagagttgttaaccctttaggacaaccaatagatgggaaaggggaaatcccgactagtgatactagattgatcgaagaaatggctcctggaataatcaagagaagatcagtacatgaaccaatgcaaacaggtatcacatctattgatgcaatgattcctgtgggaagaggtcaaagagaattaattattggcgatagacaaactggaaaatctgctattgctattgatacaataatcaaccaaaaaggtcaagacgtagtttgtgtttatgtggctattggtcagaagtcagcatctgtagcaaatgtggttgaggttttaagagaaaaaggagctcttgattacaccattgttgttagtgcaggagcctctgaagccgcagctctacaatacttagcaccttatactggtgctgcaattgctgagcactttatgtaccaaggcaaagcaacactagttatttatgatgatttaacaaaacaagctcaggcttatagacaaatgtctcttctcttgagaagaccaccaggaagagaagcttatcctggggatgttttttattgtcatagcagattacttgaaagggcagcaaaattatctgatgatatgggcggcggttcaatgacagctcttccaattattgaaactcaggcaggtgacgtttctgcttatattcccactaatgttatttcaattacagatggacaaatattcttgagtgcagatttgtttaactcaggattaagaccagctattaatgttggaatttctgttagccgcgtgggaggagctgcccaaacaaaggcaattaaaaaaattgctggaactcttaaattagaattagctcaatttgatgaattagcagcattctctcaattcgcttctgatcttgatgaggctactcaacaacaacttgaaagagggaaaagattaagagagttactaaaacaagcacaattctcaccattaaatcttgctgaacaagttgctgttgtttatgcaggtgttaagggcctgattgatgaagttccagtggaagatgtaactaaatttgctgctgaactaagagaatatcttaagttaaacaaagcagaatttattgaggagattcttaaagagaagaaattgaacgatagtttagaagcaacactcaaagaggtgattaatgaagttaaatcttcaatgcttgccacagtttaaa

SEQ ID NO: 274077 - DNA, 727 bp, Unknown
  Bacterial polypeptide expressing nucleotide sequence isolated from the Sargasso Sea
atgttctttaattccttgctaacaaattttgcagcattagaagttggccaacatctttattggcaaattggaaatatcagacttcatgggcaggtatttttgacatcttggattttattaggggctttattagtttttatttctttaggaactaaaaaaatggaaaatgatcctagaggcctccaaaacttgcttgagtttctctgggattacataagagatcttgcgaggactcaaataggtgaaaaagtttatagagattggatgccatttataggtactttatttttatttgtatttgttagtaattggggaggagctttaattccttggagattgattaagttaccaagtggagagttgggagcaccaactgcagatatcaatacaacaatagccttggctttattggtttcactttcttatttctatgctggtttaagtaataagggttggagatacttcgaatactatgttcacccaactccgattatgcttccttttaaaattttagaggactttactaaacctttatcactctctttcaggctatttggaaatattttggctgatgaacttgttgttggcgttttagtctttttagttccactaattctaccaatacctgttatgttcctaggattatttactagtgcaattcaggcattgattttcgcaactttagcggcctactacattggagaagctgttgaagaacatcattagc

SEQ ID NO: 274078 - DNA, 628 bp, Unknown
  Bacterial polypeptide expressing nucleotide sequence isolated from the Sargasso Sea
tatgtcctcttacgcggacgcgcttcgcgaggtgagcgccgcgcgcgaggaagtcccgggccgaagaggatatccgggttacatgtacaccgatttagccaccatttacgagcgcgccgggcgcatcaagggccgaaaaggttccatcacgcagttgcccattctcaccatgcccaacgacgacatcacgcacccgattccggatttgactggatacatcaccgagggccagatttacatcgatcgacaattgcacaaccgtcaaatctacccgccgatcaacgtcttaccttcgcttagtcgtctcatgaagtcagcgatcggcgaaggaatgacgcgtcgagaccacggcgaggtctccaaccaactgtacgccaactacgccatcggcaaagacaccctcgccatgaaggctgtcgtcggcgaggaggccctcagctcggacgatttgctctacctcgaattcttggataagtttgagcgcaaattcatcaatcagggcaacgagggtcgtaacgtgtacgacgcgttggacctcgcgtggtcgctgcttcgaatcttccctcgcgagctcttaaagcgcattccggccaagacgctcgatcggcactacgatcgcgtcgcgtga

SEQ ID NO: 274079 - DNA, 877 bp, Unknown
  Bacterial polypeptide expressing nucleotide sequence isolated from the Sargasso Sea
atggctagtctagacgatttaaaaaaaagaatttcaagtgttaagtctacacagaaaattactaaggctatgaaaatggttgcagcagcaaaattaagaagagcccaagaaaatgccgaaaagggaagaccttattctgaaaaaatgaataatattattcttaatctctcaagtggaatatctgacaaagaaaatgcaccaaaacttcttactggaacaggcgaagcaaaaactcacctatgtgttgttttgacatcggacagaggtttatgtggaggctttaacacaaatataattaaaaaagcaaagcaatattttcaaaaaatattaaaagaaaataaaatattaaaaattataactgttggatctaaaggttatgatcagttaaaaagacaatataaagaaaatataattgaaaaaatttcatttaaagattctaaaaatattaattattttgatgcagataaagttggaaaaattataattgatagatttgaaaaaaaagaatttgatgtatgtgcaattttttataatcagtttaaaaatgttattactcaaataccacaagaacaacaaattattcctttaaaatctaacgaagaaaaagaaactagttccaatgatagttatgagtttgaaccagaagaagatgagattttgagtaatttgttacccaaaaatatttctacacagatttttaaggcaatgttggagaattcagctagcgaacaaggttcaagaatgagtgctatggataatgcaactagaaatgcaggagaaatggttgataagcttacaattcagtataacagaagtcgtcaagctgcaatcactaaagaactaattgaaataatatcaggagcagaaagtttataat

SEQ ID NO: 274080 - DNA, 644 bp, Unknown
  Bacterial polypeptide expressing nucleotide sequence isolated from the Sargasso Sea
tgttttttatttacatagtagacttttagaaagagcagctaaacttagtgatgaacatggaggaggctctttaacggcactcccatttatggaaacacaaggcggtgatgtatctgcttttattccaaccaatgttatttcaattacagatggacaaatatttctagaaacaaacttgtttaaccaggggattagaccagctattaacgttggtttatctgtatctagagttggatcttccgctcaaacaaaagcaatgaaaaaggtttctggttcaatgaaattagaattggcccaatatagagaaatggctgcatttgctcaattcggatcggatttagatgcctcaactcaaaaattattaaatagaggttcaaagttaactgagcttttgaaacaaaaacaatattcgccaatgactgttgcagaacaagtaatttcagttttttgtggtgttaagggatatttggacgacttagatctaaaagatatatcttcgtttgaaaaaaaaattattgaaaaatgtaaatctgaaaaaccagaaattttggaagcgatatctaaatctggaaaattagaagaagataccgaaaatttattagtggaaactattaaagaattaaaacaaaactttaactcttaaa

SEQ ID NO: 274081 - DNA, 811 bp, Unknown
  Bacterial polypeptide expressing nucleotide sequence isolated from the Sargasso Sea
aatggacataaatccttcagaaattacaaaaatattaaaagaacaaataaaaaatttaggagacaaaacagaagtttctgaaattggcaaagtgctatcagtcggtgatggtattgccagagtatatgggcttgacaatgtccaagcaggagaaatggtagaatttaatgatggatcaaaaggaatggctttgaatttagaaagtgataacgttggtgtcgtaatttttggagacgataaagcaattaaagaaggcgatacagtaaaaagaactggagcaatagttgacgcacctgttggaaaagaacttttaggaagagttgttgatggtctaggaaatccaatagatggtaaagaaagtcttaaaaaaggtattaaacgaaaaagagttgaagtaaaagctccgggaataattccacgaaagtctgtaagcgaaccaatgcaaacaggtttaaaagctattgatagtctaataccaattggaagaggtcaacgtgaattaattattggtgatagacaaaccggtaaaactgcagttgctatcgatacaataattaaccaaaaaaaaattaatgagtccaatgatgaaaaaaagaaactttattgtatatacgtagctataggtcaaaagagatctacggttgctcaaattgtaaagacattacaagatgcaggtgcaatggagtatacaattattgtatctgcaacagcttctgatcctgcacctctgcaatttttagcaccttataccggttgtacttttggagaatattttcgagataacggtatgcatgcattaataatatatgat

SEQ ID NO: 274082 - DNA, 1579 bp, Unknown
  Bacterial polypeptide expressing nucleotide sequence isolated from the Sargasso Sea
tatggcaaatattaagcccgctgaaatatcagcaattataagaaatcaattaaccggatcaaaagttggtccatcactagatgaggttggtacagttttacaagttggagatggtattgcaagagtatacggtctttcaaacgttcaatatggtgaacttgttgagttcgacaatggaatggaaggaatagttctaaaccttgaagaagataatgtaggagtagttttgctgggcccgtcaaaagaaattaaagaaggtgatactgttaaaagaacaaacagaattgcctcaattaatgtaggtgaaggtgttgttggaagggttgtaaatacactaggacagccaatagatggaaaaggcaaaattgaaggtaaattgtatgaaatgccacttgaaagaaaagctcctggtgttatatacaggcaaccagttaatgagcctcttcaaacaggtataaaatctattgacgctatgattccaattggaagaggtcaaagagaattagtaattggagatagacagactggaaagacaacagtttgtattgacacaattttaaatcaaaaagaattttttgatgcaggtgagcctgtttattgtatatatgttgctataggtcaaaaagcatcaactgttgctgcgattgctaaagttttagaagaaaaaggtgctcttgattacactacaattgttgcggctaatgcctctgatccagcaccaatgcaggtatatgctccgtttgctggcgcatctattggtgaattttttagagacactggaagaccagctctaattatatatgatgacttatctaaacaagctgtagcatacagagaagtgtcattattgttaagaagaccacctggccgtgaggcttatcctggagacgtattttatttacattcaagattattagaaagagctgcaaaggtcataaatgatgacggtattgcaaaaaacatgaacgacttgcctgaagagctaaagccaattgttaaaggtggtggatcattaacgtcacttcctattattgaaacacaggctggagacgtttcagcatatattccaactaatgttatttctattactgatggtcaaatattcttagagtcagatttattcaattctggtgtgcgccctgcgattaatgttggtatttctgtatcacgggttggaggatcagctcaaataaaatctatgaaaaaagttgcaggaactttgaagttagatcaagcacaatttagagagttagaagcctttgctaagttcggatcagatttagatgctgttactttaggagttattgaaaaaggtaaaaggaatgtagaaattttaaaacaagctcaaaatgatccattcaaggttgaagaccaagtttctataatttacctaggatctaaagatttattaaaagctgtacccgtggaaaaagtaaaagattttgaaaagaaattcatcgagttactcaatttaaaacacaagaaaattttaagtcaaattaaggaaggtaaattaactgatgagataacttcaacattggaaaaagttgcatcggagttaacatcatcttacgaataa

SEQ ID NO: 274083 - DNA, 862 bp, Unknown
  Bacterial polypeptide expressing nucleotide sequence isolated from the Sargasso Sea
aatggcaaacttaaaagaaataaggaatagaatttcatctgttacttcaaccatgaagataacaagtgcaattaaaatggtttcagctgcaaaattaaaaaaagcacaagacgcaataaccgcgatgaagccatactctgaaaaattaaatgagcttatgtctagtttttcaggagttatttctagttcaaatatttcatatttatcaactgttagacctgttaaaaaagttttagttgttgccattgcatccaatagaggtttttgcggtgcatttaactctaatattgttaagcaagcaaaagcactcaaatcacaagaggaattttcaaacactcagtttagttttattgttattggcaaaaaagccaatgatgttctgtcaaaaactgagaatataattcaaaataatgatgaaatttttgatgatttatcttatgaaaattctagtctaattgttgatcaaataatcgatgattttgctgatgaaaaatatgatcatgttctattgatctacaatagttttaaaaatgctgcaaatcaaatagtaaagtcggagcagtttttaccaattgttaatgattctgaaactgaaacgtttcagaactatatttttgaaccatcaatggaacagattgttagtgaacttgttccaaagtctttaaagattcaactttttaaagctttaagagattcctttgcaagtgagcatggtgctagaatgacagctatgcataaggctaccgataatgccactgaactaaaagaagaactcgtactcacatacaacaaagctaggcaagcagctattacaaatgaaattttggaaattgtttcaggagcagaagctctaaaaggctaa

SEQ ID NO: 274084 - DNA, 817 bp, Unknown
  Bacterial polypeptide expressing nucleotide sequence isolated from the Sargasso Sea
atggataacttaaacccatcagaaattagcaaaattattaaagatagaataaataatttagaggtgtcctcagacgaatctaacgaaggaactattgtattcctgtccgatggaatcgcaagagtgcatggcttaagcgaagccatgtatggggaattgattgagtttcaaggcggtatttttggtatggcccttaacttagaaagagattcagtcggtgtcgtcatatttggtgattacaaacagttagcagaaggcgatacagcaaaatgtaccgggaagattttagaggttccagtaggaccagaacttgtgggtagagtagttgatgctcttggaaacccaattgacggtaaaggcccaattgacagcaagcttacttcgccggtagaaaaagtggcacctggggtcatgactagaaaacctgtagatgaaccagttcaaattggccttaaagctgttgatagcatggtgccaattggcagaggccagagagagcttattattggagacagacaaacaggtaaaacagcaatcgctttagatgcgatcattaatcagaagggcacaggtgtaacctgtgtatacgttgcagtgggacaaaaacaatcttctattgcagcagtagttagaaaactagaagaatttggtgcaatggagcacaccattgtcgttgctgcaggcgcagctgaccctgcaccaatgcaatttttagcaccatactctggctgctcaatgggagaatacttcagagataaaggcgaagacgctctaattatttatgatgacttgtcaaagcaagcagtcgcttatcgtc

SEQ ID NO: 274085 - DNA, 1135 bp, Unknown
  Bacterial polypeptide expressing nucleotide sequence isolated from the Sargasso Sea
gtagatgaacaaggtccagtaaatacaaaagatactgctccaattcatagagctgctccaaaactaactgacttggaaactaagccaaaagtttttgaaactgggattaaagttatcgaccttttagcgccttacagacaaggaggaaaagttggattattcggaggtgctggtgttgggaaaacagttctaattcaagaattaattaataatattgccaaggaacatggaggtgtttctgtttttggcggcgttggggaaagaacaagagaaggtaatgatttatatgaagaatttaaagaatcaggcgttatcaatgcagatgatttaactcaatcaaaagttgcattatgttttggacaaatgaatgagccacctggtgcaagaatgagagtaggattatcagcacttacaatggccgaacattttagagatgtaaataaacaagatgttcttctttttgttgataacatttttagattcgttcaagctggttctgaagtatctgcattacttggaagaatgccttcagctgttggatatcaaccaactcttggaactgatgttggtgaattgcaagaaagaattacatctacattagaaggatcaataacatctattcaggctgtttatgttcctgctgatgacctaacagacccagctccagctacaacctttgcccatttagatgctactaccgtgcttgctagggctcttgcagctaagggaatttatccagcagttgatccattagactcaacaagcactatgctacaaccatcagtcgttggcgatgagcattacaaaacagccagagctgttcaatcaactttacaaagatacaaagaacttcaagatattattgcaattcttggtttagatgagctttctgaagaagatagattaacagtcgacagggcaagaaaaatcgaaaaattcttgtcacagcctttctttgtagcagaaatatttacaggaatgtctggtaaatatgtaaaattagatgaaaccatcgctggttttaatatgattttgtcaggtgaattggatgatttaccagaacaggcgttttacttagttggtaatattgatgaagtgaaagcaaaggctgaaaaaataaaatcagaaaaataaa

SEQ ID NO: 274086 - DNA, 1537 bp, Unknown
  Bacterial polypeptide expressing nucleotide sequence isolated from the Sargasso Sea
aatggaaataaatccttcagaagttacaaaaatattaaaagaacaaattaaaaattttggggaaaaagcagaaatttctgaggttggacaggtattgtctgtaggtgatggtatagcaagaatttatggccttgataatgttcaagcaggagaaatggttgaattttctgatggatcgaaaggaatggctttaaatctagaaagtgaaaatgttggagttgtaatttttggtgacgaccggaatattaaagaaggtgatgttgtaaaaagaactggaagcattgtagatacccctgttggaaaagagttgttaggtagagtagtagatggattaggaaatccaattgacgggaaaggtgctttggacaaaggcattaaaaaaagtagagttgaagttaaggcaccaggaataattccaagacaatctgttagcgaaccaatgcaaacaggtctaaaatcaattgatagtcttgtaccaattggaagaggtcaacgtgagttaattattggagatcgtcagacaggtaaaactgctgtagcagttgatacaattatcaatcaaaaaaaaattaatgagtcgggcgatgaaaaacaaaaactttattgtatttatgttgccgttggtcaaaaacgatcaactgtaagacaaattcaaaaaactttggaagaagctggagcgatggagtatacaactatagtcgcggcaacagcatctgactcagctccacttcaatttttagctccttacactggatgtgcaatgggagaatattttagagataatggaatgcatgctctgattatttatgatgatttatctaagcaagcggttgcttaccgacaaatgtcactgatcttaagaagaccaccaggtagagaggcatacccaggtgatgtattttatcttcatagtagattactggaaagggctgctaaattaagcgatgatcacggcggaggttcgttaacagctcttccgatcattgaaactcaaggcggagacgtttctgcttatattccaactaatgtaatttcaattactgatggacaaattttcttagaaactgagttatttaaccaaggtataagaccagcaattaatgttggtctctctgtttctagggttggatcagctgcgcaaacaaaagctatgaaaaaagtatcaggatcaatgaaactcgaattagctcaatatagagaaatggcagcttttgctcaatttggatcagatttagatgcctcaactcaacagcttttgaatagaggatcaaaattaactgagttattaaaacagaaacaatactcaccaatgactgttgctgaacaggttatatctgtattttgtggagtaaaaggatatttagatgatattgatttaaaagatattgctgaatttgaaaataagatcattgagagatgtaaatctgataaaccagaattaatcgagtctattcagagttcaggtaaattagaagaggcaacagaaaaaagcttaattgatgtaattactaatcttaagaaaaattttaaatcttga

SEQ ID NO: 274087 - DNA, 576 bp, Unknown
  Bacterial polypeptide expressing nucleotide sequence isolated from the Sargasso Sea
tatggctagtttagacgatctaaaaaaaagaataacaagtgtaaaatctacacaaaaaattacaaaagctatgaaaatggtagctgcagctaaactaaaaagggctcaagatagtgcagaaaaaggaaggccatattctgaaaaaatgaataatataattttaaatttatctagcggcatctctgacaaagaaacagctcctaaattactatctggatcagggaaagagcaagttcatctttgtgttgtactgacttcagatagaggtttatgtggtggttttaatgcgaatataattaaaaaagctaaaagttattttgctaaattgaataaagagggcaaggaattgaagattattactgttggttctaaaggtaacgatcagttaaaaagagtatatggaaataaaattattgagaacatttcttttaaaaattcaaaaaacgcaaattactttgatgcagaaaaagttggaaaaattataattgaaaagtttcaaaaagaagaatttgatatttgtaccattttttacaatcaatttaaaaacgtaataacccaaatacctcaggctcaaca

SEQ ID NO: 274088 - DNA, 925 bp, Unknown
  Bacterial polypeptide expressing nucleotide sequence isolated from the Sargasso Sea
atgtcaaaaaatattggtaaagtttcaaaagtaattggtgcagttgtggatgttgaattttcagcaaaaggtagtagtcttccagagatatatgactctttagaaattactagagaagatggctctatattaattttagaagttcaatctcatattggagaaaatattgtaagaacaatttcaatggattcaacagatgggttgagcaggggaactgaagctgttgccacaggaagcccaattaaaatgccaataggaaaagaagtatatggtaggttatttaatgttgttggagacccgatagatggaatggaagttttgccaaaaaaagataaagatggaatgtctattcatagaaaggcgccagattttgatcaactctcaacctctactgaagttttgtttacaggaataaaagtaattgatcttattgagccatatgctaaaggaggtaaaattggtctttttggaggagcaggagttggtaaaacagtattaatacaagagttaattaataatattgcaaagggacatgggggtctttcagtttttgccggagttggagagagaacaagagaagggaatgaccttttaagagaaatgattgaatctgggattataaattatggggacaagttccttaaatctatggaaaaaggagaatgggatttaagtaaggttgacaaaaaagcgctattagattcaaaagcaacatttgtctttggccaaatgaatgaacctcctggtgcaagagctagagttgcactttcaggacttacagttgcagagtactttagagatggaggggctgacggccaaggtaaggatgttctattctttgttgataatatattcaggtttacacaggctggttctgaggtttctgctcttcttgggagaatgccttcagcagtagggtatcaac

SEQ ID NO: 274089 - DNA, 640 bp, Unknown
  Bacterial polypeptide expressing nucleotide sequence isolated from the Sargasso Sea
tttactcaagctggatcagaagtttcagctcttctcggaagaatgccatcagctgtaggttaccaaccaacattatccacagaaatgggtgatttgcaagaaagaattacttcaacaaagaaaggctctattacatctgttcaagctatttatgttccagcagatgatttaacagatccagcacctgcaactgcatttgcacatttagatgcaacttctgttttagaaagaaaaattgctgagctgggtatctatccagctattgatccattgacatcaacatcaagaatcttagacccaagagttattggagatagacactacaatgtagctagatcagttcaggcaactcttcagcaatacaaagatttgcaagatatcattgcaatcttaggtatggatgaattatcagatgaagataagttggtagtttcaagagcaagaaaaatgcagaaatttatgtctcaaccattcttcgtagccgaacagtttactggaattgaaggtagatatgttaaacttgaagactcaattgctggctttgaagcaatattaaatggtgaagttgatgatttgcctgaaaattctttttcatatgtaggttccattgacgaagctattgagaaaggcaaaaagtgag

SEQ ID NO: 274090 - DNA, 1376 bp, Unknown
  Bacterial polypeptide expressing nucleotide sequence isolated from the Sargasso Sea
aatggaaataaatccttcagaagtaacaaaaatattaaaagaacaaataagtaaatttggaaataaagctgaagtctcagaagttggacaagtactttcagtaggagatggtattgctagaatttatggtttggataatgttcaagctggagaaatggtagaattctcagatggatctaaaggtatggccttaaatttagaaagtgataacgttggagtagtaatttttggagacgacagagctgtcaaagaaggagatacagttaaaagaactggagcaattgtagatactccagtaggtaaagagctattaggtagagtagttgatgggttaggaaatcctatagatggaaaaggtgctttagataaaagtgttaaaagaagtagagttgaagtaaaagcaccaggaattattcctcgtaaatcagtaagtgaaccaatgcaaacaggattgaaatctattgatagtttagttccaattggaagaggtcaaagggaattaattattggagatagacaaacaggaaaaacagcggttgctattgatgcaataattaaccaaaaaaaaataaatgaatctgatgatgaaaagcaaaaattatactgtatttatgtggccataggtcaaaaaagatctactgttagacaaatcgaaaaaactttagaagaggccggagctatggaatatacaactattgttgctgctacagcttcagatgcagcgcctcttcaatttttagctccttacactgggtgtacaatgggagaatattttagagataacggaatgcatgcattaattatttatgatgatctttcaaaacaagcagttgcttatagacagatgtctcttttattaagaaggcctccgggaagagaagcatatcctggagatgtattttacttacatagcagattacttgaaagagcggctaaattgagcgatgatcatggaggaggatcgttgacagcacttccaataattgaaacacaaggtggagatgtttctgcatttattcctacaaatgtaatttcaattacagatggccaaatatttttggaaacagaattatttaatcagggtataagaccagctattaatgtaggattatcagtatctagagttggatcttcagcacaaacaaaagcaatgaaaaaagtttctggatctatgaaacttgaactggctcaatatagagaaatggcagcttttgctcagtttggatcggatttggatgcttctactcagaaacttttaaacagaggatctaaattaaccgaattgttgaaacaaaaacaatactcacctatgactgtggccgaacaggtaatttcagtattttgtggtgttaaaggttatttggatgatgtcgaac

SEQ ID NO: 274091 - DNA, 1543 bp, Unknown
  Bacterial polypeptide expressing nucleotide sequence isolated from the Sargasso Sea
gatggcaaccaaagcatctgaaataagtgaattaattaaacaacaaatcaaaaacttcgaacacgaagccaaatcatccgatgttggaacggtcgtttctgtaaccgacggaattacaaggatacacgggctaaacgacgcacagtacggagagatgatagagtttccaggagatacttttggcttggcgcttaacctggaacaagactctgtcggggctgttgttttaggcgactatacccacatttctgaaggcgcagaagtaaaaacaacaaacagaattctagaagttccggtaggggaaggcttgttgggaagagtcgtagactcccttgggacaccacttgacggaaaaggagccattgagacagatcaaacagcaccaatagaaaaagttgcaccaggcgttatctctcgacaatcagttgatcaaccggttcaaaccggactaaaatcgattgacgcaatggtgccaattggtaggggccaacgagagttaattattggcgatagacaaacgggaaaaacagccgttgctgttgacacgataattaaccaaaaaggaacaggcatcaaatgcatctatgtggcggttggtcagaaaaactcatctgttgctaatgtggttaagaagctagaagaggaaggtgcattagagcatacaatcattgttaatgctgcagcatccgattcagctgcgatgcaatacatcgccccatattcagggtgcgcgatgggagaatacttccgagacaagggcgaagacgcactaattatttttgatgatttaaccaaacaagcttgggcataccgacaggtttcgttgctgctaaagagaccacctggaagagaggcttatcctggggatgtcttttatcttcactcaagactgctagagagagcagcaagagtgaatgcagagtatgttgaaaaagagacgaatggaaaagtgaagggccaaaccgggtctttaacagcactaccaataattgaaacacaagctggcgacgtatctgcctttgtgccaactaatgtgatttcgatcacagacgggcagatatatctagagagcgacctctttaatgctggtatcaggccggcaataaatgctgggctatcggtttctagggtaggtggagcggcccagacaaaaatcattaaaaaactgggaggcggagtaaggttggcgttagcgcagtatcgtgagcttgcagcatttgcccaatttgcatccgatcttgatgaggccaccaggaaacaactagaaagagggcagagagtaacagagctaatgaaacagaagcaatacgcaccacttactgttgcagaaatggctgtatctttatacgccgcaaatgaaggctatttagatgatgtgcctgccgataaaattgtcgacttcgaatcagcacttcacgcaagctttactgatggagcctcggatctcgctcaaaagatcaatgatacaggcgactacaacgaagaaatcgaagcagaccttaaaaagttcgttgaggactttaaatcaacaggcacctactag

SEQ ID NO: 274092 - DNA, 1378 bp, Unknown
  Bacterial polypeptide expressing nucleotide sequence isolated from the Sargasso Sea
aatgagcacaggaaatatcgtacaagtaatcggagcggtagtagacgttgagtttccaaaagaagcaataccaagcgtatatgacgcactcacccttaaagacggagaactagtttttgaggttcagcagcaacttggtgacggcattgtcagaaccattgcaatgggagcaagtgagggcctaaaaagaggccttgaggttgaaaacactggagccccaattagtgtgcctgtaggacaggaaacactaggaagggttctagatgttctaggaaacccgatagatgaaaaaggccctgtcggcgccaaagcaaatagaccaattcacgcaaaagcacctacgtttgaagagcagtctacagaagcggacgtattggaaacagggattaaggttatcgaccttctctgcccatttgcaaaaggaggaaaggttggattgtttggcggcgctggcgtcggaaaaacagttaccgttatggaattgattagaaacattgcagcagaacacgacggcttttccgtttttgctggagttggagaaagaacaagagaagggaatgacttttatcatgaaatgatggaatcaaacgtcctagacaaggtcgcacttgtttatggacaaatgaatgagccaccaggaaacagacttagggttgcattgaccggactgacaattgcagaaaacttcagagatgaaggaagggatgtcttaatgtttatcgataatatttatagatacactcttgctggcacagaagtatcggcactgcttggtagaatgccatctgcggttggatatcagcccaacctagcagaagaaatgggcgttctccaagaaagaatcacgtcaacaaaaacaggctcaatcacctcaattcaagctgtttatgtgccagcagatgacttgactgacccatcaccagcaaccacttttgctcatcttgatgcaactgttgtattagctagatcaatcgcagagcttggaatatacccagctgttgatccgcttgattcaaatagccgtcaactagatccaggcatcgtaggccaagagcactacgatactgcaagggctgttcaacaagttttacaaagatataaggagctacaagacattattgcaattcttggaatggatgaactatccgaagaagataagctcactgtccaaagagcaagaaaaattcaacgattcttgtctcaaccattttttgttgcagaagtctttacaggatctccagggcagtacgtttcattgagagattccattaaggctttccaaggaatagttgctggcgattatgacgaccttccagaacaggcattctatatggttggaacaattgaagaagccgttgaaaaagcaaaaagcatgtag

SEQ ID NO: 274093 - DNA, 862 bp, Unknown
  Bacterial polypeptide expressing nucleotide sequence isolated from the Sargasso Sea
aatggccaacgaaaaagaaatacgaacaaagattgggagcgttaaaaacacccaaaaaatcaccaaggccatggaaatggtcgcagcgagtaaaatgcgccgaacacaagagaccatgaaaaaagcattgccctatgcagacaaaataagagcagtgatcggccatatttataacgcaaaccctgattacaaacacccatttcttgaaaagagagatgtcaaaaccgcaggctatattgtggtcagctcggacagaggtctttgcggaggattaaatgtaaatatgtttaggggcctcatagcagagctgaaagagaataaaaacaatcaggttgaatcaaaactttgtcttgtaggcgcaaaggcggtccaattttttaggtctgtagacgttgatgttgtagcagcagcatcccatctcggcgaagaaccacaggttgaagatttggttggttcgattaaaaccatgttagatgaatacattgatgggaagattgaccaactctttatcgtgcacaacgattttgtgaacacgatgacacaaaaaccagaaatcaaaacacttctcccaatagaccctgaagacagcgatcaaatgcaagaacactgggactatatttatgagccagactcaaaagagcttttggactatatattgatgagatatatcgagtcacaagtctatcgagcggtagttgaaaatgtagcatgtgaaatggcagccaaaatggtggccatgaaaagcgctacagacaatgcaggaaaattaatagaccagcttgagcttgattataacaaagcaagacaggcggcaatcacacaagaaatttcagaaatagttggcggcgcagctgctgtttaa

SEQ ID NO: 274094 - DNA, 1186 bp, Unknown
  Bacterial polypeptide expressing nucleotide sequence isolated from the Sargasso Sea
attggaatgtaaaaatggtgacaacagactagttttagaggtagctcaacacttaggtgaaaccactgttagaacaattgcaatggatgctactgaaggactaaaaagaggtgatgaagttattaatactaatgctcctattcaagttccagttggacctgaaacgcttggaagaattataaatgtaattggtgaaccaatagatgaaagaggtgaggttaagactaaagaaagttggccaattcatagagctgcacctgaatttaatgaccaatcaacagaaactgaaatacttgtaacaggtattaaagttattgatttgcttgcaccttatgcaaaaggtggaaagattggattatttggtggagcaggagtaggaaaaacagttttaattatggaattaattaataacgttgcaaaagctcatggtggtttttcagttttcgcgggagttggagagagaactagagaaggaaatgacctttatcatgaaatgattgaatctggagtaattaaaaaagaaggagctggttcaaaagctgctctagtttatggacagatgaatgaacctcctggagcaagagcaagagttgcacttacagggttaactgtagctgaatactttagagatcaggaaggtcaggacgtacttttcttcgtagataatatttttagatttactcaggcaggatcagaggtttcagctttgttaggaagaattccatctgctgttggatatcaaccgacattagctactgacatgggtaacctacaagaaagaattacgactacaaacaaagggtcaattacatctgtacaagcaatttatgtacctgctgatgatttaacagatcctgctccagcgacatcgtttgctcacttagatgcaacgactgtactttcaagacaaattgcagaaattggtatttatcctgcagtagatccacttgattctacatcaagaattttggatccaagaattgttggagatgagcattatagagtagcaagagatgttcaaagaatactacaatcatataaatcactacaagatattatagctattcttggtatggatgagttatctgaagaagataaactagttgtagcaagagctagaaaaatccagagatttttatctcaacccattctttgttgcagaaagtatttactgggtctccaggaa

SEQ ID NO: 274095 - DNA, 874 bp, Unknown
  Bacterial polypeptide expressing nucleotide sequence isolated from the Sargasso Sea
atggcaagtttagacgacctaaaaaaaagaatagctagtgtaaagtctacacaaaaaattactaaagctatgaaaatggttgcagcagctaaattaagaagagctcaagaaagtgctgaaaagggaaggccttattctgaaaaaatgaataatgttattttgaatttatcaaatggtatatctgataaagaaaatgcaccaaagttattgtcaggtactggtcaagaaaaaactcacctttgtgtggtgatgacttctgatagaggtttatgtggtggatttaattctaatattattaaaaaagctaaaagttattttgcaaaaattttagatgaaggtaaagaacttaaaattattacagtaggctcaaagggaaatgatcagctaaaaagagtttatggtgacaaaataattgaaaatatttctttcaaagagtctaaaaatgcaaattattttgatgctgacaaagttgggaaaatggtaattgaaaaattcgaagcaggtgaatttgatgtttgtacaattttttacaaccaatttaaaaatgtaattactcaaattcctcaagcacagcaaattatacctttaaataatgagggagaagaaagtagctcagaagaaagttacgaatttgaaccagatgaagatgaaattttaagcaatttattgccaaagaatatttctacgcaaatatttaaagcaatgttagagaattcagctagcgagcaagggtctagaatgagtgcaatggataatgcaacccgaaacgcaggtgaaatggttgacaaacttactatcgaatataatagaagtcgtcaggcagcaattacaaaagaactaatagaaatcatatcaggagcagaaagtttataat

SEQ ID NO: 274096 - DNA, 360 bp, Unknown
  Bacterial polypeptide expressing nucleotide sequence isolated from the Sargasso Sea
tagagctagcacaatacagagaaatggcagcttttgctcaatttggatctgatttagatgcatctacacagcaacttttgaatagaggctctaagctaactgaacttttaaaacaaaaacaatattcacccatgactgttgcagaacaagttatttcagtattttgtggagtaaaaggttatctggatgatattgatttaaaagacgttgctgaatttgagagcaagattattgaaaaatgtaaatcagataagcctgaaattatagagtcaattttaagttcaggaaaacttgaggaagataaagaaaaattacttgttgaggtaatcactcaattaaaaggaaattttaaatcttaat

SEQ ID NO: 274097 - DNA, 1138 bp, Unknown
  Bacterial polypeptide expressing nucleotide sequence isolated from the Sargasso Sea
aatgagaaaaggaaaaattacacaaattattggtgcagttgtcgatgtaaaatttgaaggtgagttacctgaaattttaacggcattagaatgtaaaaatggtgataacagattagttttagaggttgcacaacatttaggtgaaacaagtgtgaggactattgcaatggatgcgactgagggattaaaaagaggcgatgaagttgtagacactggtgcaccgatccaagtgccagtaggacctgagactttgggaagaattataaatgtaattggagatccaatcgatgaaaaaggctctgtaaaaactaaagagacctggccaattcacaggccggctccagtgtttaatgaccaatctactgaaacagaaattctagtaacaggtataaaggttattgatctactagctccatatgcaaaaggcggaaagataggattatttggaggagcaggtgttggaaaaacagttttgattatggaacttattaataacgttgcaaaagctcatggtggcttttctgtttttgcgggtgttggagagagaacaagagaagggaatgacctttatcatgaaatgatagactcaggagtaattaagcctgatggagatggttctaaagctgcattagtatatggacaaatgaatgagcccccaggtgcaagggctagagttgcgctaacaggtctaactgtagcggagtattttagagatcaagaaggccaagatgtattattttttgttgataacatttttagatttacgcaagcggggtccgaagtttcagcattattgggacggataccctcagctgtgggataccagcctactttagcaacagatatgggaaacttacaagaaagaataacaacaactaataaaggatcaattacatcggtccaagctatttacgtacctgcagacgatttaacagatcctgcgccagcaacctcgttttcacacttagatgctactactgtattatctagacaaatagcagaattaggaatttatccagctgttgatccgttagactccacttcaaggattcttgatcccagaatagtaggagatgaacattatagagtagctagagaagttcaaaagttttacaaacttacaaatctctttcagaca

SEQ ID NO: 274098 - DNA, 775 bp, Unknown
  Bacterial polypeptide expressing nucleotide sequence isolated from the Sargasso Sea
gctcaggacagtgctgaaaagggaagaccttattctgaaaaaatgaataaaatcattttaaatttatctgaaaatatttcagataaagaaaatgcaccaaaattacttaccggtactgggtcagaaaaagtacatttatgtattatattaacttcagatagaggcttatgtggtggatttaactcaaatattattaaaaaggccaagagtttctttgaaaagattacaaaagaaggaaaaacacttaaaataattacagtaggctcaaaaggttacgatcaactcaaacgtctatataaagataagataattgaaaaaatttcatttaaagaatcaaaaaatacaaactattttgatgcagaaaaagtaggcaacatgattatagaactatttttaaaaaatgaatttgatgtgtgtacaattttttacaataagtttaaaaatgtgatcactcaaataccacaagagcagcaaataataccactcaagtcatcagagccagataactcatcatctgagagtaattatgaatttgagccagaggaagacgaaattttaagcaatcttttaccaaagaacatttcaactcaaatcttcaaagcaatgctagaaaattcagcaagtgagcaaggttcgagaatgagtgctatggataatgctactcgaaatgctggcgagatggttgataaattgacaattgaatataatagaagccgtcaagccgctataactaaggaactaatagaaataatatcaggagcagaaagtttataat

SEQ ID NO: 274099 - DNA, 1462 bp, Unknown
  Bacterial polypeptide expressing nucleotide sequence isolated from the Sargasso Sea
aatggtagcaactccatcaacttcagcaccagcaaaaggtgtagtacgtcaagtaattggtccagttctagatgtagaattcccagctggtaaattaccaaaaattttgaatgctttaagaattgaagccaagaatccagcagggcaagacatagcgctgaccgcagaggttcaacaattacttggggatcacagagtaagggctgttgccatgagtggcacagatggccttgtaagaggcatggaggcgactgacacaggtgctccaatatcagttcctgtaggagaggcgactttagggagaatatttaacgtattaggagagccagtagatgaacaaggtccagtaaatacttcagataccgcgccaattcatagatcagcccctaaattaactgatttagagactaagcctaaagttttcgaaactggaattaaagtcatcgacttattagccccttataggcaaggtggaaaagttggtttatttggaggagctggggtaggtaaaacagtactaatacaagagttaattaataatattgctaaggagcatggtggcgtatcagtttttggaggagttggtgaaagaacaagagaagggaatgatttgtacgaagaatttaaggagtcaggtgtcatcaatgcagatgatttatctcaatctaaagttgcgttgtgcttcggccaaatgaatgagccccctggtgcaagaatgagagttggcttatcggcattaactatggccgaacattttagagatgtaaacaagcaagatgtgcttctttttgtagataatatatttagatttgtacaagctggttctgaagtctctgctttgttaggacgaatgccttctgcagttgggtatcaaccaactctaggaactgatgttggagcattacaagaaagaattacatcaactttagagggttccattacatcaattcaagcagtatatgttccagcggatgatttaactgatcctgctcccgctacaacattcgcacacttagatgctacaaccgttcttgctagaggtcttgctgcaaagggtatttatccagcagttgaccctttagattcaaccagcacgatgcttcaaccatcagtagttggtgatgaacattacaagacagcacgtgcggttcaatcaaccttacaaaggtacaaagagctccaggatattatcgcgattcttggattagatgaattatctgaagaagatagattgacagtaagcagagcaagaaaaattgaaaaattcttatctcagcctttcttcgtagcagaaatcttcacaggaatgtctggtaaatatgtcaaactagaagatacaattgctggttttaatatgatattagctggtgaactggatgatttgcccgaacaggctttttacttggtaggtaatatcgatgaagtaaaagcaaaggcagaaaaaataaaagaagaaaaataa

SEQ ID NO: 274100 - DNA, 808 bp, Unknown
  Bacterial polypeptide expressing nucleotide sequence isolated from the Sargasso Sea
atgagcaacggaacagttacacaaattatcggagcggttatcgatgtagagtttgataaagataacattccaaaagtttacgaagcgcttatggttgatgagagtggtacaacccttgaagttcagcagcaattgggtgacggtgtggttagaactattgctatgggagccactgaaggtctaaaaagaggacttactgcctcaagaactaatgctccaatttcagttccagtaggaccagaaacattgggtagaattgtcgatgttttaggtaatcctatcgatgagaagggaccaattggtgaaaaatcaaaaatgccaattcacagaaaacctccttcatatacagatcagtcagcatctaatgaggtccttgaaaccggcattaaagttattgatcttatgtgtccatttgctaaaggtggaaaaattggtttatttggtggagcaggtgttggtaaaacagtaaatatgatggagcttataaataatattgcgcttcaacattcaggtctttctgtttttgctggtgttggcgaaagaacgagagaaggaaatgacttttattatgaaatgcaagaatcaggagttgtaaatattgataatctaggcgaatcaaaagttgcgatggtttacggacaaatgaatgagccgccaggaaatagattgagagttgctttaactggattaactatggctgaaagcttcagagatgagggtaaagatgttttattatttattgataatatttatcgttataccttagcaggtgttgaggtgtctgctcttttaggcagaatgccatctg

SEQ ID NO: 274101 - DNA, 235 bp, Unknown
  Bacterial polypeptide expressing nucleotide sequence isolated from the Sargasso Sea
gacgatagtggcacgggctagaaaaatacagagatttttgtctcagccatttttcgttggcgaagtgtttactggacgagaaggcagatatgttccaattaaggaaacagttagaggattcaaagagatcttagagggcaagcatgataatttacctgagcaggctctatacatggtaggaacaattgatgaagctgtagaaaacgctgagaaaatgaaatcggagaaaaactaa

SEQ ID NO: 274102 - DNA, 1240 bp, Unknown
  Bacterial polypeptide expressing nucleotide sequence isolated from the Sargasso Sea
atcggagctgtaattgatgtgcagttcgaaggtgatctacctgaaattttaacagctttagaagttgataatggcggaaataaactgatattagaagttgctcagcatttaggtgaaaatagtgtgagaactatagctatggacagtactgaaggtttaaaaagaggcgacccagttcaaaatactggagcccctataagtgttcctgtcggcccagaaactttaggtagaataataaatgttataggtcaaccaattgaccaaaaaggcgaagtaaaaacaaaagaaagatggccaatacatagagaagccccaaaatttacagaccagtcaaccgagacagaaattttagaaacaggaataaaagttatcgaccttttggcaccatactcaaaaggtggaaaaataggtttatttggtggagcaggagtagggaaaacagttatcataatggaattaattaataacatagcgaaagcccatggtggattttcagtatttgcgggagtaggagaaagaacaagggaaggtaatgatttatatcacgagatgattgagtctggagttattaaaccagatggaaaaggatcaaaagctgctcttgtatatggacaaatgaacgagcctccaggcgcgcgagcaagagtagggctaacaggattaacagttgcagaatattttagagataaagaaggacaagatgtattattttttgtagataatatttttagatttactcaagcaggatcagaggtttcggcattattaggaaggataccatctgctgttggataccagccaactttggctacggatatgggaaatttacaggagagaattactactacaggaaaaggttcaattacgtcagttcaggcaatatatgttccagctgacgacttaacagatccagcgccggcaacatcattttctcacttggatgcaacaactgttctttctagacaaattgctgaacttggaatttaccccgcagtagatccactcgactctacgtcaagaattttagatccaagaattgttggtgaagagcattatcgagtagcaagacaggtacaaaaaattttacaaacttataaatctctccaagatataattgctatacttggtatggacgagctttctgaggaagataaattaacagtggctcgagcaagaaaaatacaaagatttctatcacaacctttttttgttgcagaagtatttacaggaacccctggaa

SEQ ID NO: 274103 - DNA, 1183 bp, Unknown
  Bacterial polypeptide expressing nucleotide sequence isolated from the Sargasso Sea
aaatttaccagctcaaatcttaagaaaaagagttgaagtaaaagcaccaggaattattccgcgacaatcagtaaatgaaccaatgcaaaccggtcttaaagcaatagatagtttgataccaatagggcgaggtcaaagagaacttataataggagatagacaaactggaaaaactgcagtggctgttgacacaataattaatcaaaaagctataaatgagtctgaagatgaaaagaaaaaactttattgtgtttatgtagctataggtcaaaagagatctacagtagcacaaattgttaaaacattagaggacgctggtgcaatgaaatatacgacggttgtgtcagcaaccgcgtctgactctgcaccacttcaatttttagctccatatactggctgcacaattggagagtattttagagataatggtatgcatgcacttattatttatgatgatctttcaaaacaagcagttgcttatcgtcaaatgtcattactattaagaagacctccgggcagagaagcatatcctggtgatgtattttatttacatagcagacttttagagagagctgcaaaattgaatgaaaaaaatggtggaggatctttaacagctttacctatcatagagacacaagctggcgatgtatctgcctatataccgacaaatgttatttctattacagacggtcaaatatttcttgaaacagaattatttaaccaaggtataaggccagcagtaaatgttggattgtcagtttcaagagttggttcagctgcacaaacaaaggctatgaaaaaggttgcaggatccataaaattagaattagctcaatacagagaaatggctgctttcgcacagtttggttcagatttggatgtttcaactcaaaagctccttaatagaggttcaaaacttacagaattattaaaacaaaatcagtattcccctcttacagttgcagaacaagtagtaacaatttttacaggtgtaagcgggtatcttgatgatgttgaacttaataggattaaaactttcgaaacagaattgttagataaagtcaaaaatgatcagcctgatattttagaaaaaattaatacatcaggaaaattagaagacgatgttaaaaaaaaattaatagaattaatcgagggacttaagcaaaggagtaacaatgcctag

SEQ ID NO: 274104 - DNA, 443 bp, Unknown
  Bacterial polypeptide expressing nucleotide sequence isolated from the Sargasso Sea
aatgcctagtttagatgacttgaaaaaaaggataaaaagtgtgaaatctacgcaaaaaattaccaaggccatgaaaatggtagctgctgcgaaacttaaaaaagctcaagaaaacgctgaaaaaggcaggccttatagtgaaaaattacaaaacataattttaaatcttactagatcattatcagatagctctaatgctccaaaattactaggcggcaatggtaaagacaaaacctatttgtgtgttgtaatgacagctgacagaggtttatgcggtggttttaactctaatatttgcaaactagcaaaaaaaaattttaaaaaattcttaaaagatggaaaagaaattaaaattattactgttggaagtaaaggtcatgatcaaatcaaaacagaatttgggaaatatataatcgaaaaaaaaagctttaaagaaaaaaaac

SEQ ID NO: 274105 - DNA, 1180 bp, Unknown
  Bacterial polypeptide expressing nucleotide sequence isolated from the Sargasso Sea
agccccggaaactctaggtagaattatgaatgttgttggagagccagttgacgaaagaggcgacattggaacaagtaaatcttatcctattcatagactagcgccagagtttgttgatcaatcaacagaaactgaagttctagtaacaggaattaaagtagttgatctactagcaccttatgcaagaggtggtaaaattggcttatttggtggagctggagtcggtaagacagttttaattatggaattaattaacaacattgcaaaagctcatggagggtattctgtatttgctggtgtaggtgaaagaactcgtgagggtaatgacttgtaccatgaaatgattgagtcaggaattattgacctaaaaggtaaggactcaaaagttgctcttgtttatggtcagatgaacgaaccaccaggagcaagagctagagttgctctatcaggactaacccaagcagaatattttagagacgaagaaggacaggatgttttattctttgtagataatatctttagatttactcaagctggttctgaagtttcagctctcttaggacgtattccatctgcagttggatatcaaccaacacttgcaactgatatgggtgccttgcaagagcgaattacaactacaaaaaaaggatcaatcacatcagttcaggcaatttatgtacctgcggatgacttaacggatcctgcacctgctacatccttttcacacttggatgcaacaacagttctaaatagagccatttctgaaaaaggaatatatccagcagttgatccattagattctacttcaagaattttagatccacaagttgttggtgatgaccactacagagtagctagagaagtacagagagttttacaaacatataaaagtcttcaagatattattgctattttaggaatggatgaactctcagaggaagataaactaacagttgcgagagcaagaaaaatagaaaagtttttgagccaaccattttttgttgcagaagttttcactggatcaccaggtaaatatgttgatcttgaagacactattaagagttttgatggactggtaaaaggagaatatgatcatatgccagaagcagcattttatatggtaggcggcatagatgaagcaattgaaaaagctaaaaaattagaagctgaagcagcataa

SEQ ID NO: 274106 - DNA, 877 bp, Unknown
  Bacterial polypeptide expressing nucleotide sequence isolated from the Sargasso Sea
aatggccagtttagacgatttaaaaaaaagaatttcaagtgttaagtctacacaaaaaataacaaaggctatgaaaatggttgctgcagcaaaattaagaagagcacaagaaaacgcagagagaggaagaccatactcggaaaaaatgaacaatattattcttaatctttctagctcagtatcagataaagaaaacgctccaaaacttttacagggaactggacaagagaaaacccatttatgtgtagtattgacttctgatagaggtctttgtggtggatttaactcaaatattataaagaaagcaaagttattttttcagaaaatatcaaatgaaaacaaatcactgaaaattattacagttgggtcaaaaggttatgatcaattaaaaagacaatataaaaacaatattattgagaaattatcttttaaagattcaaaaaatattaattattttgatgcaaataaagtaggaaaaataataatagaaaaatttgaaaaagaagaatttgatgtttgtactattttttataatcaatttaaaaatgtaataactcaaattccacaagaacaacaaattatacctttaaaaactgaaaacgaaaaggatcaaactaataatgaaagttatgagtttgagcctgaagaagatgaaattttgagtaatctactaccaaaaaatatttctacgcagatttttaaagcaatgttagaaaattcagctagcgaacaaggttctagaatgagtgctatggataatgctactagaaacgcaggtgaaatggttgataagcttactattgagtacaatagaagccgtcaagcagcaattacaaaagaactaatcgaaattatatcaggagcagaaagtttataa

SEQ ID NO: 274107 - DNA, 876 bp, Unknown
  Bacterial polypeptide expressing nucleotide sequence isolated from the Sargasso Sea
tgtaggaccagaaactttaggtagaattgttaatgtaattggcgaacctattgatgaaaaaggagaagtaaaaactaaagaaagttggcctattcatagatctgcacctgaatttaatgatcaatctacagaaacagaaattttagttacaggcattaaggtggttgacttattagctccttatgcaaagggaggtaaaattggtttattcggtggagctggagtaggtaaaacagtactaatcatggaattaattaataacgttgcaaaagcacatggtggattttcagtttttgctggtgttggagaaagaactagagaaggaaatgacctttatcatgaaatgatagagtcgggagtaattaaaccagaagggaccggatctaaagcggcactagtttatggacaaatgaatgaacctcctggagcaagagctagagttgcgctatctggattaacggtcgcagaatattttagagatcaagaaggacaagatgtacttttttttgttgataatattttcagatttactcaagccgggtctgaagtttctgctttgctaggaagaattccttctgcagtaggatatcaaccaacattggcaaccgatatgggaaatcttcaagagagaattacaacaactaacaaaggatctattacatctgttcaggcaatatatgttcctgctgatgacttaactgatcctgctccagcaacatcattttcgcacttagacgcaacaacagtgttatcaaggcaaatagctgaaattgggatttatccagctgtagaccctttagattccacttctagaattttagatcctagaattgtaggtgatgaacattatagagttgctagggaagttcagaaagt

SEQ ID NO: 274108 - DNA, 1417 bp, Unknown
  Bacterial polypeptide expressing nucleotide sequence isolated from the Sargasso Sea
tatgagaaaaggaaaaattacacagataatcggagcagtagtagatgttaaatttgatggggagttgcctgagattttaactgcattagaatgtaataattctggcaatagacttgttttagaagttgcacaacacttaggagagtcaagtgttagaacgattgccatggatgcaactgaaggattaaaaagaggagacgaagttatagatactggttctccaattaaagttcctgtaggaccagaaacattaggaagaattgttaacgttataggtgaacctattgatgaaaaaggtgaagttaaaactaaagaaagttgggctattcacagagcggcaccagagtttaatgaccaatcgaccgaaacagaaattctagtaactggaattaaagtagtagatctgttagcgccttatgcaaaaggtggtaaaattggtttgtttggtggtgcgggagtaggaaaaacagtaattattatggaattaattaataacattgcaaaagcacatggaggcttttcagtatttgctggggttggagaaagaactagagaaggaaatgatctttatcatgaaatgatagagtcgggagttattaaacctgaaggacctggatcaaaagctgcattagtttatggccaaatgaatgaaccgcctggagctagatcaagagttgctcttacaggattaacagttgcagaatatttcagagatcaagaaggtcaagacgtactttttttcgtagataatatttttcgatttactcaagcaggctctgaggtatcagctttattaggtagaattccatcagcagttggttatcaacctactttagcaactgatatgggaaatttacaagaaagaattactacgacaaacaaaggatctattacatcggtacaagcaatttatgttcctgctgacgatttgacagacccagcaccagcaacatcatttgctcacttagatgcaactactgtattatcaaggcagattgcagaacttggaatttatccagctgttgatcctttagattcaacttctagaattttagatcctagaattgtaggtgatgaacattatagagttgcaagagaagttcaaaaaattcttcaaacatataaatctttgcaagacatcatagcaattttaggtatggatgaattatcagaagaagataaattaattgttgcaagagcaagaaaaattcaaagattcttatcacaaccttttttcgtagcggaagtttttacgggttcgccaggaaaactagtagatttagagtcaacaattaaaggatttgatgcaatttgtaagggtgaatatgatcatttaccagaagctgctttttatatggttggtacaatagaagaagcaattgaaaaagctgagaagatggctaaagaagttgcataa

SEQ ID NO: 274109 - DNA, 877 bp, Unknown
  Bacterial polypeptide expressing nucleotide sequence isolated from the Sargasso Sea
tatggctagtttagatgatttaaaaaaaagaatttctagtgttaaatctacgcagaaaattactaaagctatgaaaatggttgcagctgcaaagctaagaaaagctcaagaaaatgctgaaaaaggaagaccttattctaaaaaaatgaataacattattcttaatctttcaagtggaatatctgataaagagaatgcaccaaaacttctttctggaactggagaagataaaattcacctatgtgtagttatgacatcagacagaggcttgtgtggaggttttaatacaaatattactaaaaaagcaaaacaatattttcaaaaaatattaaaagaaaataaagtattaaagattataactgttgggtcaaaaggttatgatcaattaaaaagacaatataaggaaaatatagttgaaaaaatttcatttaaagattcaaaaaatattaattattttgatgcagataaagttggaaaaattataattgatagatttgaaaaaaaagaatttgatgtatgtacaattttttataatcaatttaaaaatgttattactcaaataccacaggaacaacaaattatacctttaaaaactaatgaagaaaaagaaactaactcagacagtagttatgagtttgaaccagaagaagatgaaattttgagtaacttattacctaaaaatatttctacacagatttttaaagcaatgttggagaattcagctagcgaacaaggttcaagaatgagtgccatggataatgcaactcgaaatgcaggggaaatggttgataaacttacaattcagtataatagaagtcgtcaagctgcaattactaaagaactaatcgaaataatatcgggagcagaaagtttataa

SEQ ID NO: 274110 - DNA, 481 bp, Unknown
  Bacterial polypeptide expressing nucleotide sequence isolated from the Sargasso Sea
ttctttcacagatttatttaatcagggaattagaccagcaattaacgttggtttgtctgtatctagagttggatcttcagctcaaacaaaagctatgaaaaaagtttctggttcaatgaaattggaattagcacaatatagagaaatggctgcgtttgcccaatttggatcagatttagatgcctcaactcaaaaattattaaatagaggttcaaaattgacagaacttctgaaacaaaaacaatattcaccaatgacagttgcagaacaagttatttcagtattttgcggagttaaaggatatttagatgatttagaacttaaggacatatcttcttttgaaaacaaaattattgaaaaatgtaaatctgaaaaaccagaaattttggactcgatttctaaatctggaaaattagaggaagatactgaaaatttattagtagaaactattaaagaattaaaacaaaactttaactcttaa

SEQ ID NO: 274111 - DNA, 400 bp, Unknown
  Bacterial polypeptide expressing nucleotide sequence isolated from the Sargasso Sea
atggctaacgcaaaaggtaaaatcacccaggtgatcggtgccgtagtagatgtgcaatttgaagaccatcttccagaaattttaaacgctttaactactgataataatggtaaaaaattagttttggaagttgctcaacacttaggtgagaatacagttcgcaccatagctatggacgcatctgaaggtttggtcagaggccaagaagttattgatactgagggtccaatatccgtgcctgttggaaacgcgactcttgggagaattcttaacgtagttggcgaacctgttgatgagcagggtccggtaaaggctaaagaggcaagagcaatacaccaaccagctccggaatttaatgaacagtctactgaatcagaagttttggtaacgggcatcaaag

SEQ ID NO: 274112 - DNA, 433 bp, Unknown
  Bacterial polypeptide expressing nucleotide sequence isolated from the Sargasso Sea
ggcctctcagtttcccgtgtaggctcatctgctcaaacagactctatgaaatctgtggctggacctgttaaactttcattggcgcaatacagggaaatggcagcttttgctcagtttggatcggatttagatgcggcaacacaacagctgttgaacagaggagctaggctaactgaattaatgaaacagccgcaatactctcctttaacaaatgccgaaattgtttgtttgatatatgctggcaccaatggatacctagataaaatagatgtctcacaggtagggcgctttgaagctggcttactatcgcatttaaggggcaagcacttagacttgttagactatattacacaagatgacccaaaaattaagggcgaagctgcagagaaaattagcgctgttttggatgaattttcagcagattttgcatagg

SEQ ID NO: 274113 - DNA, 1420 bp, Unknown
  Bacterial polypeptide expressing nucleotide sequence isolated from the Sargasso Sea
tatgagaaaaggaaaaataacacaaattattggagcggtagtagacgtaaaatttgatggagaactaccagaaattttaactgcactagagtgtaaaaatggcggcaatagacttgttttagaagttgctcaacacttaggtgagtctagcgtgagaacaattgcaatggatgcaacggaaggtctaaaaagaggagacgaagttactgatacaggtgccccaataaaagttcctgtaggacccgaaacacttggaagaattataaatgtcattggagaaccgattgatgaaaagggtgatgtaaagtcatctgaaaaatggcctattcatagagctgccccagaatttaatgatcagtcaactgaaacagaagttcttgtaactggaattaaagttatcgatcttctagctccttatgccaaagggggaaaaattggattatttggaggagctggtgtaggtaaaacagttcttattatggaattgattaataacgtagcaaaagcacatggtggtttttcagtatttgctggcgtaggtgaaagaactagagaaggtaatgatctttatcatgaaatgatagagtcaggagtaattaaaccaaatgaagctggatcaaaagctgctttagtttatggacaaatgaacgaacctccaggagcaagagcaagggttgctttaacgggattaacagttgcagagtattttagagaccaagaaggtcaagacgtacttttctttgttgataatatttttagattcactcaagcaggctcggaagtgtcagctcttttaggtagaattccttcagctgttggttaccagcctacacttgcaaccgatatgggtaacttgcaagagagaatcacaacaacaaataaaggttcaattacttctgtgcaggccatatatgttcctgcagacgatttaacagacccagcaccagcaacttcatttgcacacttagatgcaacgactgtactatctagacaaattgctgaaattggaatttatcctgctgtagaccctttagactcaacatctagaattttagatcctagaatagttggagatgagcactatagagtagcaagagaagtacaaaaagttttacaaacctataaatcattacaggatataattgcaattttaggtatggacgaattatctgaggaagataagcttacagttgcaagagctagaaaaattcaaagatttttatctcaaccattctttgttgcagaggtttttacgggatcaccaggcaaattagtagatttagagtctaccatcaaagggtttgatgcaatttgtaaaggggaatatgatcatttacctgaagcagctttttatatggtcggaacaattgaagaagctattgaaaaagcagagaaaatggcaaaagaagcagcagcttaa

SEQ ID NO: 274114 - DNA, 1546 bp, Unknown
  Bacterial polypeptide expressing nucleotide sequence isolated from the Sargasso Sea
gatgcaacaactgaatccatcagaaatcagtgagattataaagcagaggatcgacaagttagatgtgtcggtgcaggcaaaaaacgagggcacaatagtcagtgtgatggatgggatcatccgaattcatggcttagcagatgttatgtatggcgaaatgattgaattcgagggtggcatttatggcatggcgctaaacttagagcgagattctgtaggagccgtggtattaggcgactatcttcagctcaaggaaggccagacatgcaaatgcaccgggcgaattcttgaggtgcctgtcggtcccgagcttgaaggccgagtagttgatgctcttggaaagcctattgatggtaagggccctatagatgcaaagctcacagacccaatcgaaaaggttgcccccggtgtaatagccagacagggtgtggaccagccagtgcagacaggattgaagtcaattgactcaatgactcctatagggagggggcagcgagagttaattatcggcgacagagaggttggtaagacggcggtagccattgacaccatcatcaaccaaaaaggtaaaggggttaaatgtgtttatgtggcggttgggcagaaggctagctcaatctcaaatgtggtccaaaaacttgaagagcatggtgcaatggaatacaccgtggttgtttcagcctctgcatctgatcccgcttcaatgcaatttatcgcaccgtattcgggatgctcgatgggcgaatactatagagataggggcgaggacgctttgatcatctatgatgatctaactaaacaagcatgggcctatcgccagatttcacttttgctcagaaggcctccaggaagagaggcatatccgggagatgtcttttacttacactcacgtcttctggagcgcgcagcgagagtaagcgctaactacgtagagaagttcactgaaggtaaggttaagggcaaaaccgggtctctgacagcattgcctgttattgaaactcaggcgggcgacgtatctgcattcgttcctacgaacgtaatttccattactgatggccagatatttttagaaaccgaccttttcaactcgggtatccgtccggcaatgaatcccggtatctcggtttcccgagttgggggtgccgctcagacaaagatcatcaaaaagctagggggtggtattcgtatagcactagcacaatatcgcgagctggcggctttcgcggcttttgcatctgatttggatgatgctactagagcgcagcttgaacatgggcagcgcgtgacagaattaatgaagcagaagcagtattcaccattatcaattgcagagatgggagtatctctttttgcagctaatgaagggtttttggaggatatagagctaaacaaagtcttggatttcgaatcggctcttctggcgtatatgaacagtgagcatggagatttgctgggcaagattaatgaaagcggcgactacgatgatgacatagaaaaagcttttagagccgcgcttgaaaaatttaagtcaactcaaacttggtaa

SEQ ID NO: 274115 - DNA, 983 bp, Unknown
  Bacterial polypeptide expressing nucleotide sequence isolated from the Sargasso Sea
gatgagcagcggtcgaatcgtagaaattattggggcagttatcgacgtcgaatttgagcgggacagtgttccgcaggtatatgacgcgcttacagtagatggcaccgagatcaccttggaggtgcagcagcaacttggtgacggtgttgttcgcactatcgccttgggtagcaccgagggattgagtagaggtttatcagtcgaggatactggcgccccagtttctgtcccagttggtacggaaacacttggacgaataatggatgttctcggtagaccgattgatgagcggggaccagttggtgaaaaagagcgcatgccaattcatcgaaaagctccgacctatgaagaattagcgacaacaaacgagctgctggaaacgggtatcaaggtcatcgacttggtatgcccttttgctaagggtggtaaagtgggtctcttcggcggtgcgggcgtcggaaagacggtcaacatgatggaattaatcaacaacattgccaccgagcatagtggcttgtccgtttttgcgggtgtcggagaacgtacaagggaaggaaatgatttttaccatgagatgcaagaatcaaaagttattgatctagagggcgagtcaaaagtgtccatggtctacggacagatgaatgagcctcccggcaaccgattgagagtagctttgaccggtctgactatggcggagaagttcagagatgaggggcgagatgttcttttatttgttgataatatctatcgttatactcttgctggaaccgaggtatctgcactcctaggtagaatgccttccgcggtgggttaccagcctacattggctgaagaaatgggtgcactccaagagaggatcacttcgactaaaaacggctcgataacgtctattcaagctgtctacgtacctgctgatgacttaacagacccatcaccggcaacaactttcgcgcacttggatgcgaaggttgtattgtcgagag

SEQ ID NO: 274116 - DNA, 862 bp, Unknown
  Bacterial polypeptide expressing nucleotide sequence isolated from the Sargasso Sea
tatggcgagtggaaaagaaattcgaacaaagatcgcgagtataaagaatactcaaaagatcactaaagccatggaaatggtttctgcaagtaagatgcggaaagtgcaagaccgcatgaagcttggcaagccatactcgcagcgaatacgctccgtcatcggtcacatagcaaactcaacccctgagtataagcatccctattttgatactcgagacgttaagcgcgttggttacatagttgtgtcgactgatcgaggattatgtggcggattgaatattaacgcctttaaagccactgttgcttcaatgaaaaaatggtccgaccagggtgtggagatagacatatgcactatcggcgcgagggcggcaactttttttaataactatggtggaaatgtagtaggagcggttcgagacatcggcgacgctccagaggttgcagatctgattggtgccgtgaagattatgctggataaattcgatggtggggaaatagatagactgatggttgttagtaacgacttcgtgaataccatgacacataagcccgtggtaaaccaattaattcctcttcaaccctcggaagaggaagaattgcaacaccattgggattatctctatgagcctgacgcacaggaactcttggatggcttgttgttgcggttcatcgaatctcaggtctaccaggcagtagtagaaaataacgcgtgtgaacaagcagcacggatgattgcaatgaaaagcgcatcagataatgctggagacttgatagaggaattggggcttgcgtataacaaagcaagacaagcagctattacgcaagagttgtcggaaattgccggcggagctgcagcagtttaa

SEQ ID NO: 274117 - DNA, 610 bp, Unknown
  Bacterial polypeptide expressing nucleotide sequence isolated from the Sargasso Sea
ccttctgctgtcggataccaacctactcttgctgatgaaatgggatttttacaagagagaattacatctcttaaaggtagatccattacatcactacaagcggtatatgtgcctgcagacgatattactgaccctgcacctcacactgcatttgctcacttagatgctagaacagtgttatcaagatctattgctgacttgggaatttatcctgctgtggatccacttgactcatcatcaagaatcttagatccaggcgttgtaggggatgaacattatgaaactgcacgtgaagtccaaagagtgcttcaaagatacaacgatcttcaagatattattgcaattcttggtattgatgagttatcagaagaagataagcagatcgttggtagagcaaggagaatacagcgtttcttatctcaacctatgtttgttgctgaacaatttacaggaatagaaggtaagtttgtctctattaaagatagtgtcgaagccttcaaaacaatcttaagtggagaactcgatttagtgccagaacaggctttttatatgacaggtggattagatgaagtcatgtctaaagctaaagaattggaagaaaatctctaaa

SEQ ID NO: 274118 - DNA, 529 bp, Unknown
  Bacterial polypeptide expressing nucleotide sequence isolated from the Sargasso Sea
aatggaaataaatccttcagaagtaacaaagattttaaaagagcaaataaaaaaattcggtgacaaagcagaagtttctgaggttggtcaagttttgtcagtaggagatggtattgcaagaatttatggcttagacaatgttcaggctggagagatggtagaattttctgacggctctaaaggtatggctcttaatttagagagtgacaatgtcggagtagtaatttttggtgatgacagggccatcaaagaaggtgatactgtaaaaagaactggtgctattgttgacgtgccagttggtaaagaattattaggaagagtagttgatgcattagggaatcctattgatggcaaaggatcattagataaatcattaaaaagaaatagagttgaggtcaaagctcctggtattattccaagaaaatctgtgagcgaaccaatgcaaacaggattaaaagctattgatagcttaatacctgtgggaagaggtcaaagagaacttattattggtgacagacaaacgggaaaa

SEQ ID NO: 274119 - DNA, 877 bp, Unknown
  Bacterial polypeptide expressing nucleotide sequence isolated from the Sargasso Sea
aatggcaagtttagatgatttaaaaaaaagaatatcaagcgttaaatctacgcaaaagattacaaaagcaatgaaaatggtcgctgcatctaaattaagaagagctcaagaaagcgcagaaaaggggagaccatactctgataaaatgaataatattattcttaatctttcaaatagcattactgataaagaaaactcgcccaaactacttgtgggctcaggtgatgataaagttcatttatgtattgttatgacttctgatagaggattatgtggaggttttaatacaaatataattaaaaaagctaaattgtattttcaaaaaatcttagatgagggaaaaatattaaaaattgttactgttggatcaaaaggttatgatcaattaaaaagaatttacaaagaaaatataattgaaaaaatttccttcaaagaatctaaaaacgtaaattattttgatgctgacaaagtaggaaaaataattattgaaaaatttgaaaaaaaagaatttgatgtatgtacaattttttataaccaatttaaaaatgtaataactcaaataccacaggaacaacaaattattcctttaaaaaccgctgagtcagaggcaaattcatctgaagataactatgaatttgaaccagaagaagatgaaattttaaataatttacttccaaaaaatatttctactcagatttttaaagcaatgttagaaaattcagctagcgaacaaggttcaaggatgagtgcaatggataatgcaaccagaaacgcaggtgaaatggttgacaagcttactattcagtataatagaagtcgtcaagcagcaattacaaaagaactaattgaaattatatcaggagcagaaagtttataa

SEQ ID NO: 274120 - DNA, 467 bp, Unknown
  Bacterial polypeptide expressing nucleotide sequence isolated from the Sargasso Sea
tatttactcaggtgtgaggcctgctattgatgttggaatatccgtatctcgtgttggaggtaatgcgcaaatcaaagcaatgaagggtgttgctggtacattgcgtcttgatctagcccagtatcgcgaacttgaggcttttgcaaaatttggctcagaccttgataagagtacacaagctcaattgacaagaggtgagcgtatggtagaaattttaaaacagggtcagtatgttccaatgccggttgaaaaacaagttgcaatcatctttgctgcatcaaaaggatatcttgattcagtgccagctgaaaaggtagcagaatttgaatcaagtctctttgattatttagaagcaaataattctgaggatctaaaagcaatagttgctgaaggttctatttctgatgagctttccgccactttagaaaaagcaatatcttcatttgctgaaggatttgattcataaa

SEQ ID NO: 274121 - DNA, 1411 bp, Unknown
  Bacterial polypeptide expressing nucleotide sequence isolated from the Sargasso Sea
aatggatattaacccctcagaaattacaaaaattttaaaagagcaaataaaaaatttaggtgacaaagccgaggtctcagaaattggtaaagtcctttccgttggtgatggaattgcaagagtttatggattagataatgtccaggctggtgaaatggtagaattccaagataactctaaaggaatggcgctaaatttagaaagtgataatgttggaattgtaatttttggagatgacaaatctataaaagaaggtgatacagttaaaagaacaggatcaatcgttgatgttcctgtaggaaaagagttacttggcagagttgttgatgcactcgggaatccgattgatgggaaagaaaatttagaaaagaatataaaaagaaaaagagttgaagttaaggctccaggaattataccaagaaagtcagttggtgaacctatgcaaacaggtttgaaagcaattgatagtttaataccagttggaagagggcagagagaattgattattggagacaggcaaactggaaaaacagcagttgctatagatactattataaaccaaaaaaaaataaatgaatcagatgatgaaaaaaagaaactctattgtatttatgttgcgattggtcaaaaaagatcaactgtagctcaaattgtaaaaactttgcaagacgcaggtgcaatggattatacaattgttgtttctgctacggcatctgaccctgctccattacaatttttagcaccatacacaggatgtacctttggtgaattttttagagacaatggaatgcatgctttaataatttacgatgatttatctaaacaagccgttgcatacagacaaatgtctcttttattaagacgacctccgggtagagaagcatatccaggagatgtattttatttgcacagtagattacttgagcgatcagcaaaattaaatgatgacaatggtggtggttcattaacagctttacctattattgaaacacaagcaggtgacgtatctgcttatatcccaacaaacgtaatttcaataacagatggccaaatttttttagaaacagaactttttaatcaaggaataagacctgcagtgaacgttggtctatctgtttctagagttggttcagcagcccaaaccaaagccatgaaaaaggtagcaggttcaatcaaattagaactagctcaataccgtgaaatggcggcttttgcccaattcggatctgatttagatgcttcaactcaaaaattgttgaatagaggatctaaacttacagagttattaaaacaagatcaatatagtccaatgacagttgcagaacaggtagtgtcagtttattcaggtgtaaaaggttatttagatactattgaaaataatcaaattcgatcatttgaaaaaggttattag

SEQ ID NO: 274122 - DNA, 381 bp, Unknown
  Bacterial polypeptide expressing nucleotide sequence isolated from the Sargasso Sea
ttgaccctctagattctacaagccgacaactagaccctttggttgtaggagaggatcattacaacacagctcaagctgtccagggtgttcttcaaagatataaagaactaaaagacatcattgcaattttaggtatggatgaactttctgaagatgacaaattggttgttgcaagagcaagaaaagttgaaaggtttttgtcacaaccgttctttgttgcagaagttttcactggatctcctgggaaatatgtttctcttgaagacagcattaaggcgtttaagggaatattaaatggcgattacgatgatttgcctgagcaggcattctacatggttggaacaatagaagaagctgtagaaaaagcaaaaacattataag

SEQ ID NO: 274123 - DNA, 886 bp, Unknown
  Bacterial polypeptide expressing nucleotide sequence isolated from the Sargasso Sea
aatgcctaacttagacgatctgaagaaaagaattggtagtgtaaagtctacagagaagattactaaagcaatgaaaatggttgcagccgccaagcttcgtagagctcaggaatctgctgagtcaagtcgtccatactcagatagcatgaaagatttaatcgagtctatatcaaagggttacaagccttcatcaactgacagaaatcttttaacaggagatgaaaaagatcaaattcatctgttaatactttttacatctgaacgtggcttgtgtggaggttttaattcaattgttacaagaactctaagagataaaatagaaaatctcattgaccaaaataaaactgttaaaatagtatgtgttggtaaaaaaggttatgacattttaaaaagacaatactctgagatgattactgaagtcattgatatgagagcggtaaaatctataacctatcaagatgcaaaaaatatttcagataaaattgtgaaaatgttttttgatggtgagttcgataagtgctcaatcttctataatgagtttaaatccgtaatttctcaaattccaacagaacaacaagtcattccaattgaaattattaatgacgaagcagatgaagaaaaaaaagaagaatctttttttgaatttgagcctggagaaagtgaaattctcgatgaaattctaccacttaactttactgtccaagtatttaaggccttattagaaagcgctgcaagcgaacaaggggctagaatgagcgcgatggataacgcatctagaaatgcgggagatatgatcgacaatcttacactattttataaccgttctagacaggcggttattacaaaagaacttatagaaataatttctggagcagaagcagtttaa

SEQ ID NO: 274124 - DNA, 898 bp, Unknown
  Bacterial polypeptide expressing nucleotide sequence isolated from the Sargasso Sea
atgccaagtttaaaagatattaagactcaaattaactctgttggttcaacgaaaaaaattacgtccgcaatgaaaatggttgctgctagtaagttacgtcgatcgcaagaaaaagcagaggaagcaagaccatactcatcaagattggaagaaatgttgtcttctttagcgtcctcatctgcttcaggtgaaggggttatcaaacttttatcaggaactggcaaagatgaaaattaccttattgttcctgtaaatgcagataggggtttatgtggtggctttaatagtagtattaataaggagtcatttaaattagctaaatctttagaaaatcaaaataaaaaagttcaacttttacctgtaggaaaaaaaagcagagatttttttaaccgtgttatgaaagaaaatatcgttgatagctttgttgataataatgtttcaacctcaggctacgaatctgcgcttaaaatttccaataaaattcaagagttattttttgaaggctcatttgataagtgtattttggtgtacaataaatttaaatctgcaatatctcaagaagttacgcaacaacaacttatcccactagatgtttcatctaataaagatgcagatacagataaagaggaagtttctgataatgctatttacacatatgaacctgacgaagaaacaattttaaaagatcttttgcctaaaaatgtctcaattcaaatatttaaagttttattagaaagtgatgcaggagaacaaggagcacgtatggcggctatggataatgcaacacgtaatgcaggcgagatgattgatagtttaacacttaaatataatagaacgagacaggcgtttattactaaagaattaatagaaataatttctggagctgaatcaatttaaa

SEQ ID NO: 274125 - DNA, 361 bp, Unknown
  Bacterial polypeptide expressing nucleotide sequence isolated from the Sargasso Sea
ttagagctagcacaatatagagaaatggcagcttttgcccaatttgcttctgatttagatgcttcaacaaagcaacttttagaaagaggtgcacgattagttgaaattttaaaacaaggtcagtattcgccccttactgttcccgaacaggttgtttgcatttatgctggcgttagaggttttcttgataaattatcagtaaatgatgttgttaagtttgaggcagagttaattgctgaaatcaaatcaaatcattcagatcttttaaaatcaatttctgatgaaaaagaattatctaaagaaaatgatgataaattaaaatctattttagatggatttgtgaataaatttctaggttaat

SEQ ID NO: 274126 - DNA, 1531 bp, Unknown
  Bacterial polypeptide expressing nucleotide sequence isolated from the Sargasso Sea
aatgactataaatccttctgaaattacaaaattattaaaagaccaaataaaaaattttggtgataaagctgaagtttccgaaataggaaaagttttatcagttggtgacggtatagcaagagtttatggtctagataatgttcaggctggcgaaatggttgagtttgaagatggatctaaaggaatggccttgaacttagaaaatgataacgttggtgtagtaatttttggtgatgatagaaatattaaggaaggtgatactatcaaaaggactaatgctatcgtagatgttccagttggtaaagaacttttggggagagttgtagatggattaggaaatccaatagatggcaaaggatctctttcagtaaaaaatagaaaacgtgtagaagtaaaagccccaggtattatccctaggcaatcagttaatgagccaatgcaaacaggtctaaaatctatagactcccttattcctattggtagaggacaaagagagttaataataggagatagacaaacaggcaaaactgcagtggcgatagatgcaatcataaatcaaaaaaaaatcaacgagtcttctgatgaaaagaaaaaattgtattgtgtatatgtagcgattggtcaaaaacgttctacagttgcacagattacaaaaactttagaagaggctggtgcattaaaatatactacaattgttgctgcaacagcatcagactcagcaccattgcaatttttagctccatacacaggatgcactataggtgaatattttagagacaatggaatgcatgctctaatagtttacgatgatttatccaaacaagctgttgcttatagacaaatgtctttattattaagaagacctccaggaagagaagcataccctggggatgtattttatttacatagtaggttgttagagagggcagcaaaactaagtgataaaaacgggggaggttcactcacagctttaccaattattgaaactcaagctggcgatgtttcggcgtatataccaactaatgttatttctataacagatggacaaatattcttggaaaccgaattattcaatcagggtattcgtccagcagtgaacgtaggtctttcagtatcaagagttggatctgcagctcaaactaaggctatgaagaaagtcgcaggttcaattaaattagagcttgctcaatacagggagatggctgcatttgcacagtttggatcagatttagatgcttcaactcaacaactactaaaccgcggcgcaaaactaacagagcttttaaaacaagaccaatactcaccaatgacagttgccgaacaagtaatatcagtttttactggggtcaaaggttatttagatgatttagaattagccaagatcaaaaaatttgagaaagatattctcaataaaataatatctgagaaatctgaaattattgaagctattcaatcttctggaaaacttgaggaaagcacagagaaacttttagttgaaataattgaagattacaaaaaggttaataaataa

SEQ ID NO: 274127 - DNA, 565 bp, Unknown
  Bacterial polypeptide expressing nucleotide sequence isolated from the Sargasso Sea
tttacaagaaagaattaccacaacaaacaaaggctctattacatctgtacaagcgatttatgttcctgctgatgacttaactgacccagcgcctgcaacatcttttgctcaccttgatgcgacaactgtattatcaagacagattgcggaacttggaatttatccagcggttgatcctttagactcaacttctagaattttggatcctagaattgttggtgatgaacattatagagttgcaagagaagttcaaaaaattcttcaaacatataaatctttacaagatattattgcaatattgggtatggatgaattatctgaagaagataaattaattgtagcaagggcaagaaaaattcaaagatttttatcacaaccgttttttgtagcggaagtttttacaggttctcctggaaaactagttgatttagagtcaacaattaaaggatttgatgcaattagtaagggtgaatatgatcacttaccagaagcagctttttatatggttggtacaattgaagaagcaattgaaaaagctgagaagatggcaaaagacgtagcctaa

SEQ ID NO: 274128 - DNA, 415 bp, Unknown
  Bacterial polypeptide expressing nucleotide sequence isolated from the Sargasso Sea
aggtatatatcctgcagttgacccattagattcaacttcaagaattcttgatcctagaattgttggtgatgagcattatcgtgtagctcgtgaagtacaaaaaatattacaaacatataaatcattacaagatatcatagctattttaggtatggatgaattatcagaggaagataaactagtcgtagcaagggctagaaaaattcaaaggtttttgtctcaacctttctttgtggctgaggtatttacaggatcaccaggaaaactagttgatttagagtcaacgattaaaggtttcgatgcaatttgcaaaggtgaatacgatcatcttccggaagcagcattttatatggttggaaccattgaagaagccatcgaaaaagctgaaaaaatgtctaaagatgcagcagcttaa

SEQ ID NO: 274129 - DNA, 1516 bp, Unknown
  Bacterial polypeptide expressing nucleotide sequence isolated from the Sargasso Sea
atgtcaaaaaatattggtaaagtttcaaaagtaattggtgcagttgtggatgttgaattttcagaaaaaggaagtagtcttccagagatatatgactctttagaaattacaagagaagatggctctatattaattttagaagttcaatctcatatcggagaaaatattgtaagaacaatttcaatggattcaacagatgggttgagtaggggaactcaagctgttgctacaggaagcccaattaaaatgccgataggaaaagaagtatatggtaggttatttaacgttgttggagacccaatagatggaatggaagttttaccaaaaaaagataaagatgggatgtcaattcatagaaaggcaccagattttgatcaactctcaacctctactgaagttttgtttactggaataaaagtaattgatcttattgagccatatgctaaaggaggtaaaattggtctttttggaggagctggagttggtaaaacggtattaatacaagagttaattaataatattgcgaagggacatggaggtctttcagtttttgctggagttggagagagaacaagagaagggaatgaccttttaagagaaatgattgaatctgggattataaattatggggacaagtttcttaaatctatggaaaaaggagaatgggatttaagtaaggttgacaaaaaagcgctgttagattcaaaagcaacatttgtctttggccaaatgaatgaacctcctggtgcaagagcaagagttgcgctctcaggacttaccgttgcagagtactttagagatggaggggctgacggacaaggtaaggatgtcctattctttgttgataatatattcaggtttacacaggctggttctgaggtttccgctcttcttgggagaatgccttcagcggtaggttaccaaccaacattggctactgagatgggaacaatgcaagaaagaattacttctacaaaaaaagggtctattacatcagttcaagccgtttatgtgccagcagatgatttaactgatcctgctcctgctacaacttttgcccacttagatgctactactgtattatcaagaaaaatttcagaacttggaatatatcctgctgtagatcccctagattcaacttctagaattctaactccagaaatattaggagatgaacattataattgtgctcaaagagtaaaggagttattacaaaagtataatgagcttcaagatataattgcaattctaggtatggaggagctatccgaagaagataagcttgctgtagctagggcaagaagagtacaacgttttctctctcaaccatttcatgttgcagaacaatttactggaataccaggtgcactagtagacataaaggatactatcaaagggttcaatatgataatggacggtgagctagaccatctgccagaagctgcttttaacttaaaaggaaatattgaagaggcaattgaggcaggagagaagatgttatcagaagcaaaataaa

SEQ ID NO: 274130 - DNA, 988 bp, Unknown
  Bacterial polypeptide expressing nucleotide sequence isolated from the Sargasso Sea
agggcatggaggtctttctgtatttgcaggagttggtgagaggactagagagggtaatgacttacttagggagatgattgaatcaggaattataaattatggtgatgaatttaaaaaatcaatggaagcaggtgaatgggatttaagtaaagttgataaaaaagcattattagattcaaaagcaacttttgtatttggacaaatgaatgagcctcctggtgctagagctagggttgcattatctggactaactgttgctgaatattttagagacggaggagctgatggtcaaggaaaagatgttctattttttgttgataatatttttagatttactcaagcaggttctgaggtttctgcccttctgggacgaatgccttcagctgtaggttatcaacctacattagctactgagatgggtacaatgcaagagagaattacatcaacaaagaatggatcaattacatctgttcaagcagtatatgttccagctgatgatttaactgacccagcaccagcaactacctttgctcacttagatgcaactactgtactttcaagaaagattgctgagcttggaatctatcctgcagtagatccattagattcgacttcaaggattttaactcctgaaattttaggagatgatcattataattgtgcccagcgtgttaaagaattacttcagagatataaagaacttcaagacataattgccattcttggtatggaagaattatctgaagaggataaattagctgtggcaagagcaagaagggttcagaggtttttatctcaaccatttcatgttgcagaacaatttactggaattccaggtgctttagtcgatattaaggatacaattaaaggtttcaatatgataatggatggtgagcttgatcacatccctgaagctgcatttaaccttaaaggtaacattgaagaggcaattgaagcaggtgaaaagatgcttgctgaaacaaaataa

SEQ ID NO: 274131 - DNA, 1390 bp, Unknown
  Bacterial polypeptide expressing nucleotide sequence isolated from the Sargasso Sea
aatgaataatgaaggaaaaatattacaaataactggtgcggttgttgatgtcaaatttgatgatggaaatcttcctgaaatcatgaatgcattaagcatcaaaatgaaagatggatctgagttagttttagaaactgcacaacatctaggacagggtgttgtaagaactatcgcaatggactcaactgatggattagtaagaggagaggctgtgatcgattctggtaaacctatttctgttcctgttggacaagaaacgctcggaagaatgtttgatgttttaggaaatcctattgatcaaaaaggcgatgttggaactaaatcaacttcaccaattcatagatctgcaccaaaacaagaaaacttaacaacctcatccgaaatgttcgaaacaggaattaaagttgttgacttaatggagccatatactagaggtggaaaaacaggattgtttggtggtgctggtgttggtaaaactgttttaattcaggaattaattagaaatattgcaactgaacatggaggtttctcagtatttgctggtgtaggtgaaagaaccagagaaggaaatgatttatatgctgaaatgactgaatcaggagttattgataaaacagcattagtctttggacagatgaatgaacctccaggggcgagactgagagttggtttaagtgctttaactatggcagaatattttagagatgatgaaggaagagatgttcttctgtttgttgataatatatttagatttacacaagcaggttctgaagtatcagctcttcttggaagaatgccatctgctgtgggttatcaaccaactttatctactgagatgggtgaccttcaagaaagaattacttctactaagaaaggttctattacatcagttcaggctatttatgttccagctgatgatttgactgatcctgctcctgcaacggcatttgcacatttggatgctacatcagtattagaaagaaaaattgctgagcttggtatttatccagctattgatccattgacatctacatcaaggattcttgatcctagggttataggtgatagacattataatgttgctagatctgttcaagctacacttcaacaatacaaagacctccaagatattattgctattcttggtatggatgagttatctgatgaagataaaatggtagtatcaagagctagaaaaatgcaaaaattcatgtcacagcctttctttgttgccgagcagtttacaggaattgaaggtagatatgtcaaacttgaagattccattgctggttttgaggcaattttaaacggtgaagttgatgacttacctgaaaatgcattttcatatgttggttcaattgatgaagcaattgaaaaaggtaaaaagtga

SEQ ID NO: 274132 - DNA, 1519 bp, Unknown
  Bacterial polypeptide expressing nucleotide sequence isolated from the Sargasso Sea
aatggatattaaaacaaatgaaattggagatttgttaagaagtcaaatcaaaaacatcaatgaaaatgttgatgtaaatgaagtcggcgaagttttagaaattggtgatggtgttgcccgcacaagtggtctgggtagcgttatgagttctgagctggttgagttcccaaataatgtatttggtatggcattaaatttagaagaagaaaatgttggtgcagttctatttggagatagtagtcttgttaaagaaggcgatactgttaagcgaactggtaaggttgttgaggttcctgttggaaaagaattacttgggcgcgtagttgatcctttgggacagccaatggatggaaagggacctatcaatgctaaagaaactttaccaatcgaaagaaaagctttaggtgttatgcaaagattcccagttaaagaacccctacaaactggattaaaatcaattgatagcatgattccaattggtcgcggtcaaagagagctaataattggagatagacaaactggtaagtcagcaattgctattgatgctattattaatcaaaaatcaactcatgattctgatagcccagtatattgtatttatgttgccgttggtcaaaaagcttctactgttgcaaaactagttgcagagcttgaagctaatggcgcgatggaatatactacagttgttgtggcaaatgcgtctgatccagcacccttacaatatattgctccttactctggatgtgccatgggagaatattatagagataatggaatgcatggcttaattgtgtatgatgatctttcaaaacaagctacagcttatagacaaatgtcacttgttttgaggagacctccaggacgagaagctttccctggtgatgtattttatttgcatagtagattattagaaagagcttcaaaactatctgaagatttaggttctggttctttaactgctcttccagtaattgaaactcaagaaggtgatgtatctgcatacattccaactaatgtaatttccattactgatggacagatttatttagatactaatttatttaacgggggagtcaggcctgctgttgatgttggtctttcagtatctagagtaggaggaagcgctcaaattaaagcaatgaagaagattgctggaaaacttcgtttagaccttgctcaattcagagagctagaggcatttgcaaaatttgcatctgatttagacgaatctactgctgctcaaattactagaggtaggagaatggttgaaatattaaagcagaatcaatatgtaccaatgtctactgaaaaacaagtcgcaattatttatgccgcaagtcaggggtacctagatgatattgatcttgaatctgtaaaagagtttgaggtaggactattagagcattttgattcaaagcatgctgattgtttagatgagataagcaaaacaggagatatttctgacaaattaggagataaaatgaacaaagctattgagggattcaaaaagagcttctaa

SEQ ID NO: 274133 - DNA, 1543 bp, Unknown
  Bacterial polypeptide expressing nucleotide sequence isolated from the Sargasso Sea
gatggcaaccaaagcatctgaaataagtgaattaataaaacaacaaatcaaaaacttcgaacacgaagccaaatcatccgatgttggaacggtcgtttctgtaaccgacggaattacaaggatacacgggctaaacgacgcacagtacggagagatgatagagtttccaggagatacttttggcttggcgcttaacctggaacaagactctgtcggggctgttgttttaggcgactacacccacatttccgaaggcgcagaagtaaaaacaacaaacagaattctagaagttccggttggggaaggcttgttgggaagagttgtagactcccttgggacaccgcttgatggaaaaggagccattgagacagagcaaacagcaccaatagaaaaagttgcaccaggcgttatctctcgacaatcagttgatcaaccagtccaaaccggactgaaatcgattgacgcaatggtgccaattggtaggggacagcgagagttaattattggcgatagacaaacaggaaaaacagccgttgctgttgacacgataattaaccaaaaaggaacaggcatcaaatgcatttatgtggcagttggacagaaaaactcatcggttgccaatgtggttaagaagcttgaagaggaaggcgcattagagcatacaatcattgttaatgctgcagcatcggattctgctgcaatgcagtacattgccccatattcaggatgcgcgatgggagaatatttccgagacaaaggcgaagacgcactaattattttcgatgatttaaccaaacaagcttgggcatacaggcaggtctcactactactaaagagaccaccaggaagagaggcctatcctggggatgtcttttatcttcattcacgcctgctagaaagagcagcaagagtgaatgcagactatgttgaaaaagagacgaatgggaaagtgaagggccaaaccgggtctttaacagcattaccaataattgaaacacaagcaggcgacgtttctgcctttgtgccaacaaatgtgatttcgatcacagatgggcagatatacctagagagcgacctctttaatgccggcatcaggccggcaataaatgctggactatcggtttctagagtaggcggagcggcccaaacaaaaatcattaaaaaattgggaggcggagtaaggttggcgttagcacagtatcgtgagcttgcagcatttgcccaatttgcatccgatcttgatgaggccactaggaaacaactagaaagagggcagagagtaacagagctaatgaaacagaagcagtatgcaccacttactgttgcagaaatggctgtgtctttatacgccgcaaatgaaggctatctagacgacgtacctgccgataaaattgtcgacttcgaatcagcacttcacgcaagctttattgatggagcctcggatctcgctcaaaagatcaatgaaacaggcgactacaacgaagaaatcgaagcagaccttaaaaagttcgttgaggactttaaatcaacaggcacctactag

SEQ ID NO: 274134 - DNA, 515 bp, Unknown
  Bacterial polypeptide expressing nucleotide sequence isolated from the Sargasso Sea
aatggccaacgaaaaagaaatacgaacaaagattgggagcgttaaaaacacccaaaaaatcaccaaggccatggaaatggttgcggcgagcaaaatgcgccgaacacaggagaccatgaaaaaagcattgccctatgcagacaaaattagagcagtgatcggccatatctataacgcaaaccctgactataagcacccatttcttgagaagagagatgtcaaaaccgcaggctatattgtggtcagctcggacaggggcctttgcggaggattaaatgtaaatatgtttaggggcctcatagcacagctcaaagagaataaaaacaaccaagttgaatcaaaactttgtcttgtaggcgctaaggcagtccagttttttaggtctgtagacgttgatgttgtagcggcagcatcccatcttggcgaagaaccacaagttgaagatttggttggctcaattaaaaccatgttagatgaatacatcgatgggaagattgaccagctctttattgtgc

SEQ ID NO: 274135 - DNA, 532 bp, Unknown
  Bacterial polypeptide expressing nucleotide sequence isolated from the Sargasso Sea
atggcaagtttagacgacctaaaaaaaagaatagctagtgtaaagtctacacagaaaattactaaagctatgaaaatggttgcagcagctaaattaagaagagctcaagaaagcgctgagaagggaagaccttattctgaaaaaatgaataatgttattttaaatttatcaaatggtatatctgataaagaaaatgcaccaaagttattgtcaggtactggtcaggaaaaaactcatctttgtgtggtgatgacttctgatagaggtttatgtggcggatttaattctaatattattaaaaaagctaaaagttattttgcaaaaattttagatgaaggtaaagaacttaaaattattacagtaggctcaaagggaaatgatcaactaaaaagagtttatagtgacaaaataattgaaaatatttctttcaaagagtctaaaaatgcaaattatttcgatgctgacaaagttgggaaaatggtaattgaaaaattcgaagcaggtgaatttgatgtttgtacaattttttaca

SEQ ID NO: 274136 - DNA, 1421 bp, Unknown
  Bacterial polypeptide expressing nucleotide sequence isolated from the Sargasso Sea
aggatttatggtttggataatgttcaaagctggtgaaatggtagagtttgcagatggttcaaaaggtatggctctaaacttagaaagtgaaaacgttggtgttgtaatttttggtgatgacagaaatgttaaagaaggggatgtagtaaaaagaactggtaatattgttgatactccagttggaaaagaattattaggaagagtagttgatggtttaggaaatcctattgatggaaaaggaccattagataaaggaattaaaaaaagtagggttgaagttaaagcacctggtattattccgcgtcaatcagttagtgaaccaatgcaaactgggcttaaatcaattgatagtctagttccgattggaagaggtcaaagggaattaattattggtgatagacaaactggtaaaacagcagttgcagtagatgcaattattaatcaaaaaaaaatcaatgaatctggtgatgaaaaacaaaaactgtattgtatatacgttgcagttggacaaaaaagatcaacagtaagacaaattcaaaaaacattagaagaagctggagctatggagtacacaacaattgttgctgctactgcatctgattctgctcctttacaattcttagcaccatacacaggttgtgctatgggtgagtattttagagataacggaatgcatgcgttaataatttatgatgatttgtctaaacaagcagttgcttatagacaaatgtcattgctattaagaagacccccgggacgtgaggcttatcctggagatgtattttatcttcatagtagattacttgaaagagcagctaaattaagtgacgaacatggtggtggatcacttactgcactgccaattattgaaacacaaggtggagacgtatccgcgttcattccaactaacgttatttcaattacagacggacaaattttccttgaaacagaactatttaaccaaggtataagacctgcaattaacgtaggtttatcagtatctagggttggttcatcagctcaaactaaagcgatgaaaaaagtttctggttcaatgaaactagagttagcacaatatagagaaatggcagcttttgctcaatttggatctgatttagatgcatctactcagcaacttttaaatagaggctctaaactaactgaacttttaaaacaaaaacaatattcacctatgactgttgcagaacaagttatttcagtattttgcggagttaaaggttatctggacgatattgatctaaaagatgttgctgaatttgagagcaagattattgaaaaatgtaaatcagataagcctgaaattatcgattcaattttaacttcaggaaaacttgaggaagataaagaaaaattacttgttgaggtaatcactcaattaaaaggaaattttaaatcttaat

SEQ ID NO: 274137 - DNA, 840 bp, Unknown
  Bacterial polypeptide expressing nucleotide sequence isolated from the Sargasso Sea
gatgagcacaggaaatatcgtacaagtaatcggagcggtagtggatgttgagtttccaaaagaagcaataccaagcgtatatgatgcactctcactcaaggacggagatttagtatttgaggtccaacaacaacttggtgacggcatagtcagaaccattgcaatgggagcgagcgagggcttgaagagaggccttgaggttgaaaatacaggcgctccaatcagtgtcccggtaggacaggaaaccctcggaagggttttggatgtccttggcaatccaatcgatgaaaaaggaccggttggtgctaaatcaaacaggccgattcacgcaaaagcaccctcgtttgaggaacagtcaaccgaagccgatgtattagaaacaggaattaaagtcattgaccttctttgcccgtttgcaaaaggcggcaaggtgggtttgtttggcggtgctggtgttggtaaaacagttactgtcatggagctaattagaaacatcgctgcagaacatgatggcttttcggtttttgctggagtgggagaacgaacaagagaggggaatgacttttaccatgaaatgatggagtcaaacgtcctcgataaagttgcacttgtatacggacaaatgaatgagcccccgggaaacagactcagagtagcgctgactgggctaacgattgctgagaactttagagacgagggaagagatgtattgatgttcatcgacaacatctacagatacacgcttgcaggcacagaggtatcagcattacttggaaggatgccatctgcggttgggtatcaaccaaacctcgcagaagagatgggcgtattcaagaaagg

SEQ ID NO: 274138 - DNA, 868 bp, Unknown
  Bacterial polypeptide expressing nucleotide sequence isolated from the Sargasso Sea
agaaggtaatgatctttatcatgagatgatagagtcgggagtaattttacctgaaggatctggatcaaaagccgcattggtttatggtcaaatgaatgaacctcctggagcaagagctagggttgcattatcaggattaacggttgcagaatactttagagatcaagaaggacaagatgtgctttttttcgttgataatatttttagatttactcaggctggatctgaggtgtctgcattattaggaaggattccgtctgcagtaggatatcagcctacactagcaacagatatgggaaatcttcaagaaagaattacaactacaaacaaagggtctattacatctgttcaagctatatatgtgccagcagatgatttgactgatcctgctccagcaacttcgttttctcacttagatgcaacaacagtattatcaagacagatagccgaaataggaatttatccagctgtagatcctttagactccacatctagaattttagatcctagaattgttggtgatgaacattatagagttgcaagagaagttcaaaaaattttacaaacttataaatctttacaagatattattgcaatcttaggtatggatgaattatctgaagaagataaattaattgttgcaagagcaaggaaaatacaaagatttttatctcaaccattttttgttgcagaagtatttacaggatcgccaggaaaacttgttgaattagagtcgacaattaaaggctttgatgccatttgcaaaggtgaatatgatcatttgcctgaagcagctttttatatggtgggcacaatagatgaagctatagaaaaagctgaaaaaatggcaaaggatgcagctgcttga

SEQ ID NO: 274139 - DNA, 1417 bp, Unknown
  Bacterial polypeptide expressing nucleotide sequence isolated from the Sargasso Sea
aatgaacaaagaaggtataataacacaactaatcggggcggtagtagatgttaagtttgatagcgatttaccagaaatttacaccgcattagaagccaataactcaggtaataagctcattcttgaagttgcacagcatttaggagaaaatagtgtgagaacaattgcaatggactccactgagggattaaaaagaggagataaagttgtaaatacaaatgcaccaattagtgtgccagtcggcccagaaacattaggtagaataataaatgttataggtcaaccaatagatgaaaaaggtgcagttaaaacaaagcaaaaatggccaatacatagaccttcaccaaaatttacagagcaatctactgaaactgaaattttagtaacaggaataaaagtcatcgatttacttgccccatatgctaagggaggaaaaataggattatttggtggagctggagtgggaaaaacagttactataatggaattaataaacaatattgctaaggcgcatggtggattttcagtttttgctggtgtgggggagagaactagagaaggaaacgatctttatcatgaaatgattgaatcaggagttattaagaaagatggaaatggttcgaaagcagcacttgtatacggtcaaatgaatgagcctcctggagctagggctagagtggcattaacagggttaacagttgctgaatactttagagatcaggagggccaagacgtattatttttcgtggataatatttttagatttactcaagctggatcagaggtttcggctttgttaggaagaataccttcggcggttgggtatcaaccaactcttgcaacggacatgggcaatttacaggagagaataacatcgacaggcaaaggatcaattacatcggttcaagctatatatgttcctgcagatgaccttactgacccagcgcctgccacttctttttcacacttggatgctaccacagtgctttcaagacaaatagcagagttaggaatttatcctgcggtcgatcctttagactctacttctagaatattagacccaaggatagttggagaagaacactatagagttgctagagaagttcaaagaatattgcaagcatataaatctttgcaagacattattgctattcttggaatggatgaactttctgaggaagacaagctcactgttgcaagagcaagaaagatacaaagatttttatctcaaccattttttgttgcagaggtattcacaggatcaccaggaaaactagtagacttagagtcaacgataaaaggcttcgacgcgatatgcaaaggtgagtacgatcacttaccagaagcagctttttatatggttggctcaattgaggaagtgattgaaaaaggtgagaaacttgaaaaaggtacataa

SEQ ID NO: 274140 - DNA, 309 bp, Unknown
  Bacterial polypeptide expressing nucleotide sequence isolated from the Sargasso Sea
aatggcaagtttagacgatttaaaaaaaagaatatccagcgttaaatctacgcaaaaaattacaaaagctatgaaaatggttgccgcagcgaagcttagaagggcgcaagagagtgccgaaagaggaagaccttattctgaaaaaatgaataatataattcttaatctttctagtggattatctgataaagaaaatgccccaaaattgctaactggctcaggtgaagataaagttcatctatgtgttgtaatgactgcggacagaggactttgtggtggatttaactcaaatataattaaaaaagcaaa

SEQ ID NO: 274141 - DNA, 1393 bp, Unknown
  Bacterial polypeptide expressing nucleotide sequence isolated from the Sargasso Sea
atgagttcaggcaaaattatacaaataataggaactgtagtagacgttgaatttgcatctgatgaacttccaaaactgtttgacgcattagaagtggacaacagtggagagaatttggtgctagaggtgcaacagcatataggtaacaattgggtaagatgcttagccctaggaactacagatggtttagctagaggcattgaggtcagtaatactggcgaaaaagtgacggtacctgtaggagaagctactttaggaagattgtttgatgtgaccgggactcctttggatggactcggacctgtagaggctgaaagttctttaccgatacacagagatcctcctgcttttgaagatcaaaatacctcagtagaagttctcgaaacaggaatcaaggtgtttgatctgataactcctttccctaaaggtggtaaagtcggagcatatggtggtgcaggagtaggtaaaacagttgttatccaggaattgattaggaatattggagctgaacaccagggagtatcggtatttgctggtgtaggagaaagatctagagaaggaaacgacttgtggcatgaaatgcaggaatcaggagttttagatagtactgtattggtgttcgggcaaatgaatgagacgcctggtgtaagagctcgtatcggtttgaccggacttacaatggctgaatatttcagagatgaaagaaatcaagatgttcttcttttcgtggataacatttatagatatattttagctggaatggaagtatctgctcttttaggtaggatgccttcagctgtaggatatcagcccactctaggtactgaaatgggagctttgcaagaaagaatcacttcaaccaaaaacggttctatcacttctttccaagctatatatgtaccagcagatgattatacggacccaggtattgttactacatttggacacttggatgctgttgtttcattagaacgttcccttgctgcacaggcgttgttccctgcagtggatccattagcatcattcgctaggatattggagcctaatgtggttggagaagaacattacaatactgccagaggagttcaacaagttcttcaaagatataaagacttacaagatattattgccattttgggaattgaagaattgtcagatgaagataaacaagttgtttttagagctagaaaaatacagagattcttaacccagccatttttcgtagctgaacagttcactggtagtccaggaaaatatgtaccagtgaaagaaaccgttagaggttttgctgagatactagaaggaaaacatgatgacttgcctgaacaggcgttttacatggtcgggactatagatgaagctgtagagaaagcggcccagatggctgaatagg

SEQ ID NO: 274142 - DNA, 892 bp, Unknown
  Bacterial polypeptide expressing nucleotide sequence isolated from the Sargasso Sea
tatgccaagtttaaaagatatcaaaactcagatcaattcagttggatctacaaaaaaaattacatcagcaatgaaaatggttgctgcaagtaagttacgtagatcacaagaaaaagctgaagcggcaagaccatattcatcaagactagaggagatgctttcctctcttgcatcatctgccgcatctggggaaggtataattaaactcttaacaggcactggcaatgatcagaattatatcgtagttccagtaagtgctgatagaggtttatgtggtggatttaacagcagcataaatagagaaacttttaagttagttaaatcacttgagggtaatggaaaaaaagttcaactaatgccagttgggaaaaaaagtagagacttttttaatagagtaatgaaggatcaaattatagagagttttgtcgacttaaatgtttcaagtactggttacgagtctgcattaaacatttctaataagcttcaagaattatactttgatggtaagtttgataaatgcatattagtttttaacaaatttaaatcagctatttcgcaagaagtaacacaacaacaattaataccattagacgtttcaaattctgaaaaggaagaagaaaaagaaaattcttcaaatgcaatttatgattatgagcctgatgaagaaacaattttaaaggatttacttccaaaaaatgtttctattcaaatatttaaagtacttttagaaagtgatgcaggggagcagggagcaagaatggccgcaatggacaacgcaacccgaaacgcaggtgaaatgatagatagtttaacgttaaagtataatagaacgcgacaagcgttcattacaaaagaattaatagagattatttctggagctgaatcaatataa

SEQ ID NO: 274143 - DNA, 1378 bp, Unknown
  Bacterial polypeptide expressing nucleotide sequence isolated from the Sargasso Sea
atgagcacaggaaatatcgtacaagtaatcggagcggtagtggatgttgagtttccaaaagaagcaataccaagcgtatatgatgcactctcactcaaggacggagatttagtatttgaggtccaacaacaacttggtgacggcatagtcagaaccattgcaatgggagcgagcgagggcctgaagagaggccttgaggttgaaaacacaggcgctccaatcagtgtcccagtaggacaggaaaccctaggacgggttttggatgtccttggcaatccaatcgatgaaaaaggaccggttggcgctaaatcaaacaggccgattcacgcaaaagcaccctcgtttgaggagcagtcaactgaagctgacgtattagaaacaggaattaaagtcattgaccttctttgcccgtttgcaaaaggcggcaaggtgggcttgtttggcggtgctggtgtcggtaaaacagttactgtcatggagctaattagaaacatcgccgcagaacatgacggcttttcggtttttgctggagtgggagaacgaacaagagaggggaatgacttttaccatgaaatgatggagtcaaacgtcctcgataaagtagcacttgtatacggacaaatgaatgagcccccaggaaacagactcagagtagcactgactgggctaacgattgctgagaactttagggatgagggaagagatgtattgatgtttatcgacaacatctacagatacacgcttgcaggcacagaggtatcagcattgcttggaaggatgccatctgcggttgggtatcaaccaaacctcgcagaagagatgggcgtacttcaagaaaggattacctctacaaaaacaggttcaatcacatcaattcaagcggtttatgtaccagcagatgatttgacagacccctcgccagctacaacatttgcccacctggatgcaacagttgtattggcaagatcaattgcagagcttggcatttatccagcggttgacccgcttgactcaaacagtcgtcaactggaccctggtattgtgggccaagagcactatgataccgcaaggtcagttcaacaggtcctgcaacgctacaaagagctgcaagacatcatagcaatcttaggtatggatgagctttctgaagaggacaagcttaccgtgcagagagcaagaaagatccaaaggttcttgtcacaaccattctttgttgctgaggtctttaccggatcaccgggccagtatgtatctcttagagattcgatcaaggcattccaaggaattgttgccggtgagtatgatgatctcccagagcaagcattctacatggttggcaccattgaagaagcggttgaaaaagcaaaaagcatgtaac

SEQ ID NO: 274144 - DNA, 862 bp, Unknown
  Bacterial polypeptide expressing nucleotide sequence isolated from the Sargasso Sea
atggcaaacgaaaaggaaattcgaacaaaaattgggagtgttaaaaacacccaaaaaattacgaaggcgatggaaatggttgcggcaagcaagatgcgtcgaacacaggaaacaatgaaaaaagcgttgccatatgcagacaaaatcagagctgtgataggacatatctataaagcgaatccggactacaagcacccctttcttgaaaaacgtgaagtcaaaacagccggctacattgttgttagttccgatagagggctttgtggcgggctcaatgtaaacatgttcagaggactaattgccaaactaaaagagaacaaaagcaatcaaattgattcaaaactttgccttgttggagcaaaggcagtccagttttttaggtctgtggatgtggatgtcatagcagcagcatcacatcttggtgaagagccacaagttgaagatttggttggggcaatcaaaaccatgttggatgaatacaatgaaggcaaaatagatcagctttttattgtgcacaatgattttgtaaacacaatgacacaaaaaccagagattaaaacactgctgccaatagacccagaagatggtgaacaaatgcaagaacattgggactatatttatgagccagactcgaaagagcttttggattatatcttgatgaggtacatcgagtcacaagtctatcgagcagtggttgaaaatgtagcatgtgaaatggcagcaaaaatggttgccatgaaaagtgcaacagacaacgcaggaaaattaatagaccagcttgagcttgattataacaaagcaagacaagcggcaatcacacaagaaatttcagaaatagttggcggcgcagctgcagtttaat

SEQ ID NO: 274145 - DNA, 1386 bp, Unknown
  Bacterial polypeptide expressing nucleotide sequence isolated from the Sargasso Sea
tcgagtttcctggcgacacgtttggcttggcccttaacttggaacaagattcagtcggagcagtggtattaggtgactacacccacatttctgagggagcacaagtaaaaacaaccaatagaattcttgaagtgccagttggcgaaggcttgcttggcagggttgtcgactccttgggaacgcctctcgatggaaaaggagctatttcctcagaccaaacagcaccaatagaaaaagttgcaccaggcgtcatctcaagacagtcagtcgaccaaccagttcaaaccgggcttaagtcgattgatgcaatggtaccaatcggaagaggtcagcgagagcttatcattggtgatagacaaacaggaaaaacagcggttgctgttgacaccataatcaaccaaaaaggcacagggataaaatgtatctacgttgcggtgggccagaaaaactcttcagttgccaatgtggttaagaagttagaggaagaaggcgcattagagcacacaatcattgtaaatgctgcagcatccgattcagctgccatgcagtatattgctccatattcaggctgtgccatgggtgagtacttccgagacaaaggagaggacgccctaattatttttgatgacttaaccaaacaggcctgggcatacaggcaggtatcacttctattaaaaagacctcctggaagagaggcttatcctggcgacgtattttatcttcactcaagattgcttgagagagcagcaagggtgaatgcagagtatgtagaaaaagaaacaggcgggaaagtgaagggccaaacaggatctttaaccgcattgccaattattgaaacacaagcaggtgacgtttctgctttcgtcccaacaaatgtgatttcaattacagacggacaaatatacctagaaagtgatttattcaatgcaggtattagaccggcgataaatgctggcctatctgtttccagggtgggcggggcagcgcaaacaaaaatcattaaaaaacttggtggtggtgtcaggctcgcattagcacaatatcgtgagcttgcagcatttgcccagttcgcatctgatcttgatgaagccacaaggaagcagttagaaagaggccagagagtaacagagctaatgaagcaaaaacaatacgctcctctgactgtagcagaaatggctgtgtccctttatgctgcgaacgagggctatcttgatgatgtcccagcagataagattgtcgatttcgagacagcgctgcatgcaaactttgttgactcagcctctgatcttgctcaaaagatcaatgacactggcgactacaacgatgaaatcgaagcggagctcaaaaagttcgttgaagattttaaagcaaccggcacctattaat

SEQ ID NO: 274146 - DNA, 1387 bp, Unknown
  Bacterial polypeptide expressing nucleotide sequence isolated from the Sargasso Sea
aacagttacacaaattatcggagcggttatcgatgtagagtttgataaagataacattccaaaagtttatgaagcgcttatggttgatgagagcggtacaacccttgaagttcagcagcaattgggtgacggtgtagttagaactattgctatgggagccacagaaggtctaaaaagaggactaaccgcctcaagaactaatgctccaatttcagttccagtaggaccggaaacattaggaagaattgtagatgttttaggtaatcctatcgatgagaaaggaccaattggtgaaaaatcaaaaatgccaattcacagaaaacctccttcatatacagatcaatcagcatctaatgaggtccttgaaaccggcattaaagttattgatcttatgtgtccatttgctaaaggtggaaaaattggtctatttggtggagcgggtgttggtaaaacagtaaatatgatggagcttataaataatattgcgcttcaacattcaggtctttctgtttttgctggtgttggcgaaagaaccagagaaggaaacgatttttattatgaaatgcaagaatcgggagttgtaaacattgataatctcggcgaatcaaaagttgcgatggtttacggacaaatgaatgagccaccaggcaatagattaagagttgctttaaccggattaactatggctgaaagttttagagatgaagggaaagatgttttattatttattgataatatttatcgatataccttagcaggtgttgaggtgtctgctcttttaggcagaatgccatctgctgttggatatcaaccaacattggctgaggaaatgggagctcttcaagaaagaattacatcaacaaagacaggatctattacttcaatacaagctgtgtatgtgccagcagatgatttgacagatccctcacctgcaacaacatttgctcacttagatgctactgttgttctttcaagacagatttctgagttaggaatatatccggctgttgatcctcttgattcaacaagtaggcaacttgatccttttgtggttggagacgatcattatgaagttgctcaaggagttcaaaagatcttacaaagatataatgagcttaaagatatcattgcaattcttggaatggatgagctttctgaagaagataaagggcttgtagctagagcaagaaaggctcaaagatttttgtcccagccgttttttgttgctgagatttttactggaactccaggaaagtatgtttcgcttgaggatacgattaaagcatttaagggaattcttaatggagattatgaccatcttcctgaacaggcattttatatggttggaactattgaagaggctgtagaaaaagctaagactttataa

SEQ ID NO: 274147 - DNA, 877 bp, Unknown
  Bacterial polypeptide expressing nucleotide sequence isolated from the Sargasso Sea
atgccaagcttagatgacttaagaaaaagaatttcgagtgttaaatctacacaaaaaattacaaaagctatgaagatggttgctgctgcaaagcttcgtaaagcacaagaaatggctgagaatggaagaccttatagtgataaaatgaatattattattcaaaatttaagcaaagccataagtgatccctcaaatgcgccaaaacttttggtcggctcgggagaagacaaaacacatttgtgtgttgtaatgacagctgacagaggtttatgcggaggttttaatactaatattgtcaagcaggcaaagaattactttaacaaaattttaaaagaatctaaaaatctcaaaataattactgttggaactaagggtttagatcaattaaaaagagaatatggcaagtatattgttaaaaaaattgacttcaaaaataaaaaaaaaatttcctttaaagatgcttcgttagtcggagatgaaattgtaaaattgttcaaaaataatgaatttgataaatgtataattttttataataaatttaaaaacgtaatgacacaaatacctcaatcacaacaattaatacctgcaaaaaaagtagaggataccaaaacagaacaagaatcatcttatgattttgaacctgaagaagatgaaatattagaagatcttctaccaaaaaatatctctacacaaatttataaaggatttttggaaaattctgcaagtgaacaaggatctagaatgacagctatggacaatgcgacaagaaatgcaggtgatttagtggaaaaactaacaataaattataatagaagtagacaagccgctataacaaaagaattaattgaaataatatcaggagcagaaagtttataaa

SEQ ID NO: 274148 - DNA, 646 bp, Unknown
  Bacterial polypeptide expressing nucleotide sequence isolated from the Sargasso Sea
aatgaatcaaaatggaaaaattattcaagtaatcggagctgttgtagatgttcaattcgaaggagatctaccagaaattttaacagctttagttgctgacaactcaggcaataaattaattttagaagtagctcaacatttgggagaaaatagtgttaggactatagctatggatagtactgaaggtcttaagaggggtgatcaagtaaaaaatacaggttccccgataagtgtgcctgttggaccagaaactctcggacgtattattaatgttattggagaaccaattgatcaaaaaggcgaagttaaaacaaaagagagatggcctatacacagagaggctccaaaatttacagatcagtccactgaaactgaaattttagagacaggaattaaagtgatcgatcttttagcgccctattccaaaggtggaaaaataggcttgttcggtggagcgggtgttggaaaaacagttattatcatggaactaattaacaacattgcgaaggctcatggtggattttcggtatttgctggagtaggtgaacgaacaagagaaggaaatgatttatatcacgaaatgatagagtcaggtgtaattaaaccagagggaaaaggttctaaagccgctttagtttatggtcaa

SEQ ID NO: 274149 - DNA, 531 bp, Unknown
  Bacterial polypeptide expressing nucleotide sequence isolated from the Sargasso Sea
tatattcctacaatgtaatttcgattactgatggccaaatctttttaggtactgagttgtttaaccaaggtatcaggccagctgtaaatgttggactttctgtttctagggtcggatcagctgcccaaacaaaagctatgaaaaaagttgcaggatcaattaaactagaattggcacaataccgtgaaatggcagcgttcgctcaatttggttcagatttagacgcatcaacgcagaaacttttgaatagaggatctaaacttactgaattattaaaacaagatcagtacagccctatgacagttgctgaacaagtagtgattatatatgcgggagttaaaggatatttagatagtattgatacaagtgaaattcgttcatttgaaaaaggtcttttagacttagttaaaaccgaaaatccagaaataatagaatcaattcaaaagactggaaaaattgaagaagatatagataagctgctgacagaagtaatcacaaattataaaaaaacaaattttgataaaaaataat

SEQ ID NO: 274150 - DNA, 901 bp, Unknown
  Bacterial polypeptide expressing nucleotide sequence isolated from the Sargasso Sea
atgaataatgaaggtaaaatattacaaataactggtgcggtagttgatgtaaaatttgatgaaggtcatctacctaaaatcatgaatgcattaagcattaaaagagatgatggtacagacttagttttagaaactgcacaacatttaggtcaaggtgtagtaagaacaattgctatggattctacagatggtcttgttagaggagcaaaagttagcgattctggaaaaccgatttctgttccagttggacaagagactttgggtagaatgtttgatgttttgggaaatccaatcgatcaaaaaggaaatgttggcaataaagctacttcaccaatccacagatcagcacccgcacaagaaagtttagcaacttcttctgaaatgtttgaaactggaattaaagtagttgatttaatggaaccatataccagaggtggaaaaacaggactatttggtggtgccggtgtaggaaagacagttcttattcaagaattaattagaaacattgcaactgagcatggtggattttctgtatttgcaggtgtaggtgaaagaactagagaaggtaatgacttgtatgcagagatgactgaatctggagtaattgataaaactgctttagtatttggtcaaatgaatgaacctccaggtgctagactgcgtgttggtttaagtgctttaactatggcagagtattttagagatgatgaaggaagagatgtattattgtttgttgacaatatttttagatttactcaagctggatcagaagtttcagctcttctcggaagaatgccatcagctgtaggttaccaaccaacattatctacggaaatgggtgacttgcaagaaagaattacttcaacaaagaagggttctattacatctgttcaagctattt

SEQ ID NO: 274151 - DNA, 1396 bp, Unknown
  Bacterial polypeptide expressing nucleotide sequence isolated from the Sargasso Sea
gatgagtactgctgctttggtagaaggcaagatcgtacagtgcatcggcgccgttatcgacgtggaattcccgcgcgacagcatgccgaagatctacgacgcgcttattctcgatggctcggaactgacgctcgaagtccagcaacagctgggcgacggcgtggtccgtaccatttgtctgggtgcatccgacggcctgcgccgcggcctgaccgtgaagaacacggcaaagccgatctcggtgccggtcggcaagccgaccctcggccgaatcatggacgtgctcggccgtccgatcgacgaagccggcccgatcgaaagcgaaacgacgcgttcgatccaccagaaggctccggcgttcgacgaactgtcgccgtcgaccgaactgctcgaaacgggtatcaaggtcatcgacctgatctgcccgttcgcaaagggcggcaaggttggcctgttcggcggtgctggcgtgggcaagaccgtcaacatgatggagctcatcaacaacatcgcgaaggaacacggcggttactccgtgttcgcgggcgtgggcgagcgtacccgtgaagggaacgacttctaccacgaaatgaaggactcgaacgttctcgacaaggtcgcgctggtgtacggccagatgaacgagccgccgggcaaccgtctgcgcgtcgcgctgaccggcctgacgatggccgagcacttccgtgacgaaggcctcgacgtgctgttcttcgtcgacaacatctaccgtttcacgctggccggtaccgaagtgtcggcactgctcggccgtatgccgtcggcagtgggctatcagccgacgctggctgaagaaatgggcaagctgcaagagcgcatcacgtcgaccaagaagggctcgattacgtcggtccaggccgtgtacgtccctgcggacgacttgaccgacccgtcgccggctacgaccttcggccacctggacgcaaccgtcgttctgtcgcgtgacatcgcttcgctgggtatctacccggcggtcgacccgctcgactcgacgtcgcgccagatcgacccgaacgtgatcggtgaagagcactactcgatcacccgtcgcgtccagcagacgctgcagcgctacaaggaactgcgcgacatcatcgcgattctgggtatggacgaactgtcgccggaagacaagctgtcggtcgcacgcgctcgtaagatccagcgtttcctgtcgcagccgttccacgttgctgaagtgttcacgggctcgccgggcaagtacgtgccgctgaaggaaacgatccgcggcttcaagatgatcgtcgacggcgagtgcgaccacctgccggaacaggcgttctacatggtcggcacgatcgacgaagccttcgaaaaggccaagaagatctcgtaa

SEQ ID NO: 274152 - DNA, 877 bp, Unknown
  Bacterial polypeptide expressing nucleotide sequence isolated from the Sargasso Sea
tatggctggaatgaaggaaattcgcggcaagatcaagagcgtgcagaacacgcgcaagatcacgaaggcgatggagatggtggccgcatcgaagatgcgccgcgcgcaggaacgcatgcgcgccgctcgtccgtatgcggacaaggtccgtgccatcgccgcgcacatgagccgcgcgaaccccgagtaccgccacccgttcatggtggcgaacgaaggcgcgcagacggccggcatcatcctcgtcacgacggacaaggggctatgcggcggtctgaacaccaacgtgctgcgtgcgacggtgcagaagttcaaggagctggaagagaagggccagaaggtcgaagccaccgcgatcggtagcaagggcctcgggttcctgaaccgcttcggcgcgaaggtgatgtcgcaggtcgtgcacctcggcgacaccccgcacctggacaagctgatcggcgccgtgaagacgcagctcgatctgtactcggaaggcaagctgtcggcggtttatatcgcttacacgcgcttcgtcaacacgatgaagcaggaagccgtgatcgagcagttgctgccgctgtcgtcggaacacttcgaagccgatgacggtacgccggccacgtcgtgggactacatctacgagccggacgcgcaggcagtcgtcgacgaactgctcgtgcgttacgtcgaggcgctggtgtaccaggccgtcgcggaaaacatggcgtccgagcaatcggcgcgcatggtcgcgatgaaggccgcgtccgacaacgcgaagacggtgatcagcgaactgcagctcgtgtacaacaagagccgtcaggccgcgatcacgaaagaactgtcggagatcgtcggcggcgcagccgctgtttaa

SEQ ID NO: 274153 - DNA, 427 bp, Unknown
  Bacterial polypeptide expressing nucleotide sequence isolated from the Sargasso Sea
tatggcaaccatcaaagtagacgtcgtcagcgcggaagagcagatcttctcgggcgaggcgaaattcgtcgcgctgccgggcgaaacgggtgagctgggcattctgccgggccacacgccgctgatcacgcggattcgtccgggtgcggtgcgcatcgaagtcgagggcggcaacgacgaattcgtgttcgtcgcgggcggcattctcgaagtgcagccgggcgccgtgacggtgctcgccgataccgcgatccgcggcaaggacctcgacgcggcgaaagccgaggaagcacgcaagcgtgccgaggaaacgctgcagaacgcgaagtcggatctcgacctcgcgaaggcgcaatccgagctcgcgaccgcgatggcgcagctcgaggcgatccagcgtctggcgaagatccgcagccggcactga

SEQ ID NO: 274154 - DNA, 1423 bp, Unknown
  Bacterial polypeptide expressing nucleotide sequence isolated from the Sargasso Sea
tatgagtgaaattaatcaaggaaaagttgtccaaataatgggagctgttgttgatgttaaatttaatgatcatcttcccgctatattagatgctttagaaatagagcaggatggaaaaaaattagttcttgaagttgcgcagcatcttggagagaattcagtaagaacaattgctatggatactacagagggtcttaaaagaggacagtctgttgagagtactggtgcgccaatatcagttcctgtaggagaggaaacattaggtagaataattaatgttgttggtgaacctgtcgatcaaaagggagaactaaaagcaactcaaaaaagacccattcatcaaaatgcccctgaatttgttgatcaatcaactgagaaagagattttggtaacaggtattaaagttgttgatttactatgtccttattctaaaggtggaaaaattggtttatttggaggcgctggagttggtaaaacagtgctaattatggaattgattaataatattgctaaagctcatggcggttattcagtttttgctggtgtaggcgaaagaacccgtgaaggtaatgatctgtattgggaaatgattgagtctggggttaacaaagaaggtggaggagatggatctaagtgttcacttgtttatggtcagatgaatgagcctccaggagcacgtgcaagagttgctctttccggactttctgtagctgagcattttagagaagagggtcaagatgttcttttctttgttgataatatctttagatttactcaagcaggttcagaagttagtgctcttttaggaagaatcccttcagctgttggttaccaaccaactttggcaattgatatgggaaatcttcaagaaaggattacatctactaataaaggatccatcacttctgtacaggcaatttatgtgcctgccgatgacttgactgatcctgctcctgcaacatcttttgcacatttagatgctactactgttttatcaagagctatatcagaaaaaggtatttatccagctgttgatccgcttgattccaatagcaggattcttgaggccgatatagttggtgaagaacactataatgttgcaagagaagtacaagaaattcttcaaaaatataaatctctccaagatattattgctattctaggtatggatgagttaagcgaggaagataaattaaccgttgcaagagcaagaaaaattgaaagattcttctcccaacctttccatgttgctgaagtatttactggttctccaggaattttagttgatataaatgacaccattaagggctttaaaggtttatgcaatggtgattatgatcacttgcctgaagcggcattttatatggtaggtacaattgaggatgctataaaaaaaggcgaagaattagctaaggaagaataa

SEQ ID NO: 274155 - DNA, 1173 bp, Unknown
  Bacterial polypeptide expressing nucleotide sequence isolated from the Sargasso Sea
ctatccaaagtagtgagtctagtagaatagaagttaaagcacccggtattattcctagacaaagtgtaagcgaaccaatgcagacagggctcaaagcccttgactcactagtccctattggtcgaggacagcgtgaattgattattggtgatagacaaactggcaaaacagctgttgctattgacaccataattaaccaaaaggaaattaaccagtctgatgatgaatcaaaaaaattatattgtatctatgtagctattgggcaaaagagatcaacagttgctcaggttgttaaaaccttagaggaaaatggagctatggaatacaccatcgtggttgcagcttcagcttctgatccagcaccactccaatttttagctccttatgcaggttgctctatgggtgagtttttccgtgataatggaatgcacggtctaatcgtttatgatgacttatcaaaacaagctgttgcgtatagacaaatgtctttattgcttagaagaccgccagggcgtgaagcgtttcctggtgatgttttttatcttcactctcgtcttctagaaagagcagctaaaatgaacgatgaaaatggtggaggtagtttaacagcacttcccgtaattgaaactcaagctggtgatgtatctgcttttatcccaactaatgtgatttcaattacagatggtcaaattttcttagagacagaattgtttttctcaggtattagaccagcaattaatgttggtttatcagtgagtcgtgtgggttccgcagcacaaactaaagctatgaaaaaggttgctggtaaaatcaaattagagttagcccaatatcgtgaaatggctgctttctctcaatttgcatcagaccttgatgcctctaccaaacagttacttgcaagaggtgagaggttaacagaactattaaaacaagatcaatacgttccgatgtctgtggctgatcaagttttaagcttgtactcaggtgttaggggtttcttggataaaattgaaatatccaaaatcacagattttcaagttaagtttcttgagggacttcgtgccgatcattcagatatttttgacgaaattaataatacaggtaattttagcgatgagtctgataaaaaaatcgaggattatttagaaaaattcacagctaattataattaat

SEQ ID NO: 274156 - DNA, 977 bp, Unknown
  Bacterial polypeptide expressing nucleotide sequence isolated from the Sargasso Sea
ggtttgcccattcgctaagggtggtaaagttggtctattcggtggtgcgggtgtaggtaaaaccgtaaacatgatggaacttatccgtaacatcgcaatcgagcacagcggtttctcagtattcgctggtgttggtgagcgtacgcgtgagggtaacgacttctatcacgaaatgaacgaatcaaacgtacttgataaagtatcgcttgtatacggtcagatgaacgagccaccgggtaaccgtctacgtgttgcactaaccggtctaacaatggctgagaagttccgtgacgaaggccgtgacgttctattcttcgtagataacatctatcgttataccctagcaggtactgaagtatcagcacttctaggtcgtatgccatctgcggtaggttaccagcctactcttgcagaagagatgggtgtgcttcaggaacgtattacgtcaacgaagacaggttcaatcacttcaatccaagcggtatacgtacctgcggatgacttgactgacccatctccagcgacaacctttgctcacttggatgcaacggtagtactttctcgtgatatcgcgtctctaggtatctaccctgcggtagacccactagattcaacgtctcgtcagctagacccgctagtaattggtcaagagcactatgacgtagcacgtggcgtacagactgttcttcagcgctataaagagctgaaagacatcatcgcgatcctaggtatggacgaactatctgaagaagacaagcaagtggtatcacgtgctcgtaagattcagcgtttcctatctcagccgttcttcgtagcagaagtatttaccggtgcacctggtaaatatgtatcgctaaaagacacaatcagtggatttaaaggcattctagacggtgagtacgatcaccttccagagcaggccttctacatggttggttctatcgaagaagcgctagagaaagccaagaaagcataac

SEQ ID NO: 274157 - DNA, 1012 bp, Unknown
  Bacterial polypeptide expressing nucleotide sequence isolated from the Sargasso Sea
attacacaggttattggagcagtagtagacgtaaaattcgatggagatcttccagaaattttaacagcattagaatgtaaaaatggtgacaacagacttgttttagaagttgctcaacatttaggagagtctacagttagaactattgcaatggatgcaactgaaggattaaaaagaggagatgaggttactaatactaacgcaccaattcaagtaccagttggtcctgaaactttgggaagaattataaatgtaattggagagccgattgacgaaaaaggagaagttaaaacaaaagaaacttggcctattcatagatctgcaccggaatttaatgatcaatctactgaaactgaaatattagttacaggtatcaaagttattgatctactggcaccttatgcaaaaggtggaaaaattggattatttggtggagctggtgttggaaaaacagttttaattatggagttaattaacaacgtcgcaaaagcacatggtggattttcagtttttgctggtgttggtgaaagaacaagagaaggaaatgatctttaccatgaaatgatagactctggagttataaaaactgatggagagggatcaaaagcagcattagtttatggacaaatgaatgagcctccaggagctagagctagagttgctttaactggactgactgtagctgaatattttagagatcaagaaggtcaagacgtactcttcttcgttgataacattttcagatttactcaagcaggttctgaggtatcagcacttctaggaagaataccttcagctgttggttatcagcctacattagcaaccgatatgggtaaccttcaagaaagaattactacaacaaacaaaggatcaatcacatcagtacaagcaatttatgtaccagccgatgacttgactgatcctgcgccagcaacttcgtttgctcacttagatgcgactaccgttctttcaagacagattgcaaagattggtatttacccagcctgttgat

SEQ ID NO: 274158 - DNA, 931 bp, Unknown
  Bacterial polypeptide expressing nucleotide sequence isolated from the Sargasso Sea
cgtcgttaatgttgttaaaaagcttgaagaacatggagctctagaacatacaattattgtttcagcatcagcatctgatcctgcgcctatgcaatatctttctgcatactcaggctgttcaatgggtgaatattttagggataaaggtgaagacgcattgattgtgtatgatgacctctctaaacaagccgttgcatatagacaagtatctttacttttaaaaagacctccaggaagagaggcctatccaggagatgttttttatcttcattcaagattgctagaaagagccgccagggtaaatgctgattatgtagaaaaagctaccaacggaaaggtgaaaggaaaaactggatccttaaccgcacttccgattatcgaaacacaagcaggagatgtttcagctttcgttccaaccaacgttatatcaattaccgatggtcaaattttcttagaaactgacctttttaattcaggtattagacctgccattaatcctggtatttctgtttctagggtaggtggagcggctcaaactaagattatgaaaaaactaagtggaggcgtcagaactgcattagctcaatatagagaacttgcagctttttctcagtttgcgtctgatctagacgatgcaaccaaagctcagcttgctagaggaataagaattactgagttgattaagcagaagcaatattctccaatgagtgttgcccagcaatcactgagtatttttgctgcagatagaggctatatggatgatgtagaggttgaaaagattggcagctttgaagaagcattgcacggctattttacatctgaaaaagcagacttggaaaagagcattaatgataccggtgattggaatgatgatattgaaaagcaatttacagaagtggttgagcagtttaaaaaaacacaaacattttaa

SEQ ID NO: 274159 - DNA, 735 bp, Unknown
  Bacterial polypeptide expressing nucleotide sequence isolated from the Sargasso Sea
agagttgcactttcagggttgacgatggcagaaaacttagagacgaaggcagagatgtattgctgtttgtggacaacatttatagatacacacttgccggaacagagtgttcggccttgttgggtagaatgccttctgcggtgggttatcagcctactcttgcagaagaaatgggggttttgcaagaaagaattgcctcaacaaagactggttcgatcacttctgtgcaggctgtttatgttccagctgatgacttaacagacccttctccggccactacctttgctcatttagatgccaacgtggttctatcaagacaaatagcttctcttgggatctatccagcagtagacccgctagactcaaatagtcgacaactagagcctggaattgtaggtcaagagcactatgacgttgcaaatgcagtcaaacagcagcttaatagatataaggaattaaaagatattattgccattttgggcatggatgagctttcagaagaagacaagcttgtggttgctagggctagaaaaattgaaagattcttgtctcaacctttctttgttgcagaggtctttacaaactcacctggaaaatatgtacctttgagtgaaaccattaggggatttaagggcatagtaaacggtgactatgatgacataccagagcaagccttcttaatggctggcggaatagacgaagtagtagagaaggctaagaccgaagcggcttaat

SEQ ID NO: 274160 - DNA, 1294 bp, Unknown
  Bacterial polypeptide expressing nucleotide sequence isolated from the Sargasso Sea
aagttgcccagcatttggagaaaccagcgttagaacaattgctatggatgctacagagggattaaaaagaggagatgatgtaattgatacaggggcacctataaaggttccagttggaccagaaactttaggaagaattgtaaatgtgattggtgaacctattgatgaaaagggtgaagttaaaacaaaagaaagttggcctatccatagagcagcgccagaatttaacgatcaatcaactgaaacagaaattttggtaacaggaataaaagtagtagatttattggctccttatgcaaagggtggtaaaataggtttgtttggtggtgctggagtaggtaagacagtattaattatggaattaattaataacgttgcaaaagcgcacggaggattttcagtttttgcaggagtaggagaaagaactagagaaggtaatgacctataccacgaaatgattgagtcaggtgttattaagccagatggtgaaggttctaaagctgcattagtttatggtcaaatgaatgaaccaccgggtgcaagagccagagtagcattatcgggtttaacagtagctgaatattttagagaccaggaaggtcaagatgtactgtttttcgtagataatatatttagatttacgcaagcaggatctgaagtttctgctttacttggaagaattccttcagcagttggataccagccgacattagcgactgatatgggaaatcttcaagaaagaattactacaacaaataaaggttcaattacatctgtacaggcaatatatgttcctgctgacgacttaactgatcctgcgccagcaacttcattttcacatttagatgctactaccgtattatctagacaaattgcagaacttggaatttatccagctgtcgacccattagactcaacttcaagaatactggatccaagaattgttggtgatgaacattatagagttgctagagaagttcaaaaaattttacaaacttataaatctcttcaagatattatagcaattttgggaatggatgaattatctgaagaagataagttaactgttgcaagagcaagaaaaatccaaagatttttatcacaacccttttttgtagctgaggtttttactgggtcaccaggaaaattagttgatcttgaggccacaattaaaggttttgatgcaatatgcaaaggtgaatacgatcatttacctgaagctgcattttatatggtgggcactattgaagaggcaatagaaaaagcagaaaaaatggcgaaagacgctgcttaa

SEQ ID NO: 274161 - DNA, 1405 bp, Unknown
  Bacterial polypeptide expressing nucleotide sequence isolated from the Sargasso Sea
tacttaaagagcaaaattaaaaattttggtgataaagctgaggtgactgaagtagggcaggttttatctgtaggagatggtattgcaagaatttatggtctagataacgtacaagccggagagatggtagagttcgcagatggatcaaaaggaatggcccttaatttagaaagtgaaaatgttggagttgtaatttttggtgatgatagaaatataaaggagggtgatgtagtaaaaaggactggtaatatcgtcgatactcctgtcggcaaagaattattaggaagagtagtcgatggtttaggcaatcctattgatggaaaaggatcatttagtaaaagtgttaagaaaactagagtagaagtaaaagcaccaggtattattcctcgacaatcagttagcgaaccgatgcaaactggattaaaatcaattgacagtttagttcctattggaagaggtcagagagaattaattataggagataggcaaacaggaaaaacagcagttgcagtagatgcaataattaatcaaaaaaaaataaatgaatctggtgacgaaaaacaaaaattatattgcatatatgttgcggttggacaaaagagatcaactgtaagacaaattcaaaaaacattggaggaagcaggcgcaatggaatatacaactattgttgctgctacagcttccgattctgcacctttacaatttttagcaccttataccggttgtgcaatgggcgaatattttagagataatggaatgcatgcattgattatttatgacgacttgtccaagcaagctgttgcgtatagacaaatgtctcttctattaagaaggcccccaggtcgtgaggcatatcctggagatgtattttatttacatagtagattactcgagagggctgcaaagttaagtgatgatcatggtggtggatcattaacagcacttccaattattgaaactcagggtggagatgtatctgcatttattcctactaatgttatttcaatcacggatggtcaaattttcttagaaacagaattatttaatcaaggtataagaccagcgattaatgttggtttgtctgtttctagagttggatcatcagctcaaacaaaaggtatgaaaaaagtatctggttcgatgaaattagagttggcacaatatagagagatggcagcatttgctcaatttggatctgatttagatgcgtctacccagcaacttttaaatagaggttctaaattgactgaacttttaaaacaaaaacaattttcaccaatgacggtcgcagaacaagtgatatctgtcttttgtggtgttaaaggttatcttgatgatattgatctaaaggatgttgctgaatttgagagtaaaattattgatagatgtaaatctgaaaaacctg

SEQ ID NO: 274162 - DNA, 1068 bp, Unknown
  Bacterial polypeptide expressing nucleotide sequence isolated from the Sargasso Sea
ttggaagaggccaaagagaattgattattggcgaccgacaaacgggcaagacagcaattgccttagacgcaatcatcaatcaaaaaggaacgggcgttacttgtgtgtatgtagccgtagggcaaaaacaatcttccatcgccgcagtagtgagaaagcttgaagaatacggagctatggagcatacaattattgttgcagcggcagcagcggatcctgccccaatgcaatttcttgcgccttactcaggttgttctatgggcgaatatttcagagataaaggggaggacgcgcttatcatttatgacgacctttccaagcaagctgtagcctatcgtcaaatatcacttctgctcagaaggccaccgggaagggaagcttatccgggcgatattttttaccttcactcaagacttcttgaaagaggctgcagggtgaacgaagattatgttgaagagcaaaccgaaggcaaagttaaaggcaaaacagggtctttgaccgctttaccaattattgaaactcaggctggagacgtctcagctttcgttcctacgaacgtaatttcaattacagacggtcagatcttcctagaaacctcctatttcaacaaaggtctattaccagccatgaatccaggtatttctgtctcaagggtgggtggagccgctcaaactccgttgattaaaaaattaggtggaggagtgagaattgctcttgctcagtttagagagctggaagcttttgcacaatttgcatcggacttggatgatgcgtctagagagcagcttgagcttggtcagaaggtaacagaattgatgaagcaaaaacaatattcacctatgtcggtttcagagatggggctggttcttttcgccgtagacaaaggttatttaaaagatgtggagctcaataaaattgcagattttgaatcagcactgatttcttacatgaattcggagcacaaagatttcatggataatttagccgagagcggcgaacactcagatgaaattcttgcaactttcacagaagctctagataaatttaaatcaacgcaaacttggtagc

SEQ ID NO: 274163 - DNA, 604 bp, Unknown
  Bacterial polypeptide expressing nucleotide sequence isolated from the Sargasso Sea
ccatctgcagttggatatcaacctacactcgcagaagaaatgggtgtttttcaagaaagaattgcgtctactaaaacaggatcaatcacttctgttcaggcagtttatgttcctgcagatgatttaacagacccttcaccagcaacaacattcgctcacttagatgcgaacgtggttttatctaggcaaatcgcttctttaggtatctatcctgctgttgaccctctggattcaaacagcagacagctagagccggcaatcgtaggtcaagagcactatgacgttgccaatgccgtaaagcaacagctgaatagatataaagaattaaaagacatcattgccattttaggaatggacgagttgtctgaagatgataaattagtagttgccagagcaaggaaaatagagagattcctttctcaacctttctttgtagcagaagtattcaccaatgctccaggaaaatatgtgccacttagtgaaacgattcgaggatttaagggaattgttaatggagactatgacgatatacctgagcaagctttttacatgaccggtaatattgatgaggttgtcgaaaaggctaaaactgaggccgcataat

SEQ ID NO: 274164 - DNA, 727 bp, Unknown
  Bacterial polypeptide expressing nucleotide sequence isolated from the Sargasso Sea
aagaaggcccccagggcgagaagcatatcctggagatgtattttatcttcattcccgtcttctagaaagggcggcaaaagttatctcggatgataatatagctaaggggatgaatgatcttccggaaggactaagaaagaaagttaaagggggaggctcacttactgctttaccaattattgagacccaggctggagatgtctctgcttatataccaacaaacgtaatatcaataactgatgggcaaatttttttagaatctgacttgttcaattctggtgttcggcctgcgattaatgttggaatatctgtttctagagtaggtggatctgcgcaaataaaatctatgaaaaaaattgcaggaactttaaaattagatcaagctgcatacagagaactagaagcttttgccaaattcggatctgatctggatgcagcaacgttgaatgttatagaaaaagggaaacgtaatgttgaaatattgaagcaatcagtaaatgatccttttaaaattgaagatcaaatcgcatcaatttttgttgggacaaataatctgatttctaatgttcctgtctctaaagtaagagaatttgagacaatgtacttagagactttatcttcaaagcacaaggcagttttacaagaccttaaatctggtaatttgacagataaagtaatttccacattagagaatgttgctaaagaaacttcaaaactttttgaataa

SEQ ID NO: 274165 - DNA, 497 bp, Unknown
  Bacterial polypeptide expressing nucleotide sequence isolated from the Sargasso Sea
cgatggtcaaatatacttggagacagaattatttaattcaggtattaggccagcaattaatccagggttatcggtttcaagggttggcggatcagctcaaacaaaaatcatgaaaaaattagccggtggcgtaagaacagctttagctcaatatcgtgagctagctgccttttctcaattcgcctctgatttagatgacgcaacgaaacaacaacttgccaatggtaaggcatttactgagttactaaagcaaaaacaatatgctcctatgagtgttgctcaacaagctctaagtttatttgctgccgataggggttacatggctgatgtcgatgttgaaaaaatattagattttgaagaagcacttcatggatatctaacatctgaaaagggtgaattagaagaacaaataaattcaaccggggattggaacgacgatattgaaagtcaatttaaagatcttgttgaagactttaaaaaaacacaaactttttaat

SEQ ID NO: 274166 - DNA, 1354 bp, Unknown
  Bacterial polypeptide expressing nucleotide sequence isolated from the Sargasso Sea
tatggctttaaacttagaaagcgataatgttggtgttgtaatttttggagatgatagagctgtaaaagaaggtgatacagtaaaaagaacaggagcaattgttgacactcctgtgggaaaagaattattaggaagagtagttgatggattaggaaatccaatagacggaaaaggtgcactagacaaaggtataaaaagaagcagagttgaagttaaagccccaggtataattccaagaaaatcagtaaatgaaccaatgcaatcaggacttaaatcagttgatagtttagttccaattggaagaggccaaagagaattaattattggtgacagacaaactggaaaaactgcagtcgcaattgacactataattaatcaaaaaaaaataaatgaatctaatgatgaaaaacaaaaattatattgtatttatgtagcgattggtcaaaaaagatcaaccgtaagacaaatagaaaaatctttggaagaggctggagcaatggaatatacaactatagttgctgcaacggcatcagatgcagcaccgcttcaatttttagctccttatacaggatgtgctatgggagaatattttagagacaatggaatgcatgctttaattatttatgatgatttatctaagcaagcagttgcatatagacaaatgtcattattgctaagaagacctccaggaagggaagcttatccgggagatgttttttatttacatagcagacttttagaaagagctgctaaactaagtgatgaacatggaggaggttctttaacagcactaccaattattgaaacacaaggtggtgacgtatctgcttttattccaactaatgttatttcaattacagatggacaaatatttcttgaaacaaatttatttaatcaaggtattagaccagcaattaatgttggtttatcggtatctagagttggatcttcagctcaaacaaaagctatgaaaaaagtttctggttcaatgaaattagaattagcacaatatagagaaatggctgcatttgctcagtttggatcagatttagatgcttcaactcaaaaattgttaaatagaggttcaaagttaaccgagcttttgaaacaaaaacaatattcaccaatgacagttgcagaacaagtaatttcagttttttgtggtgttaaaggatatttggacgatttagaacttaaagatatatcttcatttgaaagaaaaattattgaaaaatgtaaatcagaaaaaccagaaattttggaagcaatttctaagtctggaaaattagaagaagatactgaaaatttattagtggaaactattaaagaattaaaacaaaactttaactcttaa

SEQ ID NO: 274167 - DNA, 1042 bp, Unknown
  Bacterial polypeptide expressing nucleotide sequence isolated from the Sargasso Sea
actaaaaacgaaggaaccatcgttaatgtttctgatggaattatcagaatacatggaatgggggatgttatgtatggtgagctcgtagagtttgaaaatggtgtttttggacttgcacttaacttagagcaagactctgttggagttgttgtgttgggtgattaccttgggctaagtgaaggacaaaaagttacatgtacaggtaagatcttggaagttcctgttggtgaggaaatgcttgggcgagttgttgacgctttaggaaatccgatcgacggtaagggtgaacttaaaacaaaacaaactgcacctattgaagtagttgcaccaggagttattgctaggcaatcagttgatcaaccagtacaaattgggcttaaatcaatcgatgcaatggttccaataggaagaggtcaaagagagcttattattggtgacagacaaactggaaaaacagctgtagcaattgatgcaataattaatcaaaaaggatctggaattaaatgtatttatgtagctattggtcaaaaacaatcaacaatagctaatgtcgtagcaaaacttgaagagtatggagcaatggagcacacaattgttgtttcagcagcagcagctgatccagctgcgatgcaatacctctcagcatattcaggttgtgcaatgggagagtattttagagacacagggcaggatgcattaattgtttacgatgatttatcaaaacaagcagttgcttacagagagatatcactgttacttagaaggcctccaggaagagaagctttccctggagatgttttttatcttcactcaagacttttagagagagcagcaagagtaaacgcggaatacgtagaaaaaattacagaaggaaaagtaaaaggcaaaacaggatctctaacagccttgccaattattgaaacacaagctggagatgtatctgcttttgttccaactaatgtaatttcaattaccgacgggcagatatttttagaaacagatctttttaattcaggcgtcaggccagctattgatccaggac

SEQ ID NO: 274168 - DNA, 1228 bp, Unknown
  Bacterial polypeptide expressing nucleotide sequence isolated from the Sargasso Sea
ctaggaagggtcgttgatggattaggaaatccaatagatggcaagggagcattagataaatctgtcaaaagaagcagagttgaggtaaaggctccaggaattattcctcgtaaatcagttagtgagccaatgcaaactggacttaaatcaattgatagtttagtaccaattggaagaggtcagagagaattaattattggtgatagacaaacaggcaaaacagcagttgctattgatgcaatcataaatcaaaaaaaaataaacgagtctaatgatgagaagcaaaaattatattgtgtttacgtagcaataggacaaaaaagatctaccgttagacaaattgaaaaaacattagaagaagctggcgcaatggagtatacaaccattgttgcagcaacagcttcagacgctgctccacttcaatttttagccccttatactggttgtgcaatgggagaatattttagagacaatggaatgcatgctttaattatatatgacgatctttcaaaacaagcagttgcttatagacagatgtcactattattaagaagaccacctggaagagaagcttacccaggagatgtattttatttgcatagcagactacttgaaagagcagctaaattgagtgatgagcatggtggaggatctttaacagctcttccgataattgaaacacagggtggtgatgtttcggcgtttatacctacaaatgtaatttcaattacagacggtcaaatttttttggaaacagaattgttcaatcaaggtataagaccagcaattaacgtaggattatcggtctcaagggttggatcatctgctcaaaccaaagcaatgaaaaaagtttctggatcgatgaaacttgaacttgctcaatatagagaaatggcagcatttgctcagtttggatcagatctagatgcctctactcagaaacttttaaatagaggatctaaattaactgaactattaaaacaaaaacaatactcacctatgactgtagctgaacaagtaatttcagtattttgtggtgtaaaaggtcatttagatgatattgaacaaaaaaatattgctgattttgaaaaaaaaattattgaaaaatgcagatcagagaagccagaaattgtagactcgatttcaagttctggcaaacttgaagaaaatacagaaaaatctttgaacgaaattattatcgaacttaaaaaaaactttaactcttaga

SEQ ID NO: 274169 - DNA, 1216 bp, Unknown
  Bacterial polypeptide expressing nucleotide sequence isolated from the Sargasso Sea
gggagaaaatctattaggaagagttgttgatcccttaggaagacctttggatggtagaggtgatatagatacatctgattcacttcctgtagaaaaaattgcagctggagttgtagaaagaaaatctattgatcagcctgttcaatttggtttgaaaatagttgatgcaatggttccggttggaagaggtcaaagagaacttgttatcggtgatagaactacaggtaaaacttcattgtgtgtagacgctttaattaatcaaaaagattctaatataataggaatttatgttgctataggtcaaaaagcgtctaaggtttctcaagttgtaacaagatttgaagaacaaggtgcattggaaaatacaattattgtaacagcgaatgcatcagactcagccgcactacaatacttggctccctatgctggagttaccatggctgaatattttatggcacaaggaaaagacgtattaatcgtgtatgatgatttgagtaagcatgcatgggcttatagacagatgtctttattattaagaagacctcctggtagagaagcttatcctggagatgttttttatcttcattcaagattacttgaaagagctgcaaaattagatgaaaaatatggaggaggttcaattacagcattgccaataattgaaactcaagcaggagatgtttcaggttatattccaacaaatgttatttctattacagacggtcagctttatcttgagccagatttatttaactcaggtataaggccagctgtaaatgcaggtttatctgtaacaagagtgggctcatcagctcaaagaaaagcaatgaaagaagtatcagggtctcttaaaggtgagatggctcaatacgattcattaaaaacttttgctcaatttggaactgatgatttagatgcaataactaagcaacagctcgctagaggtgagagattaactgaattgttaaaacagaatgaaaatgagcctctatcctttgaaaatcaagtttctatattttatgcagcaaatcaaggagcattagatgatgtagaaatagaaaaaatatctgactttgaaaaacaatggtatgattttgtttcagctaatttgccagaggtaatgaaatctatttctgaagaaggagaactttctgatgattcaaagaagagtcttgacggagcaattaaaacatttaaaggaacttttgggaaataa

SEQ ID NO: 274170 - DNA, 598 bp, Unknown
  Bacterial polypeptide expressing nucleotide sequence isolated from the Sargasso Sea
tcagctgtaggataccaaccaacacttgctgaagagatgggagttctccaagagagaatcacttcaactaaaagtgggtctattacttctattcaagcagtatatgtccctgcagatgatttaactgacccaagcccagcaacaacatttgctcatttagatgcaactgttgtgttatcaagaaatattgcagaactaggtatatatcctgcagtggatcctctggactccactagtagacagctagatccattgattcttggacaagagcattatgacactactagagcagtacagggtgttcttcagaagtacaaagagcttaaagatatcattgcaattttaggaatggatgagctatctgaggaggacaagttagcagttaatagagctaggaagatacagagatatttatctcaaccattttatgttgctgaaacatttacaggcacgccaggtaaatatgtatctctaagcgagacaattaaaggtttccaagcaattgtaaatggcgactatgatcatttgcctgagcaagcattctacatgataggagagatttctgaagctgaaaaaaaagctgatgaggttaaataat

SEQ ID NO: 274171 - DNA, 1227 bp, Unknown
  Bacterial polypeptide expressing nucleotide sequence isolated from the Sargasso Sea
aattattaggtagagtggttgatgcacttggaaatccaattgatggtaaaggtaatattagctctgaaacaagaagtagaattgaagtaaaagctccaggcatcatacctagaaaatcagtttctgagccaatgcaaactggtttgaaagcaatagatagccttattcccattggtcgaggacaaagggaattaattattggagataggcaaactggaaaaacagctattgcaattgataccataattaatcaaaaaacgattaatgagtcagatgacgagtctaaaaaactttattgtatttatgttggtatagggcaaaaaagatcttccatagctcaaactgttaaaacattagaagatgcaggtgctatggaatatactactgttgttgcagctacagctagtgatgctgctcctcttcagtttcttgcgccatatactggttgttcaatgggtgagtatttcagagataatggtatgcacgccttaattatttatgatgacttgtccaaacaggctgttgcgtatagacaaatgtctttattattgagaagaccaccagggcgtgaagcttttccaggagatgtattttatctacatagtagacttcttgagagagcggcaaaaatgaatgatgaaaatggtggaggttctttaacagctttgcctgtaattgaaactcaagccaatgatgttagtgcctttatccctactaatgtaatttcaatcacggatgggcaaatatttttggaaacagaacttttcaaccaaggcattaggccagctgtgaacgttggattaagtgtatcacgggttggttcagctgctcagacgaaagctatgaaaaaaatagctggatcaattaagttggaattggctcaatatcgtgaaatggctgcatttgctcaatttggttcggatttagatgcttcaacccaaaaattgcttaatcgtggttcaaaactaactgaacttttaaagcaaaatcagtattcacctatgacgatagctgaacaggtagtttcaatatttgcaggtgttaatggctatctagatgatcttgatttaaataagattagggactttgaaaaagatttatacgagcttattaaatcttctcatgcagatataattgaaaaagtaaattctactggagagttagatgatgatacatcttcaaaacttcaatcaattattgaggaatttaaaaagaatcgctcataaa

SEQ ID NO: 274172 - DNA, 913 bp, Unknown
  Bacterial polypeptide expressing nucleotide sequence isolated from the Sargasso Sea
agcacatggtggttattctgtttttgcaggagtaggagaaagaactcgtgaaggaaatgatctttatcatgaaatgattgagtctggtattatcgacttaaaaggaaaagattccaaggttgcgttagtttatggtcaaatgaatgaacctcctggagctcgagcaagagttgcattatctggattgactcaggcagagtattttagagatgaagaaggtcaagatgttttattttttgtagataatatatttcgttttacacaagcaggttctgaagtatcagctcttttaggaagaataccttctgccgttggttaccaaccgacattggcaactgatatgggcgctcttcaagaacgtattacaactacaaaaaaaggatcaataacttctgttcaggcaatttatgttcctgcagatgatttaacagatccagcaccagcaacatcattttctcaccttgatgcaacaactgtcttaaatcgtgcaatctcagaaaaaggtatttatccagctgtggatcctcttgactctacttcaagaattttagatccacaggttgtaggagatgatcattatcgtgtggcaagagaagtacaacgtgttttgcaaacttacaaaagtttacaagatataattgcaattttaggtatggatgaattatctgaagaagataagttaactgttgcaagagctagaaaaattgaaaaatttttaagccaacctttttttgttgctgaagtatttactggttctcctgggaaatatgttgaattggaagatacaattaaaagttttgatggactagtgaaaggtgagtacgatcatatgcctgaggcagcattctatatggttggagggattgatgaagctattgaaaaatcaaaaaaattagagtctgaagctgcttaa

SEQ ID NO: 274173 - DNA, 511 bp, Unknown
  Bacterial polypeptide expressing nucleotide sequence isolated from the Sargasso Sea
cgttatctccataacggacggacaaatatttttggagtcttctctttttagctcgggcctaaaacccgcaatggatccagggatatcagtttctagagtagggggtgccgcgcaagttccaataataaaaaaactgggaggaggaataaaaacagccttggcccaatacagggaattggaggcatttgcccagtttgcatctgacctagatgaggcctctaaggagcagttagaacatggtgtacgtgttacggagttgaccaagcaagatcaattttcgcccatgtccgtagcggaaatggggctgatgttatataccgccaatgaaggatatttgcgagaagtcgaagtagaaaaaattaaagattttgaaaagacattgctctcgtacatgaacgcagagcacaaagacttgatggaccgcgtttctgaaacaggtgaatacaatgaagaaattgagggctcttttaaagaagctttggataagtttatgtcaactcagacttggtaa

SEQ ID NO: 274174 - DNA, 826 bp, Unknown
  Bacterial polypeptide expressing nucleotide sequence isolated from the Sargasso Sea
aatggaagaattaaacccatcagaaattagtcaggttatcaaacagaaaattgatgcccttgataccgcctccactcctagcaatgaaggcacaatcgttttccttgcagacggtattgcgagaatacatggccttggcgaagtcatgaatggtgaacttatagagtttgaacatggcgtcatgggaatggcacttaatttagaagttgactctgttggtgctgttatcttaggagattacaagttattggcagaaggcggctctgctaagtgtactggaagaatcttagaggtccccgttggagaggctcttatgggcagggttgttgacgcactaggtaacccaattgacggtaaaggcgaagtacagacaggtcaaaccgccccagtagagaaagtcgctcctggagttatttcaagaaagtctgtagatcaaccggtgcaactgggcataaaggccgttgacagcatggttcctattggaagaggtcagcgtgaattgatcattggagacagacagaccggtaaaaccgctatcgccattgacgcaataatcaatcaaaaagacactggcgttaagtgtatttatgtagcgataggtcaaaagcaatcttcaattgcccaagtggttagaactcttgaacagtatggcgcaatggaaaacacaattgttgtagtcgctgcggcggctgacccagcaccaatgcaatacattgccccttttgcagcctgttccatgggcgagtatttcagagataggggagaagatgctctaattatctacgatgacctttctaaacaagccgttgcatatagacagatgtct

SEQ ID NO: 274175 - DNA, 529 bp, Unknown
  Bacterial polypeptide expressing nucleotide sequence isolated from the Sargasso Sea
ggcgttcgttcctacgaacgttatttctataaccgatgggcaaattttcctcgagtcgtctttatttagttcagggttaaagccagccatggaccctggtatttcagtttcaagggtaggtggcgctgctcaggttccaataattaaaaagctcggtggaggaattaaaacagccctcgctcaatatagagagttagaggcttttgcccaatttgcttcagatcttgacgaagcatccaaagagcaattagagcatggtgtgagggttacagaactgacgaaacaagatcagttttcgccaatgtctgtagctgaaatgggccttatgctttacacggctaatgaagggtatctaaggcaggttgaggttgaaaaaatcaaagactttgaaaagagcttgatagcctatatgaattccgagcataaagatctgatggataaggtgtcagagaccggagaatacggagacgatatccaaaatgccttcaaagaagccttagacaatttcatggaaacacaaacttggtag

SEQ ID NO: 274176 - DNA, 543 bp, Unknown
  Bacterial polypeptide expressing nucleotide sequence isolated from the Sargasso Sea
acaaaggatcaattacatcagtacaagctatttatgttcctgcggatgacttaacagacccagcaccggctacatctttttcacacctagatgcaacaacagttttgtctagacaaatcgctgaactagggatttatcctgcagttgatcctctagactcaacttcaagaattttagatccaagaatagtaggtgatgaacattatagagttgcaagagaagtacaaaaaattcttcaaacctataaatctctgcaagatattatagcgattttaggaatggatgaattatcagaggaagataaattaactgtagcaagagctagaaaaattcaaagattcttatcacaaccattttttgttgctgaagtattcactggatctgcaggaaaattagtagatttagaatctacaataaaagggttcgatgcgatttgtaaaggtgagtatgaccatttacctgaagcagcattttatatggtaggaactatagaagaagctatagaaaaggctgaaaaaatggctaaggaagctgcagcttaat

SEQ ID NO: 274177 - DNA, 1267 bp, Unknown
  Bacterial polypeptide expressing nucleotide sequence isolated from the Sargasso Sea
aaatctagaagatgataacgttggtttagttctatttggtgaatcaagtttggtaaaagaaggtgatttagcaaaaagaacaggtaaagttgtcgaagtgcctgttggtgaagcaatgcttggacgggtagttaatccgttgggccagcccattgatgggaaagggaatattgatactgaagaatttcttgcaattgagaggaaagcgcttggtgtaatggcaagatctccagtgaagcagcctttgcaaacgggtatcaaagctgttgatagtatgattcccattggccgtggtcaaagagaacttattattggtgataggcaaacaggtaaaacagccgtagctattgatgcaataattaatcaaaaatatacacatgaaacagacactccagtatactgtatatatgttgcgattggacaaaaagcatccacggttgcagcgattgtcgcagagttagaatccaatggggcaatggaatacacgacagttgttgctgctagtgcatctgaagaagcacccttgcaatatatcgctccttattcaggttgtgctatgggtgaatattttcgtgataatggaaaacacagtttaattgtctatgatgatttatcaaaacaagcagttgcgtatcgtcaaatgtcattggttcttcgaaggcctcctggaagagaagcgtttcctggtgatgtattctatctccatagtcgtttattggaaagagcatctaagttatcagatgatttaggtggaggttcgttaactgcacttccaattattgagacacaggagggagatgtttctgcttatataccaacaaatgttatatcaattactgatgggcagatatatttagaaaaaaatctatttaactcaggtgttaggcctgctattgatgtagggatttcagtttcacgtgttggtggaaatgctcaaataaaagcaatgaaaggtgtagcaggtacgcttcgattagatttagcacaataccgtgaattggaagcctttgcaaaatttggatcagatttagataaaaatacgcaagcccaacttacgagaggtgaacgcatggttgaaatattaaagcaagggcaatatgttcctatggatgttgaaaagcaggttgcaattatttttgcagcttcaaaaggatatcttgataaaattcctttagataaagtaatagattatgaatcagggctttttgattatcttgaagcgaataacaaggatgatttgcagtccataaaaactgaaggttcaata

SEQ ID NO: 274178 - DNA, 784 bp, Unknown
  Bacterial polypeptide expressing nucleotide sequence isolated from the Sargasso Sea
gaatgaaccaccaggtgcaagagcaagagtagctttatctggactaaccgttgccgaatacttcagagatggtagtggtgatggacaaggaaaagatgttctattttttgtggataatattttcagatttacgcaagctggatctgaggtatcggccttgttaggaagaatgccatctgctgttggatatcaacccacattggcaactgagatgggtgctatgcaagaaagaattacatcaacaaaaaaaggttctattacatctgtacaagctgtatatgttcctgcagatgacttaacagatcctgcacctgcaacaacattttcacaccttgatgctacaacagttctttcaagaaaaattgcagaattaggaatttatccagctgttgatccactagattcaacatcaagaattttaacaccagaaatattgggtgatgatcattacaattgtgcacaaagagttaaagaaatgcttcaaaaatataaagaacttcaggatatcattgccattttaggaatggaagaattatcagaggaggataagcttgtagtttcacgagcgagaagggttcaaagatttttatcacaaccctttcatgttgctgagcagtttacaggcatccctggtgttttagttgacattaaggatacaattaaaggatttaatatgattatggatggagagttagatcatatccctgaagctgcttttaatttaaaaggaacaatcgaagaagctattgaagcaggtgaaaaaatgatcgcagacgctaaataa

SEQ ID NO: 274179 - DNA, 852 bp, Unknown
  Bacterial polypeptide expressing nucleotide sequence isolated from the Sargasso Sea
agcgccatgcagtatttatcagcatatttctggatgcaccatggggtgaatattttagagataaaggtgaggacgctttaatagtttatgatgatttatctaaacaagctgttgcttatagacaggtatcattacttttgaaaagacctccaggaagagaggcttaccccggtgacgttttttatcttcattcaagattgttggagagagctgcaagggtcagcgcagattatgttgagcaagttactaaaggtaaggtaaaaggcaaaacaggatctctaacagctttacctataattgaaacattggctggagatgtatcagccttcgttccaacaaatgtgatttcgattacagacggacaaatttatttagaaacagagctgtttaattcaggagttcgcccagcgattaatccaggcctatcagtatctagggttggcggatctgctcaaactaagattatgaaaaaacttgcaggtggagttagaactgcattggcacagtatcgtgaactggctgcattttctcaatttgcttccgatttagatgacgctacaaaacaacaacttgcaaatggtaaagctttcactgagttgttgaaacaaaaacaatacgcaccaatgagtgttgcacaacaagcactaagtttatttgcagctgatagaggatatatggcagatgtagaggttgaaaaaattcttgattttgaagaagcattacatggctatctaactgctgaaaaaggtgatctagaagaaaaaataaactcaactggtgattggaatgatgaaatagaagcagaatttaaatctcttgttgaagactttaaaaaaacccaaactttctagt

SEQ ID NO: 274180 - DNA, 1278 bp, Unknown
  Bacterial polypeptide expressing nucleotide sequence isolated from the Sargasso Sea
agcgatatcagattcattaaagtctactcttggagactggaaagattctgtaaaagatgacgtagttggttatgtatcagctattgcagacggtgttgcaagagtaaaaggtttagaaaatgttatggcatctgagctactcgagttccctggtggattagtcggagttgctcttaacttagaagaagattcaattggtgttgttttgatgggtgactccaaccacattgaagaaggaaaccctgttaagcaaactggtgaagtactttctattggagttggagatggatttttaggaagagttatcgatccactaggaaacccaattgatggcaaaggtcctatagagtttaccgaaagaagacgtctagagctacaagcaccttctgttgttgaaagacaacctgttggagaaccacttcaaactggtattaaagctattgactccatgattccaattggaagaggccaaagagaacttattattggtgatagacagattggaaaaactgctgttgctgtcgatacaataatcaatcaaaaagatactgacgtaaaatgtatttacgttgctattggtcagaaatcatcaacagtagctgaagttgtagagagatttgaacaagagggagtacttgataaagttgttatcgttaacgcaccagcttcagcagctgcagcattgcagatgtatgctccttatgctggttcagctattggtcagcactggatgtacaatggcgaacacggtctaattgttttcgacgacttatccaaacaagcaattgcatatcgtcagatttcattacttctaagacgacctcctggaagagaggcatatcctggtgacgttttctatcttcactcaaggttattagaacgttgtgcaaaagtaagtgaagaacttggcggaggatcactaactggtctcccaattattgagacaaaagctggtgacgtttcagcattcattccaactaacgtgatttccattacagatggacagatttatttggaatcagaactcttttattctggtgtaagacctgctgtaaaccctggtacatcagtatcaagagttggtggtgcagcacagactaaggctatgaaaaaagtctctggtcctttaagaattaaccttgcacagttcagggagttagaggcatttgctgagttcggatctgacttagatgcagcatctcaagcacagcttgatagaggtagaagagttgttgagttgctaaaacaaccacagtatccaccagtacctatggaaga

SEQ ID NO: 274181 - DNA, 340 bp, Unknown
  Bacterial polypeptide expressing nucleotide sequence isolated from the Sargasso Sea
tatagagtagcaagagatgttcaaagaatactacaatcatataaatcactacaagatattatagctattcttggtatggacgagttatgtgaagaagataaactagttgtagcaagagctagaaaaatccagagatttttatctcaaccattctttgttgcagaagtatttactggttcaccaggaaaactggttgatcttgactcaaccatcaaaggttttgatgcaatctgtaaaggtgagtatgatcacttacccgaagctgctttttatatggttggtacaattgaagaagctatagaaaaagctaagaaaatggaacaagaagctgctgcttaat

SEQ ID NO: 274182 - DNA, 1414 bp, Unknown
  Bacterial polypeptide expressing nucleotide sequence isolated from the Sargasso Sea
aatattaaaagaacaaataaataaatttggcgataaagctgaagtttcagaagttggacaggttctttcagtaggagatggtattgcaagaatttatggtttagacaatgttcaagcaggagaaatggtagaattttctgatggttctaaaggtatggctttgaacttggaaagcgataatgttggtgttgtaatttttggagaagataaatctattaaagaaggtgatacagtaaagagaacaggcgcaatagttgatactccagttggtaaagagttgttgggtagagtagttgatggattaggaaacccaatagatggaaaaggtgtattagataaagggattaaaagaagcagagtagaagttaaagctccaggaattattcctcgtaaatcagtaagtgaaccaatgcagactgggcttaaatctatagatagccttgttcctattggaagaggacagagagaattaattattggtgatagacaaactggaaaaactgcagttgcaattgatgctataataaatcaaaaaaaaattaatgaatctaatgatgaaaaacaaaaattatattgtgtttatgttgctataggacaaaaaagatctacggtaagacaaatcgaaaaaactttggaagaggctggagctatggaatatacaactatagttgctgccactgcctcagatgcagctcctttgcaatttttagctccatataccggatgtgcaatgggtgagtattttagagataatggtatgcatgctttaattatctatgatgatctttctaaacaagcagttgcttatagacaaatgtcacttttattaagaagacctcctggaagagaagcttatccaggtgatgtattttatttacacagtagattgcttgaaagagctgctaaattaagtgatgaacatggcggaggatcattaacagctctaccaataattgaaactcaaggtggagacgtttctgcatttatacctaccaatgtaatttcgattactgatggtcaaatatttttagaaaccgaattgtttaatcaaggtataagaccagccattaatgttggattatctgtatctagagttggatcttctgcacaaacaaaagcaatgaaaaaagtttcaggatctatgaaacttgaacttgctcaatatagagaaatggcagcctttgctcagtttggttcagatttagatgcttcaactcaaaaactcttaaatagaggttctaaattaactgaattattaaaacaaaaacagtattcaccactaactgttgcagaacaagtgattacaatattttgcggtgttaaaggatatttagatgatgttgaacaaaaaaatatatctgagtttgaagataaaattttagaaaaatgtaaatctgaaaaacctgagaatata

SEQ ID NO: 274183 - DNA, 335 bp, Unknown
  Bacterial polypeptide expressing nucleotide sequence isolated from the Sargasso Sea
ggtggcaagagatgttcaaaaaatattacaatcttataaatcacttcaagatattattgcaattcttggtatggatgaattatctgaagaggataaattagtcgttgctagagctagaaaaatccaaagatttttatctcaaccattttttgtagctgaagtttttacaggttcacctggaaaattagttgatttggaatcaactattaagggctttgatgcaatttgcaaaggtgaatatgaccatttaccagaagcagccttttatatggtaggtacaattgaggaagcaattgaaaaagctaagaaaatggaaaaagaagcagctgcttaat

SEQ ID NO: 274184 - DNA, 1402 bp, Unknown
  Bacterial polypeptide expressing nucleotide sequence isolated from the Sargasso Sea
cacacaagttattggagcagtagttgacgttaattttgatggagaacttccagaaattctaacagcattggaatgtaaaaatggtgataacaggttagttttagaggttgctcaacatctaggtgaaacaacagttagaacaattgcaatggatgctactgaaggtttaaaaagaggtgatgaagtgatgaatactaatgctcctatacaagtacctgttggacctgaaactcttggaagaattatcaatgtaattggtgagcctatagatgaaagaggcgaagttaaaacaaaagaaagttggccaattcacagagcggccccagaatttaatgatcagtcaactgaaacagaaattcttgtaactggtattaaggttattgacctgttagcaccttatgcaaaaggtggaaaaattggattatttggtggagctggagttggtaaaacagtcttaattatggaattaattaataacgttgcaaaagctcacggaggattttcagtttttgcaggagtaggtgaacgaactagagaaggaaatgacctttatcatgagatgatggactctggagtaataaaaaaagatggtcctggatctaaagctgcattagtttacgggcaaatgaatgaacctccaggagcaagagcaagagttgctcttacaggtttaacggtagctgagtattttagagatcaagaaggccaagacgtccttttctttgttgataatattttcaggtttactcaagcgggctcagaggtttctgctcttttaggaagaattccttctgcagttggctatcaaccaacattagctacagatatgggtaatctacaggaaagaattacgacaacaaacaaaggttcaattacatcagttcaagcgatttatgtgccagctgacgacttaacagatccagctccagcaacatcgtttgctcacttagatgcaacaactgtactttcaagacaaattgctgaaattggtatttatcctgcagttgatccattagattccacatcaagaattttggatccaagagttgtgggagacgagcactacaaggtggcaagagatgttcaaaaaatattacaatcttataaatcacttcaagatattattgcaattcttggtatggatgaattatctgaagaggataaattagtcgttgctagagctagaaaaatccaaagatttttatctcaaccattttttgtagctgaagtttttacaggttcacctggaaaattagttgatttggaatcaactattaaaggctttgatgcaatttgcaaaggagaatatgaccatttaccagaagcagctttttatatggtaggtacaattgaggaagcaattgaaaaagctaagaaaatggaaaaagaagcagccgcttaa

SEQ ID NO: 274185 - DNA, 727 bp, Unknown
  Bacterial polypeptide expressing nucleotide sequence isolated from the Sargasso Sea
ttatgatgatctttcaaagcaagcagttgcttaccgtcaaatgtcacttttacttagaagaccccctgggcgtgaagcattccctggtgacgttttctatcttcacagcagattacttgaacgagctgcaaaattaaatgatgaaagtggcggaggttctctaactgcattgccagtaattgagacacaggccaatgacgtgagtgccttcatcccaactaatgttatttcgataactgatggacaaattttcttagaaacagaattattcaaccaaggaatacgtcctgcagtgaatgtgggactaagtgtttctcgagttggttctgccgctcaaacaaaagcaatgaaaaaggtggccggttcaattaaattagagcttgctcaataccgggaaatggctgcatttgcacagtttggatcagatcttgatgcatcaacgcaaaaattattgaatcgaggctctaaattaactgagctcttaaagcaaaatcaatactcgcccatgacaatcgctgaacaggttgtttcaatttttacgggtgttaatggttacctcgatgacttagaactgaatttgattaaagattttgaaaaggatctatttgaactcattaaatcttcacatggagatatcattgaagctattaacagctcaggtaatcttgaggatgacgttgcttcaaagttaagcactatcatcgaagagttcaaaaaaaatagatag

SEQ ID NO: 274186 - DNA, 922 bp, Unknown
  Bacterial polypeptide expressing nucleotide sequence isolated from the Sargasso Sea
tatcgcaaaagctcacggtggttactcagtatttgctggagtaggagagagaacccgtgaaggaaatgatttgtatcacgaaatgttagagtcaggtgtgaatactcttgagggaaaagactctaaatgtgctctagtgtttggtcaaatgaatgaacctccaggagctcgtgcaagagttgctctaactggactgactgttgctgaatattttagagatatggaaggtcaagatgtattattctttgttgataatatctttcgatttactcaagctggatcagaggtgtcagcacttcttggaaggataccgtctgcggttggataccaaccaacattagcaacagacatgggttcacttcaggaaagaataacatctacaaataaaggatcgattacttctgtgcaggcaatttatgttcctgccgatgatttaacagacccagcgcctgcaacgtcttttgcgcacttggatgcaacaactgttctttcaagacaaattgcagaattgggaatttatcctgccgttgatccattagacagtacttctagaattcttgacccacgcattgttggtgaagagcattatagagttgctcgtaatgttcaatctgttctacaaacatataaatcacttcaagatatcattgcgattcttggtatggatgaattatctgaggaagataagttgactgtttcacgtgctagaaaaattcaaaggttcatgtctcagccattctttgttgcagaggtctttactggaacaccaggaatttatgtagaattagacgatacaattaaaggttttgatgcaatctgtaagggtgagtatgatcatctccctgaagcagccttctacatggtaggcacaattgaagaagcaattaaaaaatctgaaaaaatggcagttgaggctgcataa

SEQ ID NO: 274187 - DNA, 577 bp, Unknown
  Bacterial polypeptide expressing nucleotide sequence isolated from the Sargasso Sea
atgaattttttacagaatatcccgccttacctgtttttcactggcaaaggaggagtaggtaaaacctcaatttcctgcgctacagctatacgcctggcagaacagggtaagcgcgtcctgcttgtcagtactgatccggcgtctaacgtcggtcaggtattcgatcagtctattggcaacactatccagtccgtgtcttcggtgccaggcctttcggcgctggagatcgacccacaggacgctgcccagcaataccgcgccagaatcattgacccaattaaaggtcttttgccagacgacgtcgttaacagtatcagcgagcagctttcaggcgcttgtacgacagagatcgctgcgttcgatgagtttactggcttactgaccgacgcttctctactgacccactttgatcacatcatttttgatactgccccaacgggccacactattcgccttctgcagcttcccggagcctggagcagctttattgaaagtaacccggatggtgcttcctgtcttggtccaatggctgggctggaaaaacaacgcgagcaatatgctcatgctgtcgaggcat

SEQ ID NO: 274188 - DNA, 1004 bp, Unknown
  Bacterial polypeptide expressing nucleotide sequence isolated from the Sargasso Sea
cctgtttttcaccggtaagggaggtgtaggcaaaacttcgatttcctgcgcaacggctatacgtctggctgaactgggaaagcgtgttctgcttgtcagtaccgacccggcttccaatgtcggtcaggtattcgatcagactatcggtaacactatccagcccgtgactgctgtgtctggtctttcggctctggagattgacccgcaggacgccgcccagcaataccgcgccagaatcgttgaccctattaaaggtcttttgcctgatgacgttgttaacagcatcagtgaacagctttcaggagcttgtacgacagagatcgctgcattcgacgagtttactggcttactgactgacgcttctctgctgacccgctttgatcacatcatttttgatactgccccaactggccacactattcgccttcttcagcttcccggagcctggagcagcttcatcgaaagtaacccggatggtgcttcctgtcttggtccaatggctgggctggaaaaacaacgcgagcaatatgctcatgcggttgaggcattatccgatcctgaacgaactcgccttgtgctggtcgcgcgattgcaaaaatcaacactgcaggaagtcgctcgtactcatgacgaattatcagctattggccttaaaaatcagtatttagtcattaacggtgtcctgcctgcgagcgaagcagaacgtgatgcactggccgctgcaatatggcaacgggagcaagaggcgctggcaaatcttcctgccgggttatctgatttgccgacagacaacttatacctgcagccgctgaacatggttggtgtatccgcattgaaaggcctgctcaacgaacacgctgagataacatcgcttcctgaacaaagcccacagaacaagccagagaatatgtcgttgtctgtcctggttgatgatatcgcccgcagtgaacacggtttgattatgctgatgggcaaaggtggtgtgggcaaaaccacaaagggct

SEQ ID NO: 274189 - DNA, 1789 bp, Unknown
  Bacterial polypeptide expressing nucleotide sequence isolated from the Sargasso Sea
catgtccccgtttctgaactactcgtttctcaatgatgcgcccccatttctcttcttcaccggtaaaggtggagtgggtaaaacatcgctggcctgtgccagtgcggttgccttgtgtgacagtggcaaacgggtactgctggtcagcacagatccggcttcaaacgtaggccaagtgttcgacacccagatagggaaccagatcaccaggatcccgcaagtcgatgggttatcagcactggagattgacccgcaagccgccgcgcaagcctatcgcgaacgtatcgttggcccagtgcgcggcaagctgcccgaaagcgtggtacgcagtattgaagaacagctctccggtgcctgcaccacagagatcgccgcctttgacgagttcactgcgctcttgaccgacagcagcctggtgggggaatacgaccacatcgtgttcgatacggcaccgaccggtcacaccatccgtctgttgcaattgccgggggcatggagcgagtttctggagcagggcaaaggcgatgcttcctgtctggggccattggctggactggaaaagcagcgcagccaatatgctgaggccgttgcagcactctctgatgccgggaaaacacggctgatcctggtcgcccgtgcgcaagcctcgaccctgcgggaagtggcacgtacccatgacgaactggccgccatcggtcttgccaatcagcaactggttatcaatggcatcttcccgcaaagcgagctggttgatgatcccttggcaacagccgtatggcaacgtgagcagcgggctatggctgatatgccagcgctgctggcaagtttgccacaagacagagtgccgctgttagcgaccaatctggtgggcgtggacagcctgcgccagttactgggtgcagcatcggtcactgggactgatgaggttgagagcgcaaccactgaaccacaccccggattgaaacaactggtcgatgagctggccagcgatggccacgggctcatcatgctgatgggcaagggcggtgtgggtaaaactaccttggctgcggcagtggcggtggagcttgctagtcgaggcctgccggttcacctgaccacctcagatcccgccgcccatttgggggagacactggcaggggcactgcccagcctggaggtcagccgtatcgatccccacgccgagaccgagcgttaccgtgctcaggtgctggctaccaagggggcgagtctggatgcccagggccgcgccctgctggaggaagatttacgctccccctgtaccgaagagatcgccgtgtttcaggccttctcaaggatcattcgcgaggcgggcaagcgcttcgtggtgatggatacggcgcccactggtcataccctgctgctgctcgatgcgactggtgcctatcaccgagagatcgcccgtcagatgggtggcaaagggctgcacttcaccacccccatgatgcagctgcaagacccgaaacagaccaaggtaatgatcgtcaccctgcccgagcccactccggtacaggaggcggccaacctgcaagccgacctgcgccgcgccggtatcgagccctgggcctgggtagtcaatcacatgttggccccggccagcgtcacctcaccgctgctggcccagcgagcgtatcgccagcagccccatatcgaagcggtcaaggaggagcatgccaagcgttatgccgtggtgcccttgcaagctgtcgagccggtgggcgtgaaagcgctgcaagatttatgtcaccccatctacaaggagatgtga

SEQ ID NO: 274190 - DNA, 1093 bp, Unknown
  Bacterial polypeptide expressing nucleotide sequence isolated from the Sargasso Sea
gtagcacagcgaaatggagtttcattaattcatcaggaaccacaatcattttcccatctttctgtagcagaaaatattttcatgggtcatatggatggaaacaatttatcaagagtcaagtggcaagaaattaatagtaggtcaaatgaaattttagagtcaataggattgaaaattgatccaaaaataattatggatggtttatcaattgcagatcaacaaatgatagaaattgctggagctctttctaaaaattccaaggtactaataatggatgaacctacttcaccattaacaccaaatgaggtaggtaaattatttgaaattgttaacaaactaaaatcaaatggaatggcaataatttttattagccatagattagaagagattagacaaatttctgacagagtaactatttttagagatggtgatttaattaccacaaaaagaataaatgaagttaccaatgagcaaattataaaatttatgatcggcagaaatattgatgacacagaagttaaagagaatgagtttcttaaaacagaagattatattttgaatgtgaaaaacctctctttatcaaaaaaatttgatgatatttcgtttaatttaaaaaaaggagaaatattaggttttgcaggtcttgtgggggctggaagaactgaagtagcaaaaagtatttttggtgcagaaaaatttgataaaggtcaaataatttttaaagacaaaagtattgtaaacaattctcctaatgaggcaattaatagaggttttgcctatgtacctgaagatagaaaacaaatgggtatttttggccctgttgctgtagaggacaatgtaacatcagcagtaccgaaagacatttctaataatttaggtttaataaatactaaaattgttacttcaatgacaaatgattatattaaaaaatttaacattgtcctaacatctggaagacagttaattgaagagctatccggtggcaatcaacaaaaatgtataatttctaaatggttactttctaaacctaaagttttaattttagatgaacccactagaggggttgatgttggggtaaaatcagaaatgtaga

SEQ ID NO: 274191 - DNA, 1069 bp, Unknown
  Bacterial polypeptide expressing nucleotide sequence isolated from the Sargasso Sea
aaagatctaccaggacgcggagaccatactcaaagacctcggaatacagttggatgtccgttctcctgcaagcggactaaccctggcggcacagcaggcggtcgaaattgcaaaagccatttcgctgaatgtgaaggtgctgataatggacgagcctacagcatccttatcatcccatgaagtctctcaactgttcagtgtgacccgaaggctacgggatgagggggtagcggtgctgttcatcagtcaccgccttgaagaagtattcgaaattgccgatagaatcacagtttttcgggacggtcataagatttcaaccaatcctgtaaacgaggtaacccgagaaagtttgattcaggaaatggttggcagagaagtttccaaattctatcagtccagtaaaaaagctgtagaagggaaacaagtctgctctataaaaaatctaaacaaaaaaacagtattttctgacattaattttgatcttcaccaaggagaaattttaggctttgccggattggtgggttccaggagaaccgatgtggggcttgcgatctttggtgtgtctcctgcggattccggatcgatcgaaatcgaagggcaaactgaagacatccaatctccgcaacaggctcaaaaatttcgaatcgcatacatgaccgaggatcgcagaaaactcggactggcaatgcccatgagtatcacagaaaacatcaccttggcatcccttaaaaaataccttggagcttttgggtttgtcgatagtgaaaaagaagagcaaaccgctggagagttcaagaaccggcttgaaatcaaaaccccttccctgacccacgaagttgggaaattgtctggcgggaaccagcaaaaagtgatgttcagcaaatggctgaatacccaacccaggatttttattttggacgaaccgactcgagggattgatataggagccaaggcagaggtccatcaaatgatcagagaattggcgaaagaagggattgccatcatttgtatctcttcagacctccctgaagtccttgctctcagtgacaggattcttgtgatgcgggaa

SEQ ID NO: 274192 - DNA, 835 bp, Unknown
  Bacterial polypeptide expressing nucleotide sequence isolated from the Sargasso Sea
atggaggaatgtcgcgtggccgaagttttgctgcaattggacggcatatccaaatcatttcccggtgtaaaagctaacgatgaagtaagttttcaaatcaattcaggcgaaatccacgcactactgggcgaaaacggtgcgggaaaatcaacgcttgttaaaatgatatacggcttaatgcagccagattctggcagtatgaagctgggctcagaaaatttcagaccctcagagccaagtaaagctcggcaaagtggtatagcaatggtcttccaacatttttccttatttgatgctttaaatgttgccgaaaacattgctttaggaatggaaaatccaccaagattacaagacttgtcagaaaaaattgaaaccgtgtcacaatcatatgggcttccattgggccctagaagattggttggccaattatcagctggggagcgtcaacgagttgaaataattcgatgccttctccaaaatcctaaattacttataatggatgagcctacctctgttttgacaccaaatgaagtcaaaacactttttgagacgctgttaagattaaagggcgaaggcaagtcaatcttatacatctcacataaattggaagaaattcgcgaaatttgtgattatgcaacaattcttcgaaacgggaaaaaagtaggatcctgtataccgagagacgccagcgcaaagcaaataggagaaatgatggttggcaagtctttctccagcccttctcgaaaaactcgagcatttggtgaggaattattgaaagtttcaaatctctctattcgaactaaagacttttttgggacgtcattatcagatatca

SEQ ID NO: 274193 - DNA, 593 bp, Unknown
  Bacterial polypeptide expressing nucleotide sequence isolated from the Sargasso Sea
aatgaaaaaatccataaaaattcaaaatatatcaaagagtttcccaggcgttaaagcaaattcaaatgtctcttttgatatagattctggatctattcacgctgtagttggggaaaatggtgctgggaaatctacattaatgaagattctttatggaatgattaaaccagattctggagatatttatgtttttgacgaaaaaatctcacttagttcaccaaaagatgcaataaaatatggattaggaatggtacatcaacattttatgttggctgataattttaccgttcttgaaagtatcatcttaggcattgatagtcccggtatagcaaatttaaagcttgaaaaatataaagattccctgcaggaagtaatgaaaagatactcattaaatgtagatcttgaccaatatgttgacgatcttggagtaggtgaaaaacaaagagtcgagattctaaaggtattatttagaggagcaaaaatattaattcttgacgagcctacagcagttttagttccacaagaagttgatgaactttttaaaaacttaaaagatttacaaaataacggagtaacaataatttttatatccc

SEQ ID NO: 274194 - DNA, 829 bp, Unknown
  Bacterial polypeptide expressing nucleotide sequence isolated from the Sargasso Sea
tatgctcccctcgcccattctagcgctttccgggatcgtcaagaccttccccggggtgcgtgccctcgatgaggcgggcctcaaggtctatccgggtcaggtgatggccctgctcggcgaaaacggcgccggcaagtcgaccctgatgaaggtgctgaccggcatctaccaggccgatgcgggcagcatcagctatcgcggccagccggttcacttcaagggcccccgcgactcccaggatcaggggatcagcatcatccaccaggagctgaacctgctgcctgagctgtcgattgccgccaacatcttcctcggccgcgaacctcgtacccgttttggcagcatcgaccacaaacagttgcgcgaacgggcaagcaccctgctggcacggcttggcgtcaagcacggcccggatacccggctcggggatctctccatcggcgaacagcagatggtggagatcgccaaggcgctgtcgttcgatgccagcgtcatcatcatggacgagcccaccgatgccctcaccgacaccgagaccgagcagctgttcgtggtcatccgcgagctgcgtgagcagggctgcggcatcgtctacatctcccatcgcttgaaggagatcttcgaaatctgcgatcgggtcaccgtgctgcgcgatggcaagtggatcggcgagcaggcggtgagcgagctagacgaagacaggatcatcgagatgatggtgggtcgccggctggaagagcagtacccccgcctcgcccgcgagcttggcccggtcagcctgcaggtcaaggagctggccggtcccggcgtgcgcggggtgagcttctcc

SEQ ID NO: 274195 - DNA, 292 bp, Unknown
  Bacterial polypeptide expressing nucleotide sequence isolated from the Sargasso Sea
atgaatacaaaccttaaaatttcaaatgtaactaaaatatatcctggttgtgtcgcaaacgacaatgtttcgctcgagtttaatagtggtaaaatttatgctcttcttggagaaaatggtgctggcaaatctactctggttaaaattctatcaggcgtcatcattcctgatgaaggtaaaatttatttaaatgaaaacaatctaaaacttaattcacctttagatgcgaaaaaaaatgatattggaatggtttttcagcattttaatcttttcgaaactttatctgtattga

SEQ ID NO: 274196 - DNA, 871 bp, Unknown
  Bacterial polypeptide expressing nucleotide sequence isolated from the Sargasso Sea
aaaaaaatgaatgaaattgcctatcaaaaacttttagatttaggactagatatagatgtaaaaaaattaatgaaagaattgacattatctgaacaacgcatcgtagaaattgctagggcaatggtaggtaatgcaaaaatattaataatggacgaacctactgcagctttaacaaacaaagactctaaaatactttttggggttttagaaaaaattagaaaaactggtgtaggtataatctatatatctcattatcttgatgaagtatttgaagtttgtcaaaaaattgttgttttgagagatgctaaaaatgcaggagaattcttaacttctaaatccaatcatgatgaagttttatctgccatgttaggcaatgctgtacaaaacttatatccaccaaagcaaaaaaataaaaatgatcaaattgcattaagcttgaaaaatgttactttttcaggaactcttcacgacattagttttgatgttttaaagggtgaaatatttggagtttttggattattaggatcaggtttagaaaatttaggaagaaatatttatggttttttaggtaaaaataatcaaggacatatatctttatttggtaaagcatatagtcccaaaaatacacaatatgcaaaagaaagaggtatcggctttataccagcagagagaaaaacagagggaattttatctgaattacctttaagatcaaacttaacaatcccatttttaaataattttattaagaatggtattatttcaataaataaagaaaaagaatttgcaaacaaatggattaaagatttcgatattaagtgtttaaattctgaacaattatttagattcttatcaggtggcaatcaacaaaaag

SEQ ID NO: 274197 - DNA, 913 bp, Unknown
  Bacterial polypeptide expressing nucleotide sequence isolated from the Sargasso Sea
agcataaatgtaagtttaagtaccaatgaaatagttgcaaatcttaatacatctcaatggcaagtaatagaaatttgtaaagctttggcaaaaaaaccaaagtttattgttatggatgagccaactgcatcactagatgaaaaacaaatagataatttatttgaaatcatcaacacattgaaaaaaaatggcattggtataatttatatatcccacaaattaaaagagattatcaaaatttcagatagaataactgttttaaaggatggtaagttaaatgattctttcattaaaaatgaagttaacgaagaaggtttaataaaatctatgattggagaaaatatctccataaaaaataaacataaaaataaaattaattttgaaaatccagttctccaaataaataattttaattatttaaatatatttaaaaatataaacataaatctttttgagggagaggttttgggcttaagtggtctattaggctcaggtgcaaacgaactacttagatgtgctttcggaataatgaaacaagatagtggacaaattttattaaataataaaaatattataataaataaacctagggatgcagttgcaaatggcattggttacatcccatctgatagaaaaaatgaaggactaattcagaacaattcaataaaagataatagtgtattaactatttttgataaattgactaaaattgggttttttaattttaatgaagcttcaaaaactactaatagttatataaacaaattagacataaaagtttcaaatattgatagttttgttatgaatctttcaggaggaaatcagcaaaaagtagttattgctaaatggcttgcaaaaaattgtaaaattttattatttgatgagccaaccagaggcatagatgttgcggcta

SEQ ID NO: 274198 - DNA, 864 bp, Unknown
  Bacterial polypeptide expressing nucleotide sequence isolated from the Sargasso Sea
atacatgcaattgtaggtgaaaatggtgccggtaagtcaacattaatgaagattctttatggaatgacaaagcctgatgatggggaaattgaaatatttgatgaacctgcatctatgtcatcaccaaaagatgcaatatatcgaggaattggaatggttcaccagcattttatgttagcaaaaaacttaactgttcttgaaaatataattctaggtattgacaggccctcgcttaaaaatttaggtcttaaaaaatacaaaaaatcaatacaagaagtcatgagtacatattccttagatatagatttagacatgttcgtagaagaattaagtgttggggagaaacaaagagttgaaataataaaggttttattcagaggtgcaaaaatattaattcttgatgaacctactgctgttttagttccgcaagaagttaatgaattattcaaaaaccttaataatttaaaagaaaacggtgtaacaattatttttatatcacacaaacttgatgaagttcttgaaattgctgacgccattagcgtgatgagggcgggtaaattaattgattcagtaaataatgataatgtcagcaaaactgaattagctgaaatgatgattggaaaaagcttgcctactccacctccaagaagtactgaaaaaaaacaaaatgtaatattagatttaaaaaatcttacctcagaaacggttgatggtagaaagctttttacagacgtttcctttaatgtctttgaatcagaaatacttggtatagctggtgttgaaggtaacggccaaaaggaagttgttgaatcaataattggtataaatgatatcgaatcaggtgaaatattttttaatggagaa

SEQ ID NO: 274199 - DNA, 582 bp, Unknown
  Bacterial polypeptide expressing nucleotide sequence isolated from the Sargasso Sea
tcggcctctccgacgagaccgccggcacgatcgagatcaacggcgtccgccatcagatcgcccgcccctctgaggcgatcgcggcgggtcttgcctatgtgacggaggaccgcaaggtctcgggcctcgttctcaccggcgatgtccgggaaaatctctgccttgcgacgctcgaccggatgtcgaccccgctgatgatgaacggcaaggccgaaaccgaagctgccgggcgcatggtcgagacgctcaacatcaagaccgcgtcgctgaagcttggcgtttccaacctttccggcggcaaccagcagaaagtcgttctcggcaagtggttcctgaccgagccgaacgtgctgcttctggacgagccgacccgcggcgtcgatgtcggcgccaagcgggaaatctatcgcgtcatgtccgatttcgccaaggccggcgggaccgtgatcatgatctcttccgaaaccgacgaagtgctcggcatggccgaccgcgccatcgtgatgcgcgatggccgcgtcgccggaaccctggatcgggcggaaatgtccgccgaaaaactgctgcatctcgcggcgtaaa

SEQ ID NO: 274200 - DNA, 268 bp, Unknown
  Bacterial polypeptide expressing nucleotide sequence isolated from the Sargasso Sea
atgaacacgaatctgaaagtatcaaatgtaacaaaaatttatccaggatgtgttgctaatagtaatatatcattggaatttaaaagcggaaaaatttatgctttacttggagaaaatggagcaggaaaatcgactttagttaaaattctttctggcgtagtaattcctgacaaaggagaaatttttttaaataacaaaattttaaaattaaactcgccgatagatgccaaaaaaaacaaaattggtatggtatttcaaccattttaat

SEQ ID NO: 274201 - DNA, 399 bp, Unknown
  Bacterial polypeptide expressing nucleotide sequence isolated from the Sargasso Sea
tatgagaacaaatttaaaagtttcaaatataactaaaatttatccaggatgtgttgcaaatgataatgtctcgttagaatttgaaagtggaaaaatctatgcattacttggagaaaatggagctggaaaatctacattagtaaaaattctttctggagtaattttgccagatgaaggagaaatttttttaaataataaagttttaaaattaaattcaccaatcgatgccaaaaaaaataagattggaatggtatttcaacattttaatttatttgagactttatctgtatttgaaaatttgattatagactcaaatgaaacaagaggaaatctaagagaaaaaattaaaatcataatgaaaaaatataattttaatattgatctagatatacctgtttt

SEQ ID NO: 274202 - DNA, 658 bp, Unknown
  Bacterial polypeptide expressing nucleotide sequence isolated from the Sargasso Sea
gtcatgtctaaatctaattttagtgctttaaatatcgaatctgtcagtaaaaaatttccaggggttcaagcattagacaaggtaagtatgaatatcttaactgggaaagtgcatgccttaatgggagaaaatggagcaggtaaatctacactaatcaaaattcttgcaggagcttatagcaaagatgagggaaaaattttttttgacgaaaatgaacttacaattgagtcaccccacgatagtttagaccttggaatcaaggttgttcatcaagaaatttctcttatttcaggatttacagtgggggaaaatatttttttagaagactttcctgctaacaaacttggaattgtcaattggaaaaaattatataaagattctgaggaacttttctctaaaataggttttgatttagatccaagagcaattgtatcggatttatcaatttctcaacagcaaatggtagaaattgcaagagcagtttttcaaaatgctagtatagttataatggatgagccaacctcttctttaaccccaaatgaaataaaaaaattatttgatgttattgaaaacctcaaaaaaaataataaaacaatactgtatgtaacccataaaattgaagaaatttttcaaatagctgatgaagttacagtcttga

SEQ ID NO: 274203 - DNA, 346 bp, Unknown
  Bacterial polypeptide expressing nucleotide sequence isolated from the Sargasso Sea
ttgagtaccgcttcagataaattcttatttcaaagtaaagctataagtaaaagctttcctggtgttaaagcaaatgaagacatatcattatcagtggaaaaatctcaaattcatgctcttttaggagaaaatggtgctggcaaatcaactctggtaaagattttttatggtcttttgcaacctgataaaggggaaatgcttttagaaggctataaatatcagcctaaaaacccaaaaaacgcaagaagttcaggtataggcatggtattccagcatttttctttattcgagcctctaacagttctggaaaatattttgctgggtttggatcttcaaggtaaataaa

SEQ ID NO: 274204 - DNA, 322 bp, Unknown
  Bacterial polypeptide expressing nucleotide sequence isolated from the Sargasso Sea
tatgaacacaaaacttagggtatcagaaatatcaaaaatatatccaggttgtgttgccaatgataaagtttcattggaatttggaagtggaaaaatatacgctttattaggagaaaatggcgcaggtaagtcaactttagttaaaattttatcaggagtcgtaagacctgataaaggtgaagtttttttaaatgatgagagtattaaactgaactctccattagatgctaaaagaaataatatcggaatggtatttcaacatttcaatttatttgaaactttatctgtatttgaaaacttaagtatagatagcgataaaaaa

SEQ ID NO: 274205 - DNA, 430 bp, Unknown
  Bacterial polypeptide expressing nucleotide sequence isolated from the Sargasso Sea
atgaacacaaaactaaaagtatctgaaatttcaaaaatttatccaggatgtattgcgaacgacaaggtatcattagaatttgaaagcgggaaaatatacgctttattgggagaaaatggcgctggcaagtctacactagtgaaaatcttatcaggagttgtaaaacctgatgagggtaaagtttttttaaacaatgaaagtattaaacttaactctcctttagatgccaaaaaaaataatattggaatggtttttcaacatttcaatctttttgagactttatctgtctttgaaaatttaagtatcgatagcaacaaaacaaacgaagaccttagaagtttagtcaatgatatattaaaaaaatacaattttaaaattaatctagacgttccagttcttaatttatctgctggtcaaaaacaaaaagtag

SEQ ID NO: 274206 - DNA, 448 bp, Unknown
  Bacterial polypeptide expressing nucleotide sequence isolated from the Sargasso Sea
gtaaaagacaacatcaatatggcgataatggaccgaaattcgcagttttatattatggataccttaaaagagattaaaaatgcctcggctatgcaagaaaaactcaatatcaaagtttcgtattggagtcagttaactcaaagtttatctggaggtaatcagcaaaaaacagtaatcgccaaatggctttctacgaagccagaggttttaattttagatgaacccactaaagggattgatgttcgatcgaaatctgcagttcatgaatttatgggagaattagtaggagaggggatgtcgattatcatgatctcatctgaattaccagagattctggggatgtgcgatcgagttgtggttatgtataagggtttgataaaagaaattttagatgtgaaaaatgcatcctcggagcaaatagtaaaactagcgagcggtgagtcatgaa

SEQ ID NO: 274207 - DNA, 651 bp, Unknown
  Bacterial polypeptide expressing nucleotide sequence isolated from the Sargasso Sea
aatgcctttgactcaagaaaaaacggttctttctctgagtggaatcactaagcagtttcctggagtgttggcaaatgatgatatcaactttgatttacttgaaggtgaggtccacactattcttggagaaaatggtgcaggaaaatccactttgatgagcatcatcgatggtatttatcaacccgacgaaggcactatttcattatacggagaaaaaataaatttctcgaatccacgagattccattgatcatggaattggaatggtattccagcatttcatgttgattcccaatcattcagtcgcagaaaatattactttgggattgaaaggtttgggcaggctgaatattgaggatgtcaagaaagacatacatgaaatttgtgagcgatacgatctccatgttgatccagataagaaaatacgagaattatctataggtgaacaacaaagagttgaaatcatcaaggtgatctaccgaggtgcaaaaatattaatacttgatgaacctacagcagttttaactccacaggaatcggaagctttatataaaatcatcaggagactggcggatcaaaaccattcgatcatcttcatttcacataaaatgaaagaggttctgggatcttcacagaggataaccgttcttca

SEQ ID NO: 274208 - DNA, 977 bp, Unknown
  Bacterial polypeptide expressing nucleotide sequence isolated from the Sargasso Sea
gatcagcaggctcaagtgctgcaccgagttttacgcgagcgggcaaagagcggcgcgtcggtactgtatgtctctcatcgactcaacgacgtattgaacctctgtgattatgtttgggtattgcgcgacggcgaggtggtgcatcatgcgccctccagccggctaacatctgcggagttgatcgggcacatgtcaggagctaacgcattaactaagcggcttgtggatgaggccagacgccccggccccatccatttatcagtgcgtaatctgttgaccgaaaaaatgcagcagcccgtttctcttgattgccaccgtggtgaaatttttggtcttgcgggattaatgggtgctggacgtaccgaattgttggaggccatctacgggcttgctccgcatttcagtggctcggtggttctttgccgcggagaggagcgtatagctctgtcgtctgtcgacgaagccataagatcaggtgtaggcatggtgccagaaaatcgtgctagtcaggggatcttcaggggtctgacgatggcgttcaataccacgatcgccgagcttggccgcattgctaataggcatttattaaaaccccggcgcgagacggccgcggtggagaaattaattcaacggctaaatatcaagagcgaaggcgtcgatcagccaattgaagcgctaagcggtggcaatcagcagaaggttatcttggcgcggtggttgcatcgtgagtgttcgttattattactcgacgagcctactcgtggtgttgatgttgcggcaaagctggcaatccatgacttattacgcgaactacgagatcaaggtctttgcgtggttatcgcgtcgtcggaactgcaagaattactgaccctgtgtgaccgcatcgccgtgatgtcgtcggggcagttggtccgcacctttgatcgtgatgagttcaatcaagatacaattcttgcggccgcatttttcacccacaa

SEQ ID NO: 274209 - DNA, 383 bp, Unknown
  Bacterial polypeptide expressing nucleotide sequence isolated from the Sargasso Sea
aatgaatacaaaacttaaagtatcaggaatttcaaaaatatatccaggatgtattgcaaacaacaaagtatcgttagaatttggaagtggaaaaatatatgcattattgggagaaaatggggctggcaagtctacactagttaaaatcttgtctggagtagtaaaacctgacgagggtgaagtttttttaaatgatgaaagcattaaacttaactctcccatggatgccaaaaaaaataatattggaatggtttttcaacatttcaatctcttcgagactttatcagtatttgaaaatttaagtatcgacagtgacaaaaaagatgaagatctaagagttttagtcaacaatatattaaaaaagtacaattttaaaattgatc

SEQ ID NO: 274210 - DNA, 899 bp, Unknown
  Bacterial polypeptide expressing nucleotide sequence isolated from the Sargasso Sea
aaaacaaattaaagaattaactttaccagaacaaagaattgtagaaattgcaagagctatggttggtaaagctaagatacttataatggatgagcccacagcagctttaaccagcaaagaatcaaaaacattatttgaagctttagaaaaaacaagaaaagctggagtaggtataatttatatatcacattatcttgatgaagtttttgatgtttgtcagagaattgtcgtattaagagatggaaaaaatgcaggcgaatttaaaacgacctcttcaaaccatgacgaagtgttatcagcaatgctaggaaatgcagttgaaaatttatatccaaataaaagtaaaaaagaaaattcagatttagcacttaaatttgataacgttactttttcaaaaaatttatatgatctaaattttgaagtttataaaggtgagatcctaggggtatttggtctacttggatcaggtttagaagatttaggaagaaaaatatatggtatttcgggaaaaacagaaaaaggaaaaatttctctttttggcaaagactatactcctatttctcctcaagacgcaaagaaaaatggtattggtttcattccagcggagagaaaaacagagggtattttatcagaactaagtcttagaaataatatgactataccattcttaaataattttattccaagaacatttattgatacaaagaaagaaaaagaatttaccaacaaatggattactgactttgatatcaaatgtttaagcagtgaacaattatttcgttttttgtctggtggtaatcaacaaaaagcatgcatagcgagatggttagttgatgaggtttcagttttaattattgaggaaccaacaagaggtgttgatcttggtgctagaaaagaaa

SEQ ID NO: 274211 - DNA, 598 bp, Unknown
  Bacterial polypeptide expressing nucleotide sequence isolated from the Sargasso Sea
ctggaggtccggggcgtaggcaagtcctttcccggggtgcgggctctgaacggggtcgacttgtctctgcataaggggcaggttctttccctaatcggtgaaaacggcgccggcaagagcaccctcatgaaaattctcgcaggggttcagcccccggacgaaggcaatatcctgctcgatggggccaaggtcgaaatcgaatctacccgggcagccttggacctcggcatttcgctgattcaccaggaattgaacctagccaccaacctgagcgtgggcgccaacgtcttcctgggtcgcgaaccccttcgcggaggattcatagacgagagcaccataagaactgaatcggccaagtttctcgagatggtcggactcgacgtcgctccggacgtcctcgtgggtgacttgacgatcggtcggcagcaaatggtagagatagccaaggccttatcggtcaattccagggtccttatcatggatgagccaacctccagcctttcgcaggccgagacggagaacctctttaccgtcatcaaggacttgcgcgggcggggagtcagcatcatctacatctcccaccgcctggcgagggaag

SEQ ID NO: 274212 - DNA, 891 bp, Unknown
  Bacterial polypeptide expressing nucleotide sequence isolated from the Sargasso Sea
tagatttagatatgtttgtagaagattaagtgtgggagaaaaacaaagagttgagataataaaggttttatttcgaggtgcaaaaatattaatacttgatgaacctacagctgttttggttccacaagaagttagcgagctattcaaaaatcttaataatttaaaacaaaatggtgtaactattatttttatatctcacaaacttgacgaagttcttgagattgctgacgatataagtgttatgagggcgggagaacttattgattcagtaaagaatgaaaatgtaagtaaaactgaattagctgaaatgatgataggaaaaagtttaccaaccccacctccaagaggtacagaaacaaaacaaaataaaatacttgatataaaaagtattacctcagaatctgttgatggaagaaaattttttacagacgtttcttttagtgtttttgaatcagaaatacttggtattgctggtgtagaaggtaacggacaaaaagaagttgttgaatcaataattggtattcaaaatattgaatctggagagatcttctttaatggtgaaaatataaataataataccacaaggcaaagattggaatcaggaataagttttattcctgaagataggcaacttcaagcaatgattatggacatgaatcttacaaataacgtaattataggaagacaaaatattgaaaaatataaatcaaatcttgcaacagtaaaaactaaaaatgccattaaagaatctgagaatgttatctctttgtttgatgttaaaactccaaatactaacacactagctactgcactttcaggaggtaaccagcaaaaatttgttgttggtcgtgaattagaagataacccttctttattaattgcttcacagcc

SEQ ID NO: 274213 - DNA, 634 bp, Unknown
  Bacterial polypeptide expressing nucleotide sequence isolated from the Sargasso Sea
tatgcaaccaatcgtcgaatttcagaacatttgtaaagaatacccaggtgtagttgccaacaataatgtctcttttgaaataacaagacaatctatacatgctattttaggtgaaaatggcgctggtaaatcaactttagtaaaaatattgtacggacacgttaaaccggataaaggtcaaattataatcaattctgatttagcaacaattaattcaccaactacagctcaaagtttaggtataaatatggttttccaacattttagtctatttgagtcgctgacagttgcagaaaatttaatactaggtatgagtgaaaaaatatcgttaagtaaactaaaatcaaaatctgagtctatatgcaacaagtatggttttaatttaaatctaaattcacctataagtgcactttctgtaggtcaaagacaatctgtagaaattgttagatctcttttaaacaatccagaaattttgataatggacgaacctacctcagtcttaactcctgaagagattaaaaaattatttaaaattataaaaaaattagtagccgatggtttaacagtaatttttatatctcataaattagatgagattattaatttatcagatcatgtaacaattatgagaaat

SEQ ID NO: 274214 - DNA, 727 bp, Unknown
  Bacterial polypeptide expressing nucleotide sequence isolated from the Sargasso Sea
aaatatagtagcccctttgatttggtattttataaaaatgaaatcattgcaataactggcttattaggcagcggaaaaacggcaatagcctctgctatttttggtttgaaccctctactagagggagacatgcttttacacggcgagccttataatcctaaaagtcctgccgatgccatatcaaaaggtatttttatgtgtccgaaggataggtcgacaaatgctgtggtttctgacttcgacattacaaataatatggttctcccgttcttggatcggcacagttggttttcatttctgaagccaaaaaatttagaaagaaaagcaactgtgtcgatctcagaattagggatagtgtgtcagtcagagcttgatttagttactacactgtcagggggcaatcagcaaaaggtaatgattggtcgttggctttctgaaaaatcagaagttttgttacttgatgagccctttcaaggtgttgatataaaagcacgtagggacattggaagccagataaggcagtcatctaaagatagagcaacattagtcttcgtcgccgagctagacgaagcagtagaaattgctgataaaatcgttgttttacatgaaggttcttattctggtatcttcgagaataaagagaacaatattgcagatattctttctctctatagtggaaaaccgtctgaaactttagctgaagcaagaggaagtttaaatgggtgaa

SEQ ID NO: 274215 - DNA, 847 bp, Unknown
  Bacterial polypeptide expressing nucleotide sequence isolated from the Sargasso Sea
tatttatatatctcatcgtctcgaagaagttttccgtattgctgatgttgtgacagttctgaaggatggtcaactcgttgagacagaatcgatcagcaaacttactcgagctgaattggtcaagatgatggtggggcggactcttgaagaagtttttccggtttcaaacaatcaacccgggaaatcggtgctgatcgcagagaacatttcgaatgataccgtccttgaacaagtcagtttcgatctaaggcaaggagaaatcgtcggactggctgggatggtcggttccgggagaacggaactggcaagagtccttttcggagctgatcctttgatttccggaagcataaaaatcaatggtgaaaatgcttattttaagaacccttctgaagcgattaagaataaaatttcacttgttccggaagacaggaaggagcagggacttttcacagaattgcccatacgaaacaacatcaccatgccgatactgaggaaaatttctcagtggggatttctcagccgatcgaaagaacaggaaatcgttaatcagtcaagaaatcagctatctatcactatggcgtccggaagccaagaagtgcagtatcttagtggaggaaatcagcaaaaagtagttttggcaaaatggcttcagacaagaccggaggtcatcattatggatgaaccaacccgaggagttgatgtaggagcgaaatttgaaatctatcaattgatgcgtcatttaaaccaagagggtattggaatattgatgatctcatctgaactcaccgaaatcctcggactcagtgatcgaattcttgtcatgcgggaggggaaggatcgttgctga

SEQ ID NO: 274216 - DNA, 388 bp, Unknown
  Bacterial polypeptide expressing nucleotide sequence isolated from the Sargasso Sea
atgaacacaaatctaaaagtaacaaatataaccaaaatttatcccgggtgtatcgcaaataaaaatatttcattagaatttaaaagcggaaaaatttatgcattgcttggagaaaatggagctggaaaatctactttagtaaaaattctttcaggcgtaataatgccagatgagggtcaaatatttttaaataataaaactttaaaattaaattcaccaattgatgctaaaaaaaacaagataggaatggtatttcaacattttaatttatttgagactttgtccgtatttgaaaatcttattatagattcaaatgaaacgagggaaaaactaagagaaaaaataaaaacaataatggataagtacaatttttctattgatttagata

SEQ ID NO: 274217 - DNA, 381 bp, Unknown
  Bacterial polypeptide expressing nucleotide sequence isolated from the Sargasso Sea
tatgaaagagcctattcttcagtttaaaaaaatttctaaatcatacggaaatgtattagccaataataaaatttcatttaatattaaaaaaaattctgttcatgcattgttaggtgaaaacggtgcgggtaaatctacattagtaaaaattttatacggcttacttcaacctgatgaaggagaaatactttttaatgggaatatctttagtactaaatctcctaaagagtctatggcaaagggcatagggatggtttttcaacatttttccctttttgaatctttgtcagtaaaggaaaatttgattctaggtttgaatgaagaaatctcatatggagcgcttgtaagagatattttagcaatttcaaaaaaatatggctt

SEQ ID NO: 274218 - DNA, 946 bp, Unknown
  Bacterial polypeptide expressing nucleotide sequence isolated from the Sargasso Sea
gatggatatgaaagccggggagatccatgcgctggttggagaaaacggggcaggaaaatcaacattgatcaaaatcctgaccggcatccagcatgccgatcagggagaagttttgcttcaggggcaaacggtcaggatttctgatgcccaggaagcacaatctcttggcattgcagctatcttccaggaacccatggtctttccggatttggatgtggcagagaacatcttcatcagccatcgagaccgaggtttttttatccgttggaaaaagatctaccaggacgcggagaccatactcaatgacctcggaatacagttggatgtccgttctcctgcaagcggactaaccctggcggcacagcaggccgtcgaaattgcaaaagccatttcgctgaatgtgaaagtgctgataatggacgagcctacagcatccttatcatcccatgaagtctctcaacttttcagtgtgacccgaaggctacggcatgaaggggtagcggttctgttcatcagccaccgccttgaagaagtatttgaaattgccgatagaatcacggtttttcgggacggtcataagatttcaaccaatcctgtaaatgaggtaacccgggaaagtttgatccatgaaatggttggcagagaagtttccaaattctatcagtccagtaaaaaagctgtagaagggaaacaagtctgctctataaaaaatctaaataaaaaaacagtattttcagacatcaattttgatcttcaccaaggagaaatcttaggctttgccggattggtggggtccagaagaaccgatgtggggcttgcgatctttggtgtgtctcctgcggactccggatcgatcgaaatcgaaggacaagcggaagacatccaatctccgcagcaggctcaaaaattaggaatcgcatacatgaccgaggatcggagaaaactc

SEQ ID NO: 274219 - DNA, 871 bp, Unknown
  Bacterial polypeptide expressing nucleotide sequence isolated from the Sargasso Sea
agcggactaaccctggcggcacagcaggcggtcgaaattgcaaaagctatatcgttgaatgtgaaggtgctgattatggacgagcctacagcatccttatcatcccatgaagtctctcaactgttcagtgtgacccgaaggctaagggatgaaggggtagcggttctgttcatcagccaccgccttgaagaagtattcgaaattgccgatagaatcacggtttttcgggacggtcataagatttcaaccaatcctgtaaatgaggtaacccgggaaagtttaatccaggaaatggttggcagagaagtttccaaattctatcagtccagtaagaaagctgcagaggggaaacaagtctgctctataaaaaatttaaataaaaaaacagtattttctgacatcaattttgatcttcaccaaggagaaattttaggctttgccggattggtgggttccaggagaaccgatgtggggcttgcgatctttggtgtgtctcctgcagattccggatctatagaaatcgaaagaaaaactgaagacatccaatctccgcagcaggctcagaaattgggaatcgcatacatgactgaggatcggagaaaactcggactggcgatgcccatgagcatcacagaaaacatcactttggcatcccttaaaaaataccttggggctttggggtttgtcgatagtgaaaaagaagagcaaaccgcaggagagttcaagaaccggcttgaaatcaaaactccttccctgactcacgaagttgggaaactgtccggcggaaaccagcaaaaagtgatgttcagcaaatggctgaacacccaacccaggatttttattttggacgaaccgactcgagggattgata

SEQ ID NO: 274220 - DNA, 924 bp, Unknown
  Bacterial polypeptide expressing nucleotide sequence isolated from the Sargasso Sea
catggcggatgccgcccaaaagccgttgctcaaaatgcacggcatcagcaaagccttccccggcgtccaggcactgaataaggtggcccttacactattcggtggcgaagtactggctctgctcggtgaaaacggggccggtaaaagtaccctgattaaaattctcggaggagcgcagcagcaggataagggaaccattgaaattaatgggaattcagtgcaactaaacaacccccaaagctctcaagctgagggcatcggaatcatctatcaggagtttaacttagtacccggtttaacggcccgagagaatatttttctcgggcaggaaccttccagtgtttgctttattccacgagtgcaagaggaagaaaagtctcgagaattgttcgcacgaatcggggtggaaattgatcctaacacaccttgctctgagctcactgtggctcagcagcaagttgtcgagattgccaaagcactagcacaagatgcaaagatcattgtcatggatgaacctacagctgcactcaccccgcgcgaagtgcaaagactgctgaaaatagtccaggaattacgcatacaaggtattggaatcatctacatcagtcatcgacttgatgaaattgatgccattgctgaccgggtaactgtcttacgtgatggcgaacatgtagccactcgaaataaatctaaactacaccgtaatgaaatgattgaactaatggtaggccgtagcctggacaaggaattcccatcacgggaatgcattcccggtccggtgcgtttagctgtaaggaatctgatgcgaagcaatacggtgcgtaatgtcacatttaaattacacgccggagaaatcgttgggcttactggattggtcggagcgggccgcacagaaacagcacgactgatctttggggctgactc

SEQ ID NO: 274221 - DNA, 351 bp, Unknown
  Bacterial polypeptide expressing nucleotide sequence isolated from the Sargasso Sea
tatgaatagtacatttattaaattcaataatataacgaaaaagtttccaagagttgtagcaaatgatgatgtttcttttgatattaaaaaatcatctgtacatgctttattgggtgagaatggcgcaggcaaatctactttggttaaagttttatatggtttacttgcagctgatcatggaactataacttttaatgatcaagaattaaatatctcttctccttctgaagctagaaataaaggtattggaatggtattccaacatttttctctttttgaatcattaacagttagagataatttaattttaggcattgataaaaaaatttcttattctgatttaaaagatca

SEQ ID NO: 274222 - DNA, 463 bp, Unknown
  Bacterial polypeptide expressing nucleotide sequence isolated from the Sargasso Sea
aatgtcagtaaagtcaaataccacaacaccgcattattcaaagctatctaaattcttttttttagcaaataaacaacaggaaaatttaattacaaataattattctaaaaaagttcaattaaaatataataacatgaatcaatcaatttatcaacttagcggcggtaaccaacaaaaagttgtatttagtagagcactagcatcaaacccaaaacttttacttctggatgaaccgactagaggagttgatgtaggtgccaaattagatatatataatttaattattcagttaacaaaaaatggttgtggtattgtattaaactcatctgatttatctgaaattatgggtatgtgtgataaaattctcatactaaaagatcatgaacaatataaaatattagaaaattttaaaataaactctcaagatgtattagcaaatttctatgaaagtaaaaaacaatga

SEQ ID NO: 274223 - DNA, 658 bp, Unknown
  Bacterial polypeptide expressing nucleotide sequence isolated from the Sargasso Sea
gatgagtgattatattttagaacttaataatattacaaaaaattttcctggtgttaaagcgcttgataatgcaaattttaaactcaaaaaaaaatcaatccatgcacttcttggtgaaaatggagcaggtaaatctacattaattaaaatcataacaggagtttacaaccaaaacgaaggtaaactatttttaaatgatcaagagaaatctttttcttcaccaaatgaagcaatgaatgctggaatttcagttgtgcaccaagaaagaaatttaattaggaggttttcggttggtgaaaatttaatgttaaccaaccttcctaaaaataatttaggtttaatagattataatactgttgcaaaagaatcaaaaaaatggctcgatattatggagttggatatagatccaaatactatagtctcagatttaacagttgcaaaaatgcaactgtgtgaaatagctaaagctttatccttagagtcaaaaatactgttattagatgagccaacttcatcattatccccacaagatacaaaaaatttatttgcattacttaaacgattagttgttgagcaagatgtaagtatagtttttgttagtcacaaattagaggaagtatttgaaatatgtgatgaagttactgttttgagagatggt

SEQ ID NO: 274224 - DNA, 392 bp, Unknown
  Bacterial polypeptide expressing nucleotide sequence isolated from the Sargasso Sea
aatgaatacaaatcttaaaatttcaaatgtaactaaaatatatcctggttgtgttgcaaacgacaatgtttcactcgagtttaatagtggtaaaatttatgctcttcttggagaaaatggtgctggaaaatctacactagttaaaattttatcaggtgtcatcattcctgatgaaggaaaaatttatttaaatgaaaataatctaaatcttaattcgccatcagatgcaaagaaaaatgatattggaatggtattccagcattttaatctttttgaaactttgtctgtgtttgaaaacttaataatagattcagatgaacaaagagaaagtttaagagaaaaaattgatttaattatgaaaaaatacaattttccaattgatcttgatattt

SEQ ID NO: 274225 - DNA, 1048 bp, Unknown
  Bacterial polypeptide expressing nucleotide sequence isolated from the Sargasso Sea
ctggtgggcatcaccaagcgctacccggccgtggtggccaacagcggcgtgtcgctcacggtgctgccgggtgaaatccacgccgtgctgggcgaaaacggcgcgggcaagtccacgctgatgaaaatcatctacggctcggtcaagcccgacgaaggcagcgtgttcttcaacggccaggccgtgcaggttcgcaacccgcaagaagcacgggccctgggcattgccatggtgttccagcacttcagcctgttcgacaccctcacggtggccgagaacgtgtggctgggcctggacaagagcctgacgctggccgaagtgaccggccgcatcaccgccaaggccgccgaatacggcctcgacatcgaccccctgcgccccgtgcacacgctgagcgtgggcgagatgcagcgcgtggaaatcatccgcgcgctgctcaccaaccccaaggtgctgatcctggacgagcccacctcggtgctcacgccccaggcggtcgaaaagctctttgtggtgctgcgcaagctggccagcgagggctgcagcattctctacatcagccacaaactgcatgagatccgcgcgctgtgcaccgcctgcaccgtgctgcggggcggcaaggtcacgggcgtgtgcaacccggccgaggaatccaatgcatcgctgtcgcggctgatgattggcgccgagccgccggccctggagcaccgcgcggtgcagaccggcgccacggtgctgcgcgtgcagggcctgtcgctgccgcgcgccgaccagttcggggtggatttgatcgacctgcagttcgaggtcaaggcgggcgaggtggtgggcattgccggggtgtcgggcaacgggcaaaaagagctgctctacgcgctgtcgggcgaagaccagcgggctgacgcggcctgcatccaggtgtccggccagaacgcgggccgcatgggtcccggccagcgccgggcgctgggcttgcattttgtgcccgaagagcgcctgggccggggcgccgtgcccaccatggggctggcgcacaacctgctgctca

SEQ ID NO: 274226 - DNA, 1138 bp, Unknown
  Bacterial polypeptide expressing nucleotide sequence isolated from the Sargasso Sea
atgagtctcgccgttcgcttcgacgatatccgcaaagactttggcccggtgcgcgtgctgcatggcgtgagcttcgacctgacgccggggcgcatctatgggttgctcggcgagaatggcgcgggcaaatcgacgctgatgaagatccttgccggctacgaaacggcaagctcgggcagcgtgctggttgacggccacgcgcagcagttcgccggttcccgcgacgcggaagcgcaaggcatcgtgctgattcaccaggagttcaatcttgccgagcatctgacgatcgcgcagaacatgtatctcggccatgaaaaaaagcgcggctggttcgtcgacgatgccgccatgcgcgccgatgccgcgcgatatctcgcgcaggtcggtctcgagaaagcgccggatacgaaagtgcgcgagttgatcgtcgcggaaaagcagatggtggagatcgccaaggcgctgtcgcgccgcgcgcgattgctgatcatggacgaaccgaccgccacgcttacgccggcggaaaccgagcgccttttcacgctgatggccaagctcaaagccgacggcgtgaccctcatctacatctcgcacaagctcgatgaagtcgagcgtattaccgacgaagtgatcgtgatgcgcgacggccgctttgtcgcgcgcggtgaaaccgcgggactcgcgcggcagcagatggcgaatttgatggtcgggcgcgacgtgtccgatatgtttcccgacaagatcaccgtgcctgtcgacgcgccgattgcgctaaaggtagagggccttgctgtaccagactgggttgaagacctgagcttcgacgtgcgcgcaggtgaagtgttgggtttcgccggcctcgtcggcgcgggccgcaccgaagcgttcgaagcgatcctcggcctgcgcaaacgcacggcggggcgcatcgagatcgccggccgccgcgccgatctgaaaaaccctcgcgacgcgatgcgccacggtcttacctatctgagcgaagaccgcaaaggcaaaggcctgcatgtgaatctgagcttgcaggacaacgtcacgctcatgacgctcgaacgctacgcgcacccattgctcgacatgaaagcggggcgcacggcattgacgaaggcggtga

SEQ ID NO: 274227 - DNA, 1174 bp, Unknown
  Bacterial polypeptide expressing nucleotide sequence isolated from the Sargasso Sea
atgactaaaaacccagcgatcgaattaagacaaatatctaaatcctttggtcctgttcaagcaaacaaagatattactatccgcgtgatgcctggaacaattcatggaattattggagaaaatggtgctgggaagtcaaccttaatgtccattttatacggattttacaaggctgatgcaggagaaatttttgttgatggcaaaaaaatttccataccggatagccaagcggcaataactgcaggaatcggaatggttttccaacattttaagctagttgagaacttttcagttcttgaaaatattgttctcggtgcagaaagtggagctcttttgtccccatctcttagcaaagccagagccgaacttgcagcgttagcagcagaatatgagcttaatgtagatcctgatgctataattgaggatattggggttggaatgcagcaacgagtagaaattcttaaagctctttaccgacaagcaaatattttaattttggatgaacctacaggtgttttaacaccagctgaggcggaccagcttttcagaatactcaagcggctacgcgaagaaggaaagacaattattttaatcactcataagctccgagaaattatggacattacagatacagtgagcgtaatgcgtcagggcgaaatgacagccaccttgagaactgacgatactacacctgaggatttggcagaacttatggttggaagaaaagttcttcttcgcgttgataaagcgcctgcaaagcccacaaagccagttcttgaaatacaaaacctaaatatggtcgatgattttgacgttcaaaggttaaaaaatattaacctgactgttaaagcaggggaaatacttggtattgctggtgtcgcgggtaatggtcagtcagaacttttacaagttttggggggctatagcgctgctacgggtattattaaattaaatggatcagaaatagacttatcaaccagtgtatctggtgatggtcaggcaagacgggcactaggaatggcacatgtacccgaggatagacaacgtgaaggtctaataatggacttcatggcatgggagaatgcagtttttggttatcaccgagaaaaatcaaaccaagcaaaccgattttttatggataataatgcaattcgaagagagaccggctgctagg

SEQ ID NO: 274228 - DNA, 910 bp, Unknown
  Bacterial polypeptide expressing nucleotide sequence isolated from the Sargasso Sea
atgagtgattatattttagaactcaataacattacaaaaaattttcctggtgttaaagctcttgataatgcaaactttagactcaaaaaaaaatcaatccatgcacttcttggtgaaaatggagctggaaaatctacattaattaaaattattacaggagtatataatcaaaatgaaggaaagctatttttaaataatcaagagaagtctttttcttcacctaatgaagcaatgaatgctggaatttcagttgtgcaccaagaaagaaatttaattaggaggttttcagttggtgaaaatttgatgttaaccaaccttcctaaaaataatttaggattaattgattataatactgttgccaaagaatcaaaaaaatggctcgatattatggagttggatatagatccaaatacaatagtatcagatttaacagttgcaaaaatgcaactgtgtgaaatagctaaagccttatccttagaatcaaaaatactattattagatgagccaacttcatcattatccccacaagatacaaaaaatttatttgcattacttaaacgattagttgctgaacaagatgtaagtatagtttttgttagtcacaaattagaggaagtatttgaaatttgtgatgaagttactgttttgagagatggtaaaaatgcttgtgagtctgaacaaattactaatcttaatagacagaaacttgttaaattaatgattggtagagatgaacaaataattaaatctaagaaaaatattgattttacagatgaaagtttactagatctacaatcaataaacactgaccttggtcataaaaatattaatttaaatttaaaaaaaggtgaaatacttggattatacggcttagttggggcaggaagaactgaattaataaaatgtgtac

SEQ ID NO: 274229 - DNA, 1501 bp, Unknown
  Bacterial polypeptide expressing nucleotide sequence isolated from the Sargasso Sea
actgcgttttgacaatatcggcaaggtctttcccggcgtgcgcgcactcgacggcatttcgttcgacgtgcatgcgggcgaggtgcatggcctgatgggcgagaacggcgcgggcaagtcgacgctgctgaagattctcggcggcgaataccagcccgatgcgggcagcgtgctggtcgacggccagcccgtgcagttcgcgagtgcggccgcgtcgatcgcggccggcatcgcggtgattcaccaggagctgcagtacgtgcccgacctgacggtcgcggaaaacctgctgctcggccgcctgccgaatgcgttcggctgggtcaggaagcgcgaggcgaagcgcttcgtgcgcgagcggctcgccgcgatgggcgtcgacctcgatccggacgcgaagctcgggcggctgtcgatcgcgcagcggcagatggtcgagatctgcaaggcgctgatgcgcaatgcgcgcgtgatcgcgctcgacgagccgaccagctcgctgtcgcatcgcgagaccgaagtgctgttcaagctcgtcgacgacctgcgtgcgcagggccgcgcgctgatctacatctcgcaccggatggacgagatctaccggttgtgcgacgcctgcacgatcttccgcgacgggcgcaagatcgcatcgcacgaatcgctcgccgacgtgccgcgcgaacggctcgtcgccgagatggtcgggcgcgagatttcggatatctaccattacgcgccgcgtgcgctcggcgacgtgcgcttcgcggccgacggcatcgacggcccggcactgcgcgaacccgcgagcttctcggtgcgcgcgggcgagatcgtcggcttcttcgggctcgtgggcgccgggcgcagcgagctgatgcggctcgtgtacggcgcggatcgccggcgcgcgggcgcgctgacgctcgacggcgcgcgcatcgacgtgaagcgcaccggcgacgcgatccggcacggcatcgtgctgtgccccgaggatcgtaaagaagaagggatcatcgcgatcgcgtcggtcgcggagaacatcaacatcagctgccgccgccattcgctgcgcgcggggctcttcatcaaccgcagggccgagagcgaaacggccgaccgtttcatccagcggctcaagatcaagacgccgaaccggcggcagaagatccgcttcctgtcgggcggcaaccagcagaaggcgatcctgtcgcgctggctcgcggagcccgacctgaaggtcgtgatcctcgacgagccgacgcgcgggatcgacgtcggcgcgaaacacgagatctacgacgtgatctaccggctcgcggaacgcggctgcgcgatcgtgatggtgtcgtcggagctgccggaagtgctcggcgtgtccgaccgcatcgtcgtgatgcgcgagggccggatcgcgggcgagctgccgcgcgaccaggcgaacgaacacgcggtgctgagcctggcgctgccgcagacgagcgccgtcgaggcggcctga

SEQ ID NO: 274230 - DNA, 658 bp, Unknown
  Bacterial polypeptide expressing nucleotide sequence isolated from the Sargasso Sea
gtcggactggctgggatggtaggttccgggagaacggaactagcaagagctcttttcggagctgatcccttaacttccggaagtattaaaatcgatggtgaaaatactttttttaataatccttctgaagcaatcaagaaaagaatttcacttgttccagaagacaggaaagagcagggacttttcacagaattacctatacgaaacaacatcaccatgtcgatactgaagaaaatttctaagtggggatttctcagttggtcaaaagaatgggaaatggttgatcagtcaagaaatcagctttctatcgccatggcatcgggaagccaagaagtgcagtatctcagtggaggaaatcagcaaaaagtagttttggcaaaatggcttcagacacgaccagaggtcatcataatggatgaaccaacccggggagttgatataggagcgaaatttgaaatttatcaattgatgcgtcatttaaaccaagagggcatcggcatattgatgatctcatcggaactcactgaaattctcggactcagtgatcggattcttgtcatgcgtgagggaagtatcgttgctgaacttgttccttcagaaacatcagaggaacaaatcattgaatatgcgacaacgacggtttccaaagcggcctagt

SEQ ID NO: 274231 - DNA, 1204 bp, Unknown
  Bacterial polypeptide expressing nucleotide sequence isolated from the Sargasso Sea
gctgatctgggtctcgcactcgatccccgatgcgcgggtcgcggatctgtcggtcggcgaaaaacagcgcgtcgagatcgtcaagtgtctgatccgtgagcctcggcttctcgtgctggacgagccgaccgccgtgctgctgccggctgaaatcgatgcgttgctcgacacctgtgcgcgggttgtcgcgcgcggttgcgcggttgtactggtgacgcacaagctggcggagatccgtcgaatcgcaagccgtgcgacggtgctgcaaagtggccgggtggtcgcccgttcgagcacgccgtcagccgatgtcgatacgctcgtgcgggccatgattcaacggccggtgactgaggaacacggcacggggcacagcgcgaatcaaactgcgagccccgcgccgctgaaaagccgcagcgcgtcaccctacggccggccgctcgccgacgaagccttgcagatcgacggtcttacggtgcgcgatgccagcggcgtcacgcgccttgaagactgcacgctggtggtcaaccgcagcgagatcgtcggcatcgccggcgtggagggcaatggtcagagcgaactcggtgcggtgctggccggcttgcagcgcgcgagtgccgggcgctttttcgtgcagggcaaagattgcacacaggctgcgccgcagacgttgacgaaggcgggtgtcggcgtggtgccggaggaccggcacgcggttggttgtgtgcccgacatgagtctgacggaaaacctctttctcaaccgcctcgacgattacacccgacgcggcttcatgcgccggcgcgcgatgcggcgcgacgcccgcgcgctgatgcagcgtttcgatgtgcgtgccgcgagtcccgacgtcgcgtttcgcggcctgtcgggcggcaatcagcaaaaagcggtgctggcgcgcgagctcacgctcgaagggctcgccgtgctggtcgcggcgcagccaacgcgaggcctcgacgtcggcgcggtcgcggcggtgtatgagcatattcgcgccgcgcgcgaccggggcgtcggcgtgttactgatctcgtccgaactcgacgagctgatggcggtggccgaccgcgtcctcgtcatgtatcgcggccgcatcatgggcacctgcgtgccggatgcgtcgcaagtcaatcctcaacgcgagcgcattggcgcatggatggcaggccagacagcatga

SEQ ID NO: 274232 - DNA, 1561 bp, Unknown
  Bacterial polypeptide expressing nucleotide sequence isolated from the Sargasso Sea
aatgagtgaaccattactgacgatgcgcggcatcgtcaaagcattttccggtgtgaaggcactcgatggcatcgacctgacggtggcgccaggcgagtgcgtgggcttgtgcggagagaacggcgcaggaaaatcgacgctgatgaaagtgctctccggcgtctatccccacggcacctgggatggcgaaataatctgggaaggcgagccgctgaaagccgcaagcataagggacacggaacgtgcgggcatcatcatcatccaccaggaattgatgttggtgccggagctttcggttgcggagaatatctttctcggcaacgagatcacgctgccgggcggcagaatgaattacgccgccatgtatcagcgtgccgatgagttgctgcgcgaactcggcatcagtggaatcaattccgcacaaccggtgatgaactacggcggtggccatcagcaactgatcgaaatcgcgaaggcattgaacaagcgcgcgaagctgctgattctcgatgaaccttcttcgtcgctgacggctacggaaatacacatcttgctggatatcgtgcgtgatctgaaacggcgcggtgtcgcctgcgtgtatatctcgcacaaactcgacgaagtcgcggccgtgtgcgacacgatcagcgtgattcgcgacgggcgccatgtcgcaaccgaaccgatgcatgcgttgactaccgaccgcatcatctcgctgatggtgggccgtgagatcaagaatctgttcccgcgtgaaccgcatccgatcggcgaagtgatcttcgaagcccgacacgtgacctgtttcgacgtcaccaatccgcgccgcaagcgtgtgaacgatgtgtccttcgcgctacgacgcggtgagatcctcggcgttgccggtctggttggcgcagggcgcacggagttgatggaggcgatcttcggtgcgtatccgggggtgagcgaagcgagcgtggtgatggacggcaagccattgaaaattcgcgcgccggtcgatgcgattcgcgccggcatcggcatggtgccggaagatcgcaagcgtcatggcatcgtgccgggactgagcgtcggccacaacatcacgcttgcggtgttgcaacgcttcgcgaagggcggtcgtatcgattccgccgccgaactcgatacgattcatacggagatgaagcggctttcagtgcgcgcggcgcaccccatgctttcgattgcgagtctatcgggcggcaatcagcagaaggccgtgctgacgcgcatgctgctcacggatccgaaagtgctgatcctcgacgaaccgacccgcggcgtcgacgtcggcgcgaaatacgaaatctacaaactgatctttcaactggcacagcgaggcatggcgatcgtgatggtgtcgtccgaattgcccgaagtgctcggtatcagcgatcgcgtgctggtgatcggcgaaggcgaattgcgcggcgacttcgtcaacgacggcctcacgcaagaggacattctcagcgccgcgattcgtcctgcgcagcgatccacgaacccaaccgcagcgagtgccgcatga

SEQ ID NO: 274233 - DNA, 1501 bp, Unknown
  Bacterial polypeptide expressing nucleotide sequence isolated from the Sargasso Sea
atgagccttattttagaactcaagcagatcagtaagcattatccgggcgtcaaagcccttgaggatgtgagcttacggttatttgcaggggaagttcacgccctattgggcgaaaacggtgcgggtaaatcgacgctggtgaaagtaatgacaggcgcccagtcaaaagacatgggcgacatccttttccttggcgacccgcaacacttcaacacaccaatggacgcgcaaaaggcggggatcagcacggtttatcaagaggtgaacttagtgcctaatctgaccgtggcacaaaacctgttcctcggttacgaaccgcgccgccttgggctgatccattttaaaaaaatgtatgccgacgcgcgggccgtgttaacccagttcaagttggatatcgatgttagtgcgccgctgtcggattattccatcgcggtgcagcaactcatcgccatcgcccgcggcgttgccatgtcggccaaggtattagtgctcgatgagcctaccgcgagcttagatgccaaagaagtgcaagtgctgtttgggatcttaaaccagctcaaagccaagggcgtggctatcgtgtttatcactcacttcctcgatcaggtttatcagataagcgatcgcattaccgtgttacgtaacgggcagtttgtcggtgaatatctgacggcagaactgccacagcctaagttgattgaagccatgctcgggcggtctctgcaggagcaattagttgataaacaggaaaaggagcgcacagtcacccgcgctgaggccgtgctcttgtccctcgaagatgtgtcggtgaaaggttcaatccaatcgatgaatctcaccgtgcccaaagggcaggcagttggacttgcggggcttctaggctctgggcgcagcgaagtgtgcaacgccgtgtttgggctggatttagtcgatagcggcagtatccatttggcagggcagaaactgaatctgtcacaacccgtggatgcgatcagcgccgggatcgccctgtgccccgaagatcgcaagattgacggcatcatcggtcctttatcgattcgcgaaaacatcatactcgcgctgcaggcgcgtatcgggtggtggcggtatctatccaactctcggcagcaggaaattgcccagttctttatcgataaattacagattgcgacaccggacgcagataaacccatagagcaattgagtggtggtaatcagcaaaaggtgatcctcgcgcgttggttagctatagagccgattttattggtactggatgagccgacccgcggcatcgatattggcgcccacgctgaaatcgtcaagcttatcagaaccttgtgtgatgaaggcatgtcgctactggttgcatcgtctgagctcgatgagctcgtggccttttcaaataaagtcgtggtattacgcgacagatatgcagtacgtgaactttcaggagcggaattaacctcgcaacacgtaatgcaagcgattgcggagggataaa

SEQ ID NO: 274234 - DNA, 1615 bp, Unknown
  Bacterial polypeptide expressing nucleotide sequence isolated from the Sargasso Sea
gatggacccgacttcccaaccctcccgcgcagccgctcccgtgctgtccgtctccggcatcggcaagacctatgccgaacccgtgctcgccgacgtcacgctgacgctcgaggcgggtcacgcgcttgcgttgacgggcgagaacggcgcaggcaagagcacgctgtcgaagatcatcggtgggctcgtcgagccgaccgccggcacgatgcagctcggcggccagccgtatgcgccggcgagccgcacgcaggccgaggcgctcggcgtgcgcatggtgatgcaggagctgaacctgctgccgacactgacggtcgccgaaaacctgttcctgaaccgcctgccgcggcgcttcgggatcatcgatcgcgcgcggctgcgcgacgacgcgcgggccgcgatggcgcaggtcgggctcgacacggtcgaccccgatacgccggtcggcgcgctcggcatcggccaccagcagatggtcgagatcgcgcgcaacctgatcggcgactgtcgcgtgctgattctcgacgaaccgaccgcgatgctgaccgcgcgtgaagtcgagctgctgttcgagcagatcgaccggctgaaggcgcgcggcgttgcgatcgtctacatctcgcaccggctcgaggagctcgcgcgggtcgccgagcgcgtcgcggtgctgcgcgacggccgcctcgttcacgcgggcgacatggcggcgacgacatctgacgggctcgtcacgctgatggtcgggcgcgagatcggcgagcacatcgatctcggcgagcgtcatatcggcgcgccgcggctcgtcgtgtcgggcctcagccgcgggacggcggtgcgcgacgtgtcgctcgaggtgcgcgcgggcgagatcttcggcatctcggggttgatcggcgcggggcgcaccgagctgctgaggctgatctacggcgcggatgcgccggacgcgggaacgatcgcgatcggccagccgccaaagccggtgcggatcggttcgccggtcgaggcggtgaagcagggcatcgcgctgattaccgaggatcgcaagggcgaagggctgctgctgacgcagtcgatcaccgcgaacgtgtcgctcggccagctcgaccggctcgcgcgcggcgggatcgtcgacggcgcgcgcgaaacggcgctcgccgagcagcagatcgacgcgctgcggatccgctcgcacggcgcgacgcaggcggtcggcgagctgtcgggcggtaaccagcagaaggtcgtgatcggccgctggctcgcgcgcgacatgggcgtgctgctgttcgacgagccgacgcgcgggatcgacgtcggcgcgaagttcgagatctacactttgatgggcgcgctcgcgcgcgaaggccgcgcgctcgtcgtcgtgtcgagcgacctgcgcgagctgatgctgatctgcgaccggatcggcgtgatgtcggccgggcgcatgaccgccgtgttcgagcgcggcaactggacccaggatgcgctgctggccgcggcgttcgccggcttcggccgcgagacgccgccgggcggcgcgcagcatccggacgcggggcaggcgccgggcgccgctcgcggtacttcgaatacaggacgacagcaatga

SEQ ID NO: 274235 - DNA, 1561 bp, Unknown
  Bacterial polypeptide expressing nucleotide sequence isolated from the Sargasso Sea
aatgacggaacccttgctgacgatgcgcggcatcgtcaaggcattcgacggcgtgaaagcgctcgacggtatcgacctcaccgtgcggcccggcgaatgcgtcgggctgtgcggcgagaacggcgcgggcaaatcgacgctgatgaaggtgctgtcgggcgtctatccgcacggcacgtgggacggtgaaatccgctgggaaggcgcgccgctcgaggcatccggcgtgcgcgacacggagcgggcgggcatcgtgatcatccaccaggagctgatgctcgtgcccgaactgtcggtggccgagaacatcttcctcggcaacgagatcacgctgccgggcgggcgcatgaacttctccgcgatggtccagcgcgccgaggagctgctgcgcgagttgcggatcgactcgatcaacgtcgcgcagccggtcatgaactacggcggcggccaccagcagttgatcgagatcgcgaaggcgttgaacaaggacgcgaagctgctgatcctcgacgaaccgtcgtcgtcgctgagcgccgccgaaacgcgcatcctgctcgacatcgtgcgcgacctgaagcggcgcggcgtggcgtgcgtgtacatctcgcacaagctcgacgaggtcgcggccgtctgcgacacggtcaccgtgatccgcgacggccgtcatgtcgcgaccgagccgatggccgcgctgaccaccgaccggatcatcgcgatgatggtcggccgcgagatccgcgacctgtatccgcgggagccgcacgagatcggcgaggtcgtgctggaagcgcgcaacgtgacctgtcgcgacgtgacgaacgcgcgccgcaagcgggtcgacgacgtgtcgttcagcgtgcggcgcggcgagattctcggcgtcgccgggctcgtcggcgcgggccgcaccgagctgatgcaggcgatcttcggcgcgtatccgggcgcgtgcacggcgagcgtgacgatgaacggccggccgctgtcgatccgctcgccggccgacgcgatccgcgccggcatcgcgatggtgccggaggaccgcaagcgccacggcatcgtgccgcagctcggcgtgggccacaacatcacgctggcggtgctgcggcgcttcgcggcgcgcgggcggatcgacgcggccgccgagctcgatgcgatccgcaccgagatgcagcggttgtcggtgcgcgccgcgcatccgttcctgtcgatcgcgagcctgtcgggcggcaatcagcagaaggcggtgctcgcgaagatgctgctgaccgagccgcaggtgctgatcctcgacgaaccgacccgcggcgtcgacgtgggcgcgaaggtggagatctaccggctgatcttcgcgcttgcgaagcgcggcgtcgcgctgatcgtcgtgtcgtcggaactgccggaggtgctcggtctcgccgatcgcgtgctggtgatcggtgaaggcgaactgcgcggcgatttcgtcaaccagggcctcacgcaggaacagattctcggcgccgcgctgaagcccgcgcggctgcccgccgaacccaccgcagcgagtgcatcatga

SEQ ID NO: 274236 - DNA, 1219 bp, Unknown
  Bacterial polypeptide expressing nucleotide sequence isolated from the Sargasso Sea
atgacaacacagcaacaatcagaatggctgttggagatgattgacgtcagtaaaagctttcccggcgtcaaggcactcgataatgtcaatttacgggtccgtcctcattctgtgcatgcgttgatgggcgagaacggggcaggaaaatccacgttgctcaagtgcctgttcggcatttacgagaaggatcagggcaagatcttcttcaaggggcaggagatcaacttcacctcctccaaagaggcgctggagaatggcgtctccatggtgcatcaggagttgaacctggtgctgcaacgctcggtgatggacaacatgtggctcggccgctatcccaccaaggggctgttcgtcgaccacggcaagatgtatcaggacaccaagcatatcttcgacgagctggacatcgacatcgacccaagggtcaaggtcggtaccctctccgtctcccagatgcagatgatcgagatcgccaaggcgttctcctatgacgccaagatcgtcatcatggacgagcccacctcctcgctgaccgagaaagaggtgagccacctcttcaagatcatcaacaagctcaaggagaagggctgcggcatcgtctacatctcccacaagatggaagagatcttccagctgtgtgacgagatcaccatattgcgggatggccagtgggtggcgacccagccgctcaagggcatgaccatggatcagatcatcggcatgatggtcggtcgtgagttgacccagcgcttcccggagaagaccaaccagccgaaagaggtgatcctcgaagtcgagcacctgacggcgaagaaccagccctccattcaggacatcaccttcaacctgcacaagggggagatcctcggcatcgccggactggtgggggccaagcgcactgacatcgtcgagaccctgttcggcatccgcgatcgcagtgaagggatcatcaagctgcacggtcagccggtggcgaaccacaatgcccacgaggcgatccgcaacggctttgcactggtgaccgaggagcggcgttccaccggcatctattcgcgtctcgacatcgccttcaactccctgatcgccaacatggacaactacaagggttccatggggctgctcagtgacaacaagatgaagagcgatacccagtgggtcatcgactccatgcgggtcaagacaccgacccacagacccagatcggctccctctcgggggg

SEQ ID NO: 274237 - DNA, 1119 bp, Unknown
  Bacterial polypeptide expressing nucleotide sequence isolated from the Sargasso Sea
aattggatacggcaactttggttagggatttggggccagctgataaacaaatgattgctatagctcgcgcgatggcccatgctcccaaattgctcattttggacgagccaacttcctctctttctgaaaatgaagccaaaaggctttttacgcttttacaaaaactgaaagagcaaggcgttgctattttatatatttctcatcgaatgtcagatataaatagtgttgccgatcgcattgtagccatgagagacggtacaatatcaggactattcgaagaaaagcccttaaattatgagggggctgttacggcaatgctcggccagaagctatcgcaaaatgagattaaaataaacgagcgaaaacgagaaatattgaatttaaaagaggtaagattagctactgacagcaagccctttgatttatctttttatgaaaatgaaattgtttcaatcaccggccttatcggtagtggaaaaactactttggcatcgcaaatatttggattaagtccaaattcaaaagtaaaaatgactttaaatggggatccatacagtccccaaagcccaaaagaagccatcgcagcaggcgtttatatgtgtcctaaagatagggcatcaaacgctgttgtttcagaatttgatatatctaacaatttagcgttaccattttttaaaaagcacagcagattttcattcctccgtgccaaaagcctttcgcaaaatgctaaaaattctattagtgaacttggaatagtgtgccaatctgaggtggactccgttacaacattatccggaggtaaccagcagaaagttatggttggaaggtggttggctgaggagtcttcggtgctccttttagacgaaccctttcaaggagtagatataaaggctcggcgcgatattggtattcagatacgatcaacttctagccaaagagcaacacttatatttgttgctgaacttgatgaagctttagaaatagcagatagggtcattgtattacatgaaggaaatcttgttggtgaatatcaaaataatagtaaaaatataccagaaattgtatcgagttttagtggaagcgcttataaacaagatagttcaaattacggaacttaga

SEQ ID NO: 274238 - DNA, 1528 bp, Unknown
  Bacterial polypeptide expressing nucleotide sequence isolated from the Sargasso Sea
atgaataaaaaacaaaaagaattagctatagaagttaaaggaattaccaaatcttatcctggcgtagtagctaataaatcagtcgactttacagtaaacaagggtgagatacacgcactagttggtgaaaatggtgcaggtaagtcaactttaatgaaaatactttacgggatagaacaagccgatgaaggtgaagtttctgttaacgggaatgtagtacaaataaataaagttgacgctgctataaaactgggaattggaatggttcatcaggaatttcatctagtcccatcctttaccgctgctgaaaacataggtttaggagaagaaccacgaaattcaaatggtttgattaattgggacaaattaaacaaagatgtttcagaaattgctgaaaaatatggattggatgttgaccccaatcttcgtatgatagatgcttctgtgggaattcaacaaagaactgaaattttaaaaacactatataggaacgctgatatattgatattggatgagccaacagcagttctaacacctcaagaaacagatgaactcttccaggttattagaagtttagttgacgaaggtaaaacagtaatatttattacccacaagctaagagaagtaatggaaatatctgatcgagtaacagtaatgagagatggagaggtacagggggtttctgaaacaaaaaaaacatctgttaaagaattagccaatttaatggtcggaagagaagtgtttttacaagttaaaaaagaaaaatctaaaccaactgatgttgtacttgaggttaaagacctatgggtacatgatgcaaggggactagttgctgttaaaggagtaaattttgaagtagcaaaaggagagattgtaggtatagccggagtagatggaaatggtcagacagaactcgtagaagccctggctggtttaagagacactagtagaggagagatactttttgaaggaaaaaatattgaaaagaattcacctagacaaagacgaagagaaggtctcgctcacattcctgaagacagatcaaatactggattaaatgttagattagcaatttgggaaaatttaattggaacatcatatttcagatcacctctttcaagaggaggaatagttagcatgaaaaatattttaagacatagtaatgaattaagagaaacttttgacatcagatcaccaggtgtcactattcgtgctggctctttatctggaggtaaccaacaaaaggtcgttgtagcaagagagctgtctgaggaaccggcattaacaattgcttcacagcctaccagaggggtagacataggaaatattgaagctattcatgagcagattgttgaaattagagattcaggaaaagcggttcttttaatttcagcagaacttgatgaggttatgtcagtagccgatagagttggtgttatttatgaaggagagtttgttgaatgggttgatccttcgaaagttaatcaagaacaaatgggcttatatatggctggaataaaaggttaga

SEQ ID NO: 274239 - DNA, 1510 bp, Unknown
  Bacterial polypeptide expressing nucleotide sequence isolated from the Sargasso Sea
tatgtccacaaatccaattctcaaaatttcaaaagtttctaggacttttggtgcaatacaggctctaaaagaggcaaattttgagataaatgaaggtgaaattatgggactagttggagaaaatggagctgggaaatcaactcttgttaaaattataagtggatttgacccaggttttaaaggcagctatcaaatcaatggtaaagaagtaaaatttgaaacgccttcacaagcagaggagtctggcattgctattgctcaacaagaattaagcttgattcctaatatgtcagttgcagaaaatatttttcttactggagctaaagtaaaaaaatttgccactcttaatacattggcaaagatggcacgcccataccttgatgaagttggattaactgaagtagacccgactactagaataaatttattatctgttggtgaacaacatttggtagaagtagctagattaatttcgagagaagcaaagattttaattttagatgagcctacagctgcgttgggtgaagcagagagtcgaagaattttagaaatggttgagcgtcttgcagcaaacggtaaatcaataatatatgtaagtcatagactggacgaaatttttaagattacaaaaagaataacaatattaagagatggagtaagtcaaggtattcaagaaactaaagatattgatgtaaataaactagttgaaattatgcttggaagagaattagcaaatatgttcccatcaaaagctgaccatataagtgatgatccaaaattagtagtaaaagaactttggcctgatggcgttttagagccggttagtttttcagcctacaagggagagatacttgggctctctgggcaacttggtagtggagcaggtgaagtattagcctctatagcaggtgcacttcaatctagatcaggttcactcactttgaatggtgaaacctttttacctaaatcaccaagtcatgctataaagaaaaaaattgcatattgctcctccgatagaaaaaaagatggtctttttcttggacgtccaatatttgagaatttaacctccccagcacttggtgctatatcaaaatatggttttaactttggcagttctgaggataattattccagaaatttagcaaaagagttcttaattgatgtcaaaagaatgcacgatgagtcaggtcttttaagtggcggaaatcaacaaaaagtagcattaggaaaatggctttcaattaagcccgatgtattgcttgtgaatgagccgacaagaggtgttgatgttggtgctaaatcagagatatatcaaagaatgagagaattagcagcaagaggaattacaattatttttgcctcaactgatatccaagaaatcacgtaccttcctgacagagtgattacattttatagaggaatgatgattgatgagcatcgattagaaaaaattaaaacacctgttattcttaaagagattactgatccatttaacgagacaaacctatga

SEQ ID NO: 274240 - DNA, 1510 bp, Unknown
  Bacterial polypeptide expressing nucleotide sequence isolated from the Sargasso Sea
gatggcttctgatccagtactcaagattacaaacgtttctcgcacttttggtgctattcaagccttaaaagaggcaaattttgaaatcaatgaaggagaaattatgggattggttggtgagaatggagctggaaaatctacattagttaaaatcattagcggtttcgaccctggtttcaaaggaagctatcagctaaatggtaaagaagtaaaattcgataccccctcaaaggcggaagagtctggtatagctatagcacaacaagaattgagtttaatcccaaatatgtcagtagctgaaaatatttttctgacaggtgcaaaagttaaaaaatttgccaccttaaacacattatcaaaaatggctcgaccttatttagatgaagtaggactcacagatattgatccctcaacaagaataaatttactatcagtaggtgaacaacatctagttgaagtagctaggttaatatccagagaagctaaaattttaatattagatgaaccaacagcagcccttggagagctggaaagtcgtagaattttagaaatggttcagcgccttgcaaaaaatgggaagtcaattatttatgtcagtcataggctagatgaaatttttaaaattacaaaaagaattacaattttgagggacggtgtctctcaaggtgtgcaagaaacaaaagacatcgatgtaaataaattagttgaaataatgttgggaagagagttagcaaatatgttcccttcccgagctgatcatattagcttggaatcaaaaattgaagttaaagacttatggcctgatggagtattagagccagtgagtttctcagcttatcaaggagaaatacttggtctatctgggcaacttggaagtggtgctggagaggtattagcttcaattgcaggtgctttaaaatcacgatctggctctcttacattgaatggagagacttttcttcctaaatcacccagtcaagcaattaagaaaaagattgcttactgttcttcggatcgtaaaaaagatggcctttttttgggaagaccgatattcgaaaatttaacctcacctgcacttgatactatttcaaaatttggatttaattttgggagcacagaagatagttatgcaaaaaacctcgctcaagaattccttatcgacgtaaagagagtttacgacgagtctggtctgctgagtggaggaaatcagcaaaaagttgctttgggaaaatggctatcaattaagccagacgttcttctagtaaatgagccaactagaggtgtcgatgtcggagctaaatcagaaatttatcaaagaatgagagaactagctgcaagaggaataactattatattcgcctctacagatattcaagagatcacttatcttcctgatagagttataacattttatagaggaatgatgatagacgaacatagattagaacagatcaaaacaccggttatactgaaagaaataactgatccatttaatgagactaatctatga

SEQ ID NO: 274241 - DNA, 825 bp, Unknown
  Bacterial polypeptide expressing nucleotide sequence isolated from the Sargasso Sea
atgagggggctgtgacggcaatgcttggccagaagctgtcgcaaaatgagatagaaataaacgagcgaaaacgagaaatattgaatttaaagggggtaagattagctaatgacagcaaaccctttgacttatctttctataaaaatgaaattgtttcaatcaccggccttatcggtagtgggaaaactactttggcatcgcaaatatttggattaagtccaaattcaaaagttaaaatgactttaaatggggatccatacagtccccaaagcccaaaagaagccatcgcagaaggcgtttttatgtgtcctaaagatagggcatcaaatgctgttgtttcagagtttgatatatctaacaatttagcgttaccattttttaaaaagcacagcagactttctttccttcgtaccaaaagactttctcaaaatgctagaaattctattagtgaacttggaatagtgtgccaatctgaggcagactccgttacaacattatcagggggcaaccagcagaaagttatggttggaaggtggttggctgaggagtcttcagtactccttttagacgaaccctttcaaggagtagatataaaggctcggcgcgatattggtattcaaatacgatcaacttctagccatagagcaacacttatatttgttgctgaacttgatgaagctctagaaatagcagatagggtcattgtgttacacgaaggaaatcttgttggtgaatatcaaaataaaagtgaaaatataccagaaattgtatcgagttttagtggaagcgcttataaacaagatagttcaaattacggaacttaaa

SEQ ID NO: 274242 - DNA, 910 bp, Unknown
  Bacterial polypeptide expressing nucleotide sequence isolated from the Sargasso Sea
cctgtccgcgcgtgtatcgacgtccgaaccggcaaacgccccggctgccgatgcgcccgctcgctcgtcacggcctgacgagaacggcgagttattgcgactcacgggcgtgaccaagcgcttcccgggcgtagtcgcactcgacagcgtcagcttcgacttgcggcgtgccgaggtgcacgccgtatgcggcgaaaacggcgcgggcaaatcgacgctgatgaaaatcatcagcggccagtacgcgccggacgagggttccatcgtctataagggcagcgaatgccgcttcgcttcctcgctcgaagcccaggccgcgggcatcgccatcattcaccaggagttgaacctggtgccgcacctgtcggtggcggagaacatctttcttgcccgtgaaccgcgccgtggggtattcgtcgaccgggcgcgtctgcgcgccgatgcgcagcgctgcctcgaccggctcggcgtcgacatcgcgccgggaacgctcgtgcgcacgctcccggtcgcacaacggcaaatggtggaaattgccaaggcactgtcgctggacgccgaagtgctgatcatggacgagccgacatcgtcgctcacggaaacggaaaccagtcagctcttcaggatcattcatgagctgaaacgcgccggtgtcggaatcatttatatctcgcaccggctcgatgaaatgaccgagatcgtcgaccgcgtcaccgtcatgcgcgacggacgctatgtgtcgacagacgtgtttcgcgagaccaccatcgacaaggtcgtcgcccgcatggtcggtcgctcgctcgaagacaaatttccgccgcgcacgtccgtgccgaccgcggaggtgttgctgtcggtcgaccaactggcacgcgcgaacgtgttcggacccgtcagcttcgaattg

SEQ ID NO: 274243 - DNA, 1522 bp, Unknown
  Bacterial polypeptide expressing nucleotide sequence isolated from the Sargasso Sea
atggacaccatactcaagctcgacaacatcaccaaaagctttcctggtgtgaaagcgctgcaaggcattcatctggaaatcgcacgcggcgagattcacgcgctgctcggtgaaaacggtgcgggcaaatcgacattgatgaagatcctgtgcggcatctatcagccggacgaaggcacgatcacgattgccggcgagacgcgccacttcgcgaactatcacgatgcggtcgccgcaggtgtcggtatcgtgtttcaggagttcagcctgatcccgtatctgaacgcggtggagaacatgtttctcggccgtgagttgaagagcgctttgggtttgctcgaacgcggcaagatgcggcgcgcggccgccgcgatttttgagcgcctcggcgtggcgatcgacttatcggtaccgattcgcgagttgtcggtcgcgcagcagcagtttgtcgaaatcggcaaggccctgtctttggaggcgcgcattctgattctggatgagccgactgcgacactgacgcccgccgaagccgagcatctgttcgcgatcatgcgcgatctgaagcagcaaggcgtggcgatgatctttatctcccatcacctggaagagatctttgaagtatgcgaccgcattaccgtattgcgcgacggtcaatacgtcggcatgaccgaagttgcgcaatccgatgtgaaccaccttgtggaaatgatggtggggcgccgcatcgaaaacagttttccgccgaagccgccgctgcgtgccgatgcgaagatcgtgctcgaagtcgacaagctgcagttgctcaaagatagtccgatactgcgcttcacgctgcgggagggcgaaattctcggtttcgcgggactggtcggctcgggccgcacggaaaccgcgctcgccgtgattggggccgacccggcttacgtgaaggaaatccgcatcaacggcacggccgcgaaactgtccgatcccgccgatgcgttgcgcgccggcgtcggcattctgccggagagccgcaagaccgaaggtctgatcaccgacttctcgatcaagcagaacatctcgatcaacaacctcggcaaataccgctcgctgcgcttctttatcgaccagcgcagcgaagcgcgtgccaccgccgacatcatgaaacgcgtcggcgtgaaagccccgacgatgcacaccgaagtcgcgacgctctccggcggtaaccagcagaaagtggtgatcgcgcgctggctgaatcaccacaccaacattctcatcttcgacgaaccgacgcgcggcatcgacgtcggcgccaaagccgaaatctatctgctgatgcgcgaactcactgcgcgcggctactcgatcatcatgatctcgtccgaactgccggagatcgtcggcatgtgcgaccgcgttgccgtgttccggcagggccgcatcgaggcgatgctcgaaggcgagcagatcgactcgaacgccgtgatgacctacgccacagccggtacccgtggagcaactcatgaacatgcctaat

SEQ ID NO: 274244 - DNA, 1543 bp, Unknown
  Bacterial polypeptide expressing nucleotide sequence isolated from the Sargasso Sea
aatgactaaaaacccagcgatcgaattaagacaaatatctaaatcctttggtcccgttcaagcaaacaaagatattactatccgcgtgatgcctggatcaattcacggaattatcggagaaaatggtgctgggaagtcaaccttaatgtccattttatacggattttacaaagccgatgcaggggaaatttttgttgatggcaaaaaaatttccataccggatagccaagcggctatagctgcaggaatcggaatggttttccaacattttaagctagtcgagaacttttcagttcttgaaaacattgttctcggtgcagaaagcggagctcttttatccccatctcttagtaaagccagagccgaacttgcggcgttagcagccgaatatgaacttaatgtagatcctgatgcaataattgaggatattggggttggaatgcagcaaagagtagaaattcttaaagctctttaccgacaagcaaatattttaattttggatgaacctacaggtgttttaacaccagcggaagcggatcagcttttcagaatactcaagcggctacgcgaagaaggtaagacaattattttaatcactcataagctcagagaaattatggacattacagatacagtgagcgtaatgcgccaaggcgaaatgacagccaccttgaaaactgacgatactagtcctgaggatttggcagaacttatggttggaagaaaagttctccttcgtgttgataagaggcctgcaaatcctacaaagccagtgcttgaaatacaaagtctaaatatggttgatgattttggcgtgcaaaggttaaaaaatattaacctgactgtagaagcaggggaaatactcggaattgctggtgtcgcaggtaatggtcagtctgaacttttacaagtcttagggggctatagcgccgctacgggtattattaaattaaatggatcagaaatagacttatcaaccagtgtatctggtgacggtcaggcaagacgggcactaggaatggcacatgtacccgaggacagacaacgcgaaggtctaataatggatttcatggcatgggaaaatgcagtttttggttatcatcgtgaaaaatccaaccaggcaaatcgattttttatggataataatgcaattcgaaaagagaccgaagataaaatgaagcggttcgatgttcgtcctcctaacccaagactaactgcgaaaaatttttcaggtgggaatcaacaaaaaatagttttggcccgtgaaattgagcgtaatccagacttactgcttgtggggcaaccaacacggggagttgatattggtgctattgaatttatacatcaacaaattgttgcactacgcgaccaaggaaaagctattttgcttatatccgtagaattggatgaaatattgtcactatcagatagagtccttgtcatgttcgacggagagattatgggagagagaaacccagcaaatacaaatgaaaaagaactggggcttttgatggctggtgtttctgagaaagcggcgcaatga

SEQ ID NO: 274245 - DNA, 418 bp, Unknown
  Bacterial polypeptide expressing nucleotide sequence isolated from the Sargasso Sea
tctggctggagagtgcaaattcgtgtcacttctaaagttaaaaaatattcgcaaagagtttccaggatgtatcgctaatgataatgtagacttggatatagatgctggccagattcacgcgcttcttggagaaaatggggcaggaaaaagcactttagtaaaagttatatacgggttattaaagccggattttgggcagattatttggaatggagaagaaacggatataatttctcctttggaggcacggcgcctcggaatagggatggtgtttcaacacttttccttgtttgacgcattaactgtctcagaaaatatctcccttggaattacgcaaacgctaaagagatcggatttagatgataggatttcggaaatttctaaatcctacgggttttcaataacccaaatcgcgaaa

SEQ ID NO: 274246 - DNA, 1591 bp, Unknown
  Bacterial polypeptide expressing nucleotide sequence isolated from the Sargasso Sea
gctggtgaacgacgagcggtgcgacgcgaagggcggcggcacggccggcgctcttcgcacggagaagccgatggacacgatactcaggctcagccacatcacgaaaagctttccgggcgtgaaggcgctgtccgacatcgatctggaaattgcgcgcggcgagatccacgcactgctcggcgagaacggcgcgggcaagtcgacgctgatgaagatcctgtgcggcattcatcagccggacgccggcacgatcgagatcgacggcaccgcccgccatttcgcggactatcacgacgcggtcgcggcaggcgtcggcatcgtgttccaggaattcagcctgattcctcacctcgatgccgtcgacaacctgttcctcggccgcgagctgcgcaatcgctggggcgcacgcgaccgcaagcggatgcgccacgcggcggccgcgatcttcgcgcggctcggcgtcgcgatcgatctcgatgcgccgatccgcgcgctgtcggtcgcgcagcaacagttcgtcgaaatcggcaaggcgctgtcgctcgacgcgcgcatcctgatcctcgacgaacccaccgccacgctcacgccggccgaggccgagcacctgttcgcgatcatgcgcgagctgaagcggcagggcgtcgcgatgatcttcatctcgcatcatctcgacgagattttcgcggtgtgcgaccgcatcacggtgctgcgcgacggccagtacgtggcgacgaccgacgtcgcgcgcacggacgtcgaacagctcgtgcggatgatggtcggccgccggatcgaaagcagctttccgccgaagccggcgtgcgcggccgatgcaccgcgggtgctggaggtcaacgaactgcagatcgaacgcggtggcccggtgaaccgcttcacgctgcatgccggcgagatcctcggcttcgccgggctggtcggctcggggcgcacggaaaccgcgctcgcggtgatcggcgcgacgcgggcacatcgcaaggacgtgcgcgtgcgcggcgcggccgccaagctcgccgatccggccgacgcgttgcgcgcgggcatcggcatcctgccggaaagccgcaagacggaagggctcgtcacgtcgttctcgatccgcgacaacatctcgctgaacaacctcggcaagtaccggtcgatgcgctggctgatcgaccggcgcggcgaggcgcgcacgacgcatgacgtgatgcggcgcgtcggcgtgaaggcgccgtcgatccacaccgaggtcgcgacgctgtccggcggcaaccagcagaaagtcgtgatcgcgcgctggctcaaccatcacacgtcggtgctgatcttcgacgagccgacgcgcggcatcgacgtcggcgcgaaagccgaaatctacgggctgatgcgcgaactcaccgcgcgcggctacgccatcatcatgatctcgtccgagctgccggaaatcgtcggcatgtgcgatcgcgtcgccgtgttccggcagggccgcatcgaggcgacgctcgcaggcgacgagatcgatcccgatacggtcatgacctatgccacggccggcacgcgaggagccacccatgaacctgcctga

SEQ ID NO: 274247 - DNA, 1507 bp, Unknown
  Bacterial polypeptide expressing nucleotide sequence isolated from the Sargasso Sea
aatgaaaaaaatagaacttttaaatctaactaaaagtttttcgagttttaaagcactctcaaatgtaagtattgaattgttatgtggtgaaacacacgcattgatgggcgaaaatggagctggtaaaacaacattaataaaagttctagctggtattttaaaacctgatcaaatgacaatgaaaatagataataatattcaaaatatatattcatcaatacaatcaaaaaatttaggttttaattttattcaccaagaattaaatatcgtctcttatctatctgttgctgaaaatatgtttttaaatcacccttatccaaaaaaatacaaaactataattgattggaataaaatttataaattatcaagtaatgcgctgaaagaattaggtgttacgcatattgatgtgaaaaaaaaatgtgcaaaattatctactggcgatcaaatgttggttaaaattgcatcctgtttaattaagacagacacaacccctactttatatgtttttgatgaacctacagcagcattaacgctacaagagtctgaaaaattattcaaagtaattaataatttaaaaaaaaggggagcaataattctttatgtatctcatcgtatgaatgaaatattagaaatttcagataaggttactgttttgcgagacggaatgaaagttttaactgataaaacatcagaactttcaaaagaaaaaatcattagaagtatggttggtaaagatttatctgataattttccagagagaacagggaatataaatgaaaatgttgttatcgatgtaaataatgtttacacaaaaaatattaggaatattaattttaaaataaaagctggtgaagtgcttggtattgcaggtctatctaattctggccaaagagaaatatttaacatgttaatgggtgttgataatatagataaaggtaaaataagctttatggatcaaaaatatgaaccaacgagtcccaatgatgcttggaaaaaattaatttcatttgttccgcgagagagaagaaaagaagctctgatgctaaaaatgtcagttaaatcaaatacaacaacaccgcattattcaaagctatctaaattcttttttttagcaaataaacaacaggaaaatttaattacaaataattattctaaaaaagttcaattaaaatatgaaaacatgaatcaatcaatttatcaactgagtggtggaaaccaacaaaaagttgtatttagtagagcacttgcatcaaacccaaaacttttacttctggatgaaccaactagaggagttgatgtaggtgccaagttagatatttataatttaattattcagttaacaaaaaatggttgtggtatcgtattaaactcgtctgatttatctgaaattatgggtatgtgtgataaaattcttatactaaaagatcatgaacaatataaaatattagaaaattttaaaataaactctcaagatgtattagcaaatttctatgaaagtaaaaaataa

SEQ ID NO: 274248 - DNA, 1243 bp, Unknown
  Bacterial polypeptide expressing nucleotide sequence isolated from the Sargasso Sea
attgaaccagggcatcagtgtaatttatcaggaattagccttggttttacagatgactgttgctgaaaatattttcctaggccgagagccgagaaatacatttggtcttgtagaccagacgcgactcagatcagaagctcaagatcttcttgagcaattagggatcaagattgacctggacatagaagttggtgacctgagtgtggcttatcagcagatgattgaaattgccaaagccttatcaaagaatgctgatttaattgtcatggacgaaccttcagcaattcttgcaggaacagagctggaacaacttttcaatatcatacagtccctcgttaaaagaggtgtgtccgtcatttacatttctcatcgtcttgaagaggtttttaaaattgctgatgttgtgagtgtcctgaaggatggtcaacttgttgatacaaaacctattaaagaacttgaccgatctcaattggttaggatgatggtcggacgttcattagaagaggtttttccagtatcaactcatcagccagaggatattattttcgaggcaaagaatatttcaacagataccattcttaacaaagcaagtctttatctccgtaaaggggaaatagtaggtttggcaggaatggttggttccggaagaactgaattggcacgagctctttttggtgcagatacgctgacttccggaattatatcactaaaagggaaggaaatttttttaaacaatccatcagatgcaattaagaaaaaagtatcccttgttccagaagatagaaaacagcagggactttttatcgaattgccaatcaggaataatatctccatgtccattttacgaaacatttctctatggggatttttgaactggaagaaagaaaaagagattgttgaactagccaggaaaaaacattcaatagcaatggtatctgggaaccaggagattcaattcctaagtggaggcaaccagcaaaaagtggttcttgctaaatggcttcaaaccagaccagaagttatcatcatggatgaacctacacgaggtatagacgttggcgcaaaattcgaaatatatcaacttatgcgccaattgaataaggcggggattgcgatactgatgatttcatcagaactcatagaaattcttgggatgagtgaccgaattcttgttatgaaagaaggaagtatagttgctgagcttcaatcttctgagacttcagaagaacaaattattgaatat

SEQ ID NO: 274249 - DNA, 316 bp, Unknown
  Bacterial polypeptide expressing nucleotide sequence isolated from the Sargasso Sea
ttgaataataaaattgaaaatactttattccagtgcagagcaataaataaggaatttggaaacgttagggcaaataacgacatttctataaatgtaagaacttcccaaatccatgcattattaggcgaaaacggagctggaaaatctacgcttgtaaaaatcatctatgggttacttcagccagataccggtagtatgacgttttcagataaggaatattccccaaagagtccaaaggatgcaagagccttaggcgttggtatggtatttcaacacttttcgttatttgaacctctgacggccttgaaaatatagt

SEQ ID NO: 274250 - DNA, 414 bp, Unknown
  Bacterial polypeptide expressing nucleotide sequence isolated from the Sargasso Sea
aatgaatacaaaccttaaaatttcaaatgtaaccaaaatatatcctggatgtgttgcaaacgacaatgtttcactcgaatttaatagtggtaaaatttatgctcttcttggagaaaatggtgctggaaaatctacactagttaaaattctatcgggcgtcatcattcctgatgaaggtaaaatttatttaaatgaaaataatctaaagcttaattcaccattagatgcaaaaaaaaatgatattggaatggttttccagcattttaaccttttcgaaactttgtctgtatttgaaaacttaataatagactcagacgaacaaagagaaggtttaagagaaaaaattgactcaattatgagaaaatacaatttttcaattgatcttgatatacctgttttaaatctttcagcggg

SEQ ID NO: 274251 - DNA, 789 bp, Unknown
  Bacterial polypeptide expressing nucleotide sequence isolated from the Sargasso Sea
tatggatgaagttatccctccgcaactgcttcgactaaaaggaatcaccaaggaattcccgggatgtctggccaatgaccggattgatctggaaatacaggaaggtgaaatccatgctcttctcggtgaaaacggtgctggcaaaagcaccctggtcaaaatcatttacggcgttttaagacctgaagagggagaattatggtggaagggtaagttgaccccaatcccaagaccggctaccgccaggcagcttggaattgggatggtctttcagcatttttctctcttcgaggcgatgactacgttgcagaatgtcgctcttgcccttccccctatcaaccacgatgagttacgtgaaaagctggaacagactgcggaagcttatggtttggtgcttcatccggatcattatgtccatgacctttccatgggagaacggcagaggatcgaaatagtccgctgcttgctgcaaaatccaaaactgttcatcctggatgaaccaacttccgttctgactcctcaggaaactgagatactcttccagaccctgcgaaaaattgcttccgagggcagggctgtactttacatcagccacaaacttgaggaagtccgcagcctttgtgaccgtgcaaccatcctccgcggaggaaaaaaagtggatgcctgcatcccttcagaagaatccgcccactctttggcggaaaaaatgatcggacagaaaatcgaaattgtggagaaaaaaagcgcctttggaaaatctggaatgcagctcgaagttgaatctctcca

SEQ ID NO: 274252 - DNA, 436 bp, Unknown
  Bacterial polypeptide expressing nucleotide sequence isolated from the Sargasso Sea
tatggcaacagacttaagaatatcaaatatatcaaaaatatatccaggatgtatagctaatgataatgtatctcttcaatttaaaagtggaaaaatatacgcactattaggagagaacggagctggaaaatctacattggtaaaaattttgtctggtgtagtaagcccagataatggtgaagtttttttaaatgaaaaaaatttaaaattaagttctccactcgatgccaaaaaaaataaaattggaatggtttttcagcatttcaatttatttgaaactttatcagtatttgaaaacttaagtatagatgcaactgaagataacaaaagtttaagagtaagaataaatgaaatattaaaaaaatataactttagtattgaccttgacgttcctgtattaaatttatcagcagggcataagcaaaaagttgagatt

SEQ ID NO: 274253 - DNA, 643 bp, Unknown
  Bacterial polypeptide expressing nucleotide sequence isolated from the Sargasso Sea
atgcctttgactcaagaaaaaacggttctttctctgagaggaattactaagcagtttcctggagtgttggcaaatgatgatatcaactttgatttacttgaaggtgaagtccacactattcttggagaaaatggtgcaggtaaatccacattaatgagcatcatcgatggtatttatcaacccgacgaaggctctatttcattatacggagaaaaaataaatttctcgaatccacgagattccattgatcatggaattggaatggttttccagcatttcatgttgattcccaatcattcagtcgcagaaaatattactttgggattgaagggtttgggcaggctgaatattgaggatgtcaagaaagacattcatgaaatttgtgagcgttacgatctccatgttgatccagataagaaaatacgagatttatctataggtgaacaacaaagagttgaaatcatcaaggtgatctaccgtggtgcaaaaatattaatccttgatgaacctacagcagttttaaccccacaggaatcggaagctttatataaaatcatcaggagactagcggatcaaaaccattcgatcatcttcatttcacataaaatgaaagagattctcgatctttcacagaggataaccg

SEQ ID NO: 274254 - DNA, 1138 bp, Unknown
  Bacterial polypeptide expressing nucleotide sequence isolated from the Sargasso Sea
aaaaagctgtgaagttcttaatagtataaatgttgagcttgatattaatgagatagttggaaaccttaatacttctcaatggcaaatcattgaaatatgtaaagctctagtaaaaaatcctaaatttattgtaatggatgaaccaacagcttcattagatgagaatcaaatagataatttgtttgcaataataaaaagattaaaaaataatggcataggaattatttatatatctcataaattgaatgagattattaaaatttctgatagaattactgttttaaaggatggcaaaataagcaaattatataataataaaaatattgatgaaactattttaatcaaatcaatggttggtgatgctattgaaatcaaaaaggagagaaaaaagactaaagaaagtagatcagtaatactcgagcttaaaaatttaaattatcaaaacaaatttaaaaatattaatatagaattaaaagatggtgaagttcttggattaagtggattattaggctcaggaacaaatgatattttgagagctctatttggaataataaaggataatgaaggtgaaatattttttaataataacaaaattaaagtaaactctcctattagtgctgtcaattttggatttggctacataccttcagatcgaaaaaatgagggtctaatacttgaaaattcaataaaagataatagtgttttaacaatttttaaaagcttaaccaatctaggaatattcaattcaagaaaagcagaaaaaattacaaatgaatatgtagaaaaacttcaagttaaagtaacggatataaataataaagtaatgaatttatcaggcggcaatcaacaaaaaattgtaattgctaaatggttagctaaaaattgcaaaatacttctatttgatgaacctacaagaggcattgatgttgctgcaaaagcacaaatatggaaattaattaatgattttgcaaaatcaggaggcgcagtaattgttgcatcaaatgaaatacctgagttaatattaggatgtgatagaatattaactatgaataaaggtgaaatggtaaaagtttttgaagagaatgaatttaatgaagaaaaaatctctatgtgtatttcaacaagttatttagaataa

SEQ ID NO: 274255 - DNA, 935 bp, Unknown
  Bacterial polypeptide expressing nucleotide sequence isolated from the Sargasso Sea
gatggtcctgaacgtccggaatctctccaaacgttttgacatgacacaggctctcgaagatgtctcgatggatatgaaagccggggagatccatgcgctggttggagaaaacggggcaggaaaatcaacattgatcaagatcctgaccggcatccagcatgccgaccagggagaagttttgcttcaggggcaaacggtcagaatttctgatgcccaggaagcacaatcccttggcattgcagccatcttccaggaacccatggtctttccggatttggatgtggcagagaacatcttcatcagccatcgggaccgaggtttttttgtccgttggaaaaagatctaccaggacgcggagaccatactcaatgacctcggaatacagttggatgtccgttctcctgcaagcggattaaccctggcggcacagcaggcggtcgaaattgcaaaagccatatcgctgaatgtgaaggtgctgataatggacgaacctacagcatccttatcatcccatgaagtctctcaactattcagtgtgacccgaaggctacgggatgaaggggtagcggttctgttcatcagtcaccgccttgaagaagttttcgaaatcgccgatagaatcacagtttttcgggacggtcataagatttcaaccaatcctgtaaatgaggtaacccgggaaagtttgatccaggaaatggttggcagagaagtttcaaaattctatcagtccagtaaaaaagctgtaaaagggaaacaagtttgctctattaaaaatctaaacaaaaaaacagtattttcagacatcaattttgatcttcaccaaggagaaatcttaggctttgccggattggtgggttccaggagaaccgatgtggggcttgcgatctttggtgtgtctcctgcggattccggatcgatcgaaatcgaaggac

SEQ ID NO: 274256 - DNA, 690 bp, Unknown
  Bacterial polypeptide expressing nucleotide sequence isolated from the Sargasso Sea
tatgagcaacgccaatatgctcccctcgcccattctggcgctttccgggatcgtcaagaccttccccggggtacgcgccctcgatgaggcgggcctcaaggtctatccgggtcaggtgatggccctgctcggcgaaaacggcgccggcaagtcgaccctgatgaaggtactgaccggcatctaccaggccgatgcgggcagcatcagctatcgcggccagccggttcacttcaaggggccgcgcgactctcaggatcaggggatcagcatcatccaccaggagctgaacctgctgccggagttgtcgatcgccgccaacatctttctcggtcgcgaaccccgtacccgctttggcagcatcgaccacaagcagttgcgtgagcgggccagcaccctgctggcacggcttggcgtcaaacacggcccggatacccggctcggggatctctccatcggcgaacagcagatggtggagatcgccaaggcgctgtcgtttgatgccagcgtcatcatcatggacgagcccaccgatgcccttaccgacaccgagaccgagcagctgttcgtggttatccgcgagctgcgtgagcagggctgcggcatcgtctacatctcccatcgcttgaaggagatcttcgaaatctgtgatcgggtcaccgtgctgcgcgatggcaagtggatcggcgagca

SEQ ID NO: 274257 - DNA, 1639 bp, Unknown
  Bacterial polypeptide expressing nucleotide sequence isolated from the Sargasso Sea
catgaccacggcaccgaaggcattgggcgtggaagtgctgaacgcaagcaaatcgttcggcgcgtttcgcgcattggatagcgtctcgatcaaggtcaaggccggcacgattcacgcgctgcttggcgagaacggggcgggcaagagcacgctcgtgaaagggctggtcggctatggcgtactcgacagcggacagatcgccgccgacggtcgcgaggtccatatcgcgtcgccgcgcgatgcacaggcgcttggcatcggcatggtgtatcagcatttcacgctggcgtccggcctgtctgtcgaagaaaacctgttgctcgcgcgcggacggatgccgtggaaaatcgactggcagggcgagcgtgccgcgcttgccgcattcatgcaacgcatgccgtttcgcttgccgctcgacgcgccggtggccgttctcgccgcgggtgaaaagcagaaactcgagatcctgaagcagctctatctgcagcagcgtttcctgattctcgacgaacccacctccgtcctgacgccgcaagaagcggacgaagtgcttggcctgatgcgcgatctgagctcacgcggcgagttgacggtgctgatgatcacgcataagttccgcgaagtgatggcctatgccgacgatgtcaccgtgttgcgcaagggcaggcaagtgggcacgagcgcggttgccgacacaagccgcgacgaactcgcggcgtggatgatggggaccgtcgccagtcatgcgccgaacgaaatccattcgggaaacgaagcgtcattgatggccgcggtgaccgtcgagcgtctgccacgcaaacccgtcgatgacatggcgcaagtgcgtctcgcactgcgcgacgtatcagtggaagacgatcgcggccacacggcggtcaggcatgcgacgctgtccgtgcgggcgggcgaagtcctcgggctggcgggcgtctccggcaacggacagaaggaactggtggaagcgctggtcggtcagcgccgtgtgaaaaccggcgacatggaggtggcgggccaggcctaccatgcaacgcgtgaagagatgacccacaggcgcgtgttcgcgattcccgaggagcccctgaaaaacgcctgcgtcaccgcgatgagcgtggcgcagaacctcgcgctgcgcgacttcgatcgcgagccgttgcggcgcggcggctggtggctcgaccggcgtgccgtgcgcgagcgtgccgcacagttgatcgccgagttcaatgtgcgtccgccgctacctgaacgcgccatcggcacgctgtcgggcggcaatgtgcagcgcgcggtgctggcgcgcgaactcgggcagccggtggatgtgctgattgtcgcgaatcccgtgttcggtctggatttcgcttcggtcgccgatattcatgcccgtctgatggccgcacgcgatgcaggcgcggcggtgctgctggttagcgaggatctcgatgaactgctcgaactggcggaccgtatcgtggtgatcgcggagggcaggctggtgttcgagacgccggcggcgcgcgcggatcgggccgtgctcggtcagcatatggcagggcacggcgataccgcggcgcatgacgccgtacccacggaaagaatgaaggaagccatcggatga

SEQ ID NO: 274258 - DNA, 1525 bp, Unknown
  Bacterial polypeptide expressing nucleotide sequence isolated from the Sargasso Sea
cctgcttcagctcgacggcatcaccgtcgagtttggagccacgcgcgccctcgacaatgtcagctttaacgtatcgcctggagaggtcgtcgggttgatgggcgccaatggcgccggcaagagcacgctggcgaaagtcattgtcggtgagattgcgttcggctcgtaccggggaaccgtcacctgcaatggcagtcccgccgcgttcagtcattcgcgtgatgcccaccgcgccggtgtcgcgctcgttcaccaggagggctccgtcgtcccccagctgaccatcggtgagaacgtgatgctcacgatcgagccttcgcggttcggtgtcatcgactggaaaggcctgtatgcccgggccgacaccgccatgcgcaaactcgggctggacatcgatacgcgcaagccgctcgccggccagggtggcgtggccctgatggagcaggtggagattgcgcgcgccatcgcgagcggcgcccgcgtgttcgtcttcgatgagtcgacctctgcgctgggcgccggcgagatcgaggtgctgctgcgacgcatgcgcgaactcgccgcccagggcgccggcatcatcttcatctcccaccggaccgacgaaatcctgaaggtctgcgaccgtgtggtgatcctgcgcgatggccgtgtcgccgtctgcgcgccacgcgcgcaactcgatcatgcctcgatcgtacgcggcatgctgggcgatggccgcagcgacacgctcgcgccgctcgcccaggactcgcgcctgaagacgcagggcacgctcgtcaggatccgcgactggcgtatctcgaagtcgctggacaatccgcgcgatctcgccccgatcaaccttgcgctggcgcgcaacgagatcgtggccgtgtatggcccgctcggcgcgggcaagaccgagctgctgcagtcgctctatggcctgctgccggagctgagcgacggtgtgctcgagctcgcgggcgccgcgctgcgcccgcgcaacccgcgcgattccatcctcgcaggcgtggcctatgtctcggccgagcggcagcgcgacggcgtcgtcgcccatctctccgtcctgcagaacatgatgctgggctggcatcgcggcgcgccgcgctggaaaggccccgtggtcgacgagcagagcgcggaagcattgtgccgggagtacatccgcgatctggccatccgcacgcagggacctgcccagccgatagcgaatctgagcggcggcaaccagcagaaggtcctgctcgcgcgcgccctgatcaaccagccgcgtctggtgctgctcgatgaacccacgcgcggcatcgatcttggcgcaaagcaggacgtctaccggctcatccgcaaggtcgccgcaaccggcaccgctgtgctctacgcgacgatggaggaatcggaggcgctggagctctcggaccggatcctggtgctgcgcgacggcaaacaggtagcgctgctcgacacgaaagacaccaacccgcacgagctgcttgcgctcgcgggtggactgcaataa

SEQ ID NO: 274259 - DNA, 1501 bp, Unknown
  Bacterial polypeptide expressing nucleotide sequence isolated from the Sargasso Sea
atgagccttattttagaactcaagcagatcagtaagcactatccgggcgtaaaagcccttgaggatgtgagtttgcggttatttgcgggggaagttcacgccctgctcggcgaaaacggtgcgggtaaatcgacgctggtgaaagtgatgacaggcgcccagtcaaaagatatgggcgacatcctctttcttggcgagccgcaacatttcaacacaccaatggatgcgcaaaaggcagggatcagcacggtttatcaggaggtgaacttagtgcctaacctgaccgtggcacaaaatttgttcctcggttacgaaccgcgccgtcttgggctgatccatttcaaaaaaatgtatgccgatgcgcgcgcagtgttaacccagtttaagctggatatcgatgttagcgcgccgctgtcggactattccatcgcggtgcaacaactcattgccatcgcccgcggtgttgccatgtcggccaaggtattagtgctcgatgagcctacggcgagcttagatgccacagaagtccaagtgctatttgggatcttaaaccagctcaaagccaagggtgtggctattgtttttatcacacacttcctcgatcaggtttatcagataagcgatcgcattaccgtgctgcgtaatgggcgatttatcggcgaatatctgacggccgaattaccacagcctaagctgattgaagctatgctcgggcgttctttgcaggagcaattgattgataaacaggaaaaggagcgcaccgtcacccgcgctgaggctgtgctcttgtccctcaaagatgtgtcggtaaaaggttcaatccaatcgatgaatcttaccgtacctaaggggcaggcggtcgggcttgcgggtcttttaggatcggggcgcagcgaagtctgtaacgccgtatttgggctggatttagtcgatagcggcagtattcatttggcggggcagaaactcaagctgtcgcaacccgtggatgcgatcagcgccgggatcgccctgtgccctgaagatcgtaagattgacggcattatcggccctttgtctatccgtgaaaacatcatactcgcgctgcaggcacgtatcggttggtggcggtatttatctaaagctcggcagcaggaaattgcccagttctttatcaataaattacagattgcaaccccagatgcggataaacccatagaacagttgagtggcggtaatcagcagaaggtgatcctcgcgcgttggttagccatagagccgattttattggtactggatgagccgacccgtggcatcgatattggtgcccacgctgaaatcgtcaagcttatcagaagcctgtgtgatgacggcatgtcactattggtcgcatcgtccgagcttgatgagcttgtggccttttcaaataaagtcgtggtgctacgcgacagatatgcagtacgtgaactttcaggcgcggaactgacctcgcaacatgtaatgcaagcgattgcggagggataaa

SEQ ID NO: 274260 - DNA, 943 bp, Unknown
  Bacterial polypeptide expressing nucleotide sequence isolated from the Sargasso Sea
cctgtaaaaagaggtgtgtcgattatttatatatcccatcgtctcgaagaagttttccgaattgctgatgttgtgaccgtgcttaaggatggtcaactcgttgagacagaatcgatccacgaacttacccgagcggaattggtcaggatgatggtgggaaggactcttgaagaagtgttcccggtttcaaacaatcagcctgggaaaccggtgttgatcgcagagaacatttcgactgataccgtccttgaacaagtcagtctcgatctaaggcaaggagaaatcgtcggactggctgggatggtcggttccgggagaacggaactggcaagagcccttttcggtgctgatcctctgacttctggaagcataaaaatcaatggtgaaaatgcttatttgaagaacccttttgaagcgattaagaaaaaaatttcacttgttccggaagacaggaaagagcaggggcttttcacagaattgcccatacgaaacaacatcaccatgccgatactgaggaaaatttctcagtggggatttctcagtcgatcgaaagaacaggaaatcgttgatcagtcaagaaatcagctttctatcgccatggcctccggaagccaagaagtgcagtatcttagtggaggaaatcagcaaaaagtagtactggcaaaatggcttcagacacgaccggagatcatcattatggatgaaccaacccggggagttgatgtaggagcgaaatttgaaatttatcaactgatgcgtcatttaaaccaagagggtatcggaattttgatgatctcatcggaactcaccgaaatcctcggactcagtgatcggattctggtcatgcgggagggaaggatcgttgctgaactggttccttcagaaacatcagaggaacaaatcattgaatatgcgacaacgacggtttccaaagcggcctagt

SEQ ID NO: 274261 - DNA, 1147 bp, Unknown
  Bacterial polypeptide expressing nucleotide sequence isolated from the Sargasso Sea
gatttatcaaaaaaatatagcctaccaattgatgtaaatttaaccattgatgatttaggagttggtgaaaaacagagagttgaaatactaaaagttctatacaggggggctaatattttaattttagatgaaccaacagctgtacttgttcctcaggaagttgaagaattgtttgaaaacttgaagaatttagttagtcagggagtaaccatactttttatttcccacaaattggatgaggtcatggaaatagcagacaggatatctgtcatgagaggtggtcaacacgtagggacagttagtaaggaagaggcttcaaaaaaaatactcgctgaaatgatgattggaaaagatttaccaaccccgccaagtagagaaactttgatttccagtgaaaattgtcttcagcttaaagatttaaatggagaacccagcttaggaaaaataccttttgaagatatcaacttagagattaaaaaaggtgaaatatgtggaatagcaggtgttgaaggtaatggccaaagagaattaagtgaagcaattttaggcctatacccagttgaatcaggacaaatattcttagaagatatagaaattacaaaattatcaacaagagaaagaaggcttacaggtattagttttataccagaagacagacagtcacaaggtcttgtagtagagtcgaatcttgtcgaaaatattattttaggaaaacaaagtagtaatacatatagttctaaatttaaaaatgttttgtttaaaaatgcttcaaaaaattctaaagacgttgtagacaactatgatgttaaaactccaagcgtacaaactttagctcttgctctatctggaggcaatcaacaaaaatttgtagttggaagagaaatagatggtaaacccagatttcttttagcttcccaaccaacaagaggtgtagatattggggcccaggcactaatttgggataagctaaaagaagctagagacatgggccttggtgttttgttaatttcggcagatttagatgagcttcttggactatctgataaattgtatgttatttatgaaggtaagctggttaaacagctagaacctaaagaagctacaccagaacaattaggatcatatatgactggacttggtatatgaa

SEQ ID NO: 274262 - DNA, 829 bp, Unknown
  Bacterial polypeptide expressing nucleotide sequence isolated from the Sargasso Sea
aatgaatacaaaactcaaggtatctgaaatttcaaaaatttatccaggatgtattgcgaacgataaagtatcattagaatttaagagtggaaaaatatacgctttattgggagaaaatggtgctggtaagtctacattagttaaaattttgtcaggagtagtaaaacctgatgagggtgaggtttttttaaacaatgaaagtattaaacttaactccccacttgatgcaaaaaaaaataatattggaatggtttttcaacatttcaatctttttgagactttatctgtctttgaaaatttaagtatagatagcgataaaaaaaatgaggacctaagactatcagtttataatatcttaaaaaaatataattttaaaattgatttagatattccagttttaaatttatcagctggtcaaaaacaaaaggttgaaattattagatgtttaatcagaaatcctaaagttttgataatggatgaacccacatcagttttaactgagcaagaaacagaagatctatttatttcattaaaacaattttcagatgagggaatattaataatttatattactcataaattaaaagaagtgctttcactatgtgatgaagtagctgttatgagaaaaggtaaaatagtatcagtaagtaaaacaaaagaagaaaaaattgaaactttagctaataagatggttggtgaaaatttaagcgcaattaaaaaaaaaaataataattttaaatatagtgaagaaatcctaaaaatttcaaacttaaattttagaagtgaggacccttacgaaacaaatttaattaatttaaatttttcataa

SEQ ID NO: 274263 - DNA, 559 bp, Unknown
  Bacterial polypeptide expressing nucleotide sequence isolated from the Sargasso Sea
atgaacacaaatctaaaaatatcaaatataacaaaaatttatccaggatgcattgcgaatgataatatatcattagaatttaaaagtggaaaaatttatgctttacttggagaaaatggtgcagggaaatcaactttagttaaaattctttctggcgtaataattcctgataagggggaaatttttttaaataataaaattttaaaattaaactcaccaatagatgctaagaaaaataaaattggtatggtatttcaacattttaatttatttgagactttatctgtatttgaaaatttaattatagattcagatgaaaatagagaaaatctacgagaaaaaatacaatcagtaatgaaaaagtataatttttctatagatttagatattcctgttttaaatctttctgcgggtcaaaaacaaaaggtagaaatcataagatgtttgataaggaatcccgaagttttaattatggatgagccaacttctgtacttacagaacaagaaaccagtgagctattttcatctttaagaaattctcaatggaaggcatattgat

SEQ ID NO: 274264 - DNA, 691 bp, Unknown
  Bacterial polypeptide expressing nucleotide sequence isolated from the Sargasso Sea
aatgaatacgaacctcaaaatttcaaatgtaactaaaatatatcctggttgtgttgcaaacgacaatgtttcacttgaattcaatagtggtaaaatttatgctcttcttggagaaaatggagctggaaaatctacactagttaaaattctatcaggagtcatcattcctgacgaaggaaaaatttatttaaatgaaaataatcttaagcttaattctccattagatgcaaaaaaaaatgatattggaatggtatttcagcattttaaccttttcgaaacattgtctgtatttgaaaacttaataatagactcagatgaaaaaagagaaagtttaagagaaaaaatagactcaattatgaaaaaatacaatttttcaattgatcttgatattcctattctaaatttatcagcgggtcaaaaacagaaagtagaaatcataagatgcctaataaggaacccaaaagttttaattatggatgaacccacatctgtattaacagaacaagaaacaagtgaactgttcttatctttaaaaaaattttcagaagaaggaattttaattatttatataacccataaattaaaggaagttatgcaactttgtgatgaagttgctgtaatgagaagaggaaagttagtttcctgtagccaaatcaaggatgaaaatatagagtcactcgctaacaaaatg

SEQ ID NO: 274265 - DNA, 832 bp, Unknown
  Bacterial polypeptide expressing nucleotide sequence isolated from the Sargasso Sea
attgttaggtgaaaatggtgctggaaaatctactttagtaaaaattctttatggattacttcaatctgatgaaggctttattaattttaacaatgaaattttaaaagttaactcaccatctcaggcaagaaaaaaaggaattggaatggtatttcaacatttttcactttttgaatcattgactgtaagagataatttaatcttaggtatagatgaaggaatttctttttctaatttacagaatcaactcaaagatatttcatcaaaatataatctttctctcgatcttgatgctcctattacttctttatctgcaggagaaaaacaaagagttgaaatagttagaattcttttacaagatcctcaactgttaattatggatgaacccacatctgttttaactccccaagaagttgatagtctttttataactcttaatgctttagtgaaagaaggcagaactgttctttatattactcataaattagaagaagttatcaatatatgcaatgatgtaacaataatgagaaatggtgaagtaatagactcttgttcaactaaaggcgaaactgctaaatcacttgctactaaaatgttaggacaaaagttagatgatttaaaaacagattattctcatattaaaaaatctgtaagctttattgctaaaaatattaaatgttcttttaacgatcctttttttacagatctaaaaaatgtttcttttcaagttaatgaaggtgaaatttttggcatagctggtgtagcaggaaacggtcaatcagaattgatgaatattttgactggtgaaaatactgaaatagatgaaggagaa

SEQ ID NO: 274266 - DNA, 562 bp, Unknown
  Bacterial polypeptide expressing nucleotide sequence isolated from the Sargasso Sea
tatggcaacagacttaagaatatcaaatatatcaaaaatatatccagggtgtatagctaatgataatgtatctcttcaatttaaaagtggaaaaatatacgcgctattaggagagaacggagctggaaaatctacattagtaaaaattctgtctggtgtaataagcccagataatggtgaggtttttttaaatgaaaaaaatttaaaattaagctctccactcgatgccaaaaaaaataaaattggaatggtttttcagcatttcaatttatttgaaactttatcagtatttgaaaacttaagtatagatgcaactgaagataacaaaagtttaaggttaagaataaatgaaatattaaaaaaatataactttagtattgatcttgatgttcctgtattaaatttatcagcagggcaaaagcaaaaagttgagattataagatgtcttttaagaagccctaaagttctaatcatggatgagcccacatctgttttgactgagcaggaaacagaggaattatttatatctttaaaaaaattctgtgatgaaggaaatattaat

SEQ ID NO: 274267 - DNA, 633 bp, Unknown
  Bacterial polypeptide expressing nucleotide sequence isolated from the Sargasso Sea
tatgagtaatacatttattaaatttaataatataacaaaaaaatttccacgagttgttgccaataatgacgtttcttttgatataaaaaaatcatctgttcatgctttgctgggagaaaacggagctggtaaatctactttggttaaagttttatatggtttgcttgctgccgatcaaggtactataacttttaataaccaaaaattaaatatctcttctccttctgaggcaagaaaaaaaggtattggtatggtattccaacatttttccctttttgaatctttaacagttagagataatttaattttaggtattgataaaaaaatttcatacaatgatttgaaaaatcaacttcttgatatttcttctaaatataatttacctttagatctagatgcccctatcacatcattatctgcaggtgaaaaacaaagagttgaaattgtaagaattcttttacaagatcctcaattgctaataatggatgagcccacatcagtacttacacctcaagaagttcaaaatctttttgtaacattgaatgctcttgttaatgaaggaagaacaattctttatattacacataaattagaagaagttattactttatgtaatgatgtaacgatcatgag

SEQ ID NO: 274268 - DNA, 978 bp, Unknown
  Bacterial polypeptide expressing nucleotide sequence isolated from the Sargasso Sea
aatggtgctggaatcaaaaagctccttgagttactggaatgttcagtatcaccgttggcaatagctggaagtcttcgtgtgggtgatcaacaactcgttgaaatagccaaagcgctatcactagaagcctcaatcgttgttatggatgagccaacaagtgcgctaacagaggcagaatctgctcgccttgagcgaacgatttatcgtttgcgagaacgaggtacaacaattttgtacatctcccacaaaatggatgaggtttttcgaattgcagatagaattacagtgttgcgagatgggcaacatattcgcacgaccaatcgaagcgatacttctccggaagaagttacaggctggatggtcggtcgtgagattgctgggcatgaatttcatcatcatcgtgagcgcggaaatgtgttgctcacagtgagaaaactgactctcccttggccggaacatcctcgcggttatcgtctaaaggatatctcattggatttgcatgcaggggaaatcctaggtgttgctggcctgatgggggctggcagaacggagttgcttgaaactcttttcggtgctggtgaaccaacatggacaggtcaaattagcctcaatggtcattcaatacgtttttgtcatcctcgagaggcctgtgctgctggtattggcatggtcaccgaagatcgaaagcggctgggactcttctccgatcttgatgtcgctgcaaatatcagtctttgtagcctacgtcagacgacacaatggggcttggtgcgtcgtgcgaaagaagaatcactcgtcactgagtcagtgtcagcaacaggagtaaagacaccgagcattcatgctgccatcactggcctttcaggaggaaatcaacaaaagtgcatcattggaagatggttgctcacaaagcacgagttctgcttttgggatgatcaactcgtggcattgatgttggagcaaagcagactttactcg

SEQ ID NO: 274269 - DNA, 797 bp, Unknown
  Bacterial polypeptide expressing nucleotide sequence isolated from the Sargasso Sea
tatgcacacccatttaaagatttcaaatttaactaaaatttaccctggctgtattgcaaatgataaggtttctctagaatttaaaagtggaaaaatttatgcattgcttggtgaaaatggtgctggaaaatccacattagtaaaaatactgtctggtgttatacagcctgatgaaggccaaatatttttaaataacaaaattattaaattaaattcgccaatcgatgctaaaaaaaaaaaaattggaatggtttttcaacatttcaacttatttgaaactttatctgtttttgaaaatttaattatagactctgatgaaaatagagaaaatctaagagaaaaaattaaattggtaatgaaaaaatataatttttctatcgatttagatgttcctgttttaaatctttctgcaggtcaaaaacaaaaagttgagattgtaagatgtttaataagaaatcccgaagtattaataatggatgagccaacttcagttcttactgaacaagaaactagtgatctattttcatctttgaggcagttttctatggaaggtattttgattatttatattactcataaacttaaagaagtaatgtcgttatgtgatgaagttgccgtgatgagaaaaggacagttggtatctgtaagtaaaattattgatgagaaaattgaaactttggcaaataaaatggttggtcaaaatttaaaagttgttaaaaaagtatcagaaaaaaaatctacagaacaactagtaaaaatttcaaatcttaattttaccagtgaagatccttttgaaa

SEQ ID NO: 274270 - DNA, 867 bp, Unknown
  Bacterial polypeptide expressing nucleotide sequence isolated from the Sargasso Sea
tatgaacacaaatctgaaaatatcaaatgtatcaaaaatttatccaggatgtattgcaaatgataatatatccttggaatttaaaagtggaaaaatttatgcattactcggagaaaatggtgctggaaaatcaactttagttaaaattctttctggagttataattcctgataaaggagaaatttttttaaataataaaattttaaaattaaaatcaccaattgatgccaagaaaaaaaaaattggtatggtatttcagcattttaatttattcgaaactttatctgtatttgaaaatttaattatagattcagatgaaaacagagaaaatcttcacgaaaaaatacaatcaataatgaaaaagtataatttttctatcgatttagatattcctgttttaaatctttctgcaggtcaaaaacaaaaagttgaaattataagatgcttgataagaaatccagaggttttaataatggatgaaccaacctctgtccttacagaacaagaaactagtgagctattttcatctttaagacaattttcaatggaaggcatattgataatttatattactcataaacttaaagaagtaatgtctttatgtgatgaggttgctgttatgagaaaaggacaacttgtatctgtaagtaaaattgtaaatgaaaaaattgaaactttggcaaataaaatggttggccaaaatttaaaaacagttagaaaaagcatttctaatgaaagatctagtgaaaaattaattaaaatttcaaatcttagttttagtagtgaagatccttttgaaactaatttggtaaatataaattttgaagtaaatcgaggaagatgccttggtatagcgggtatttcagg

SEQ ID NO: 274271 - DNA, 728 bp, Unknown
  Bacterial polypeptide expressing nucleotide sequence isolated from the Sargasso Sea
tcttttcctaaagtaattgcgaataaaaatgtttctttcaatattaaaagaaatactgtccatgcacttttaggtgaaaatggtgctgggaaatctacgttagtcaaaattttatatggattattgaaatcggatcaaggaaaaataatatttaacaatcaccctttaaaagttgagtcaccatctgaggctagaaaaaataaaattggaatggtttttcagcatttttctttatttgactcactcacagttagagaaaatttaattttaggtattgatcaaaatatgtcattctctagcctacaagataaagtaaatgaaatttcaaatagatataagctccccttagatctcgatgctccaataaatactctttctgcaggacaaaaacaaagagttgaaattgttagaattcttttacaagatcctgaattattaataatggatgaaccaacatctgttttaacccctcaggaagttgaaagtttatttgaaacacttaatactcttctaaaagaaggcagaactattttatatattactcataaattagaagaagttataaatttatgccatgaggtaactattttaagaaatggagaagttatagagtctagtaaactagaaaatgaaactgctgaaactttggcaacaaaaatgttgggaaaaaaattaactgaaattaagactgattattcaaggattactccaaaaataaatttatcttc

SEQ ID NO: 274272 - DNA, 475 bp, Unknown
  Bacterial polypeptide expressing nucleotide sequence isolated from the Sargasso Sea
cttcttggagaaaatggagctggtaaatcaacattggtgaaaattttatctggagtaattatacctgatgaaggtgaaatatttttaaataaaaatattttaaaattaaactctccacttgatgcaaaaaaaaatgatattggcatggtttttcagcatttcaatctttttgaaacattgtctgtattcgaaaacctaattattgactctaatgaaacaaaagaaaatcttagagaaagaattgaatctattatgaaaaaatataatttttcaataaatcttgatgttcctgtattgaatctttcagctggtcaaaaacaaaaagtagaaataattagatgtcttataagaaaccctaaagtactaattatggatgaacctacatctgtattaacagaacaggaaacaagtgaattatttttatcgttaaaaaaattctctgaggagggaattttaattatttatattacacaca

SEQ ID NO: 274273 - DNA, 688 bp, Unknown
  Bacterial polypeptide expressing nucleotide sequence isolated from the Sargasso Sea
tatgaatacacacttaaaattatcaaatgttacaaaaatttatccagggtgtgttgctaatgataatatttcattagaatttaaaagtggaaaaatttatgctctgctgggagaaaatggtgcaggaaagtcaacattagtaaaaattctttcaggtgtggtaattcctgatgaaggaaaaattgttttaaacaataaaattattaaattaaattcaccaattgatgccaagaaaaataaaattggtatggtatttcaacattttaatttgtttgagactttatctgtatttgaaaatttaattatagattccggtgaaaatatagaaaacctcagagaaaaaatattatcaataatgaaaaagtataatttttcgattgatttggatattccagttttaaatctttcagcaggtcaaaaacaaaaagtggaaatcataagatgtttaataagaaatccagaggtattaataatggatgagccaacttcagttttaactgaacaagaaacaagtgaactattttcatctttaagacaattttctttggaaggaattttgataatttatattactcataagcttaaagaagttatgtcattatgtgatgaagttgcagttatgagaaaaggaaagttagtatctgtaagtaaaattttagacgaaaaaattgaaactttagcaaataaa

SEQ ID NO: 274274 - DNA, 670 bp, Unknown
  Bacterial polypeptide expressing nucleotide sequence isolated from the Sargasso Sea
tatgaatacaaatttaaaaatatcaaatgtaactaaaatttatcctgggtgtattgcaaatgataatgtttcattagaatttgaaagtggaaaaatatacgcattactaggagaaaatggagctggtaaatcaacattggtaaaaattttatctggagtaattatgccagatgaaggtgaaatatttttaaacaaaaatattttaaaattaaactctcctcttgatgcaaaaaaaaatgatattggtatggtttttcagcacttcaatctttttgaaactttatctgtattcgagaatttaataattgactcagatgaaacaaaagaaaatctcagagaaaaaattaaattaactatgaaaaaatataatttttcaataaatcttgatattcctgtattaaatctttcagcaggccaaaaacaaaaagtagaaataattagatgtcttataagaaaccctaaagtcctaattatggatgagcctacatcagtactaacagagcaagaaacaagtgaattgtttttatcattaaaaaaattttctcaggaaggaattttaattatttatattacacacaaacttaaagaagtaatgcaactttgtgatgaagttgcggtaatgaggaagggcaaacttgtttctataagccaaatcaaagaagaaaacata

SEQ ID NO: 274275 - DNA, 1000 bp, Unknown
  Bacterial polypeptide expressing nucleotide sequence isolated from the Sargasso Sea
ctcatttccgtcaagcggctcagcaagcactttcccggtgtgcgggcgcttcacgaagtccagttcgaactcatggcgggtgaagtccacgcgctgatgggtgagaacggcgccggcaagtcgacgctgatgaaaatcctcgccggcgtctacacccgcgataccggtgaaatcctccatgacggccagccggtcgaattttcgagcccgcgcgaggcgcaggccatgggcatcggcatcattcatcaagagctccagttgatgaatcacctgagcgtcgcccagaacatgttcatcggccgggagccgcgcggccgtttcggcctattcctcgacgaagacaagctcaacgcgcaggcgcgcgacattcttgcccgcatgcatgtgaatctcgacccgcgcgcggtggtcagcaccctgacggtagccagacagcagatggtggagattgccaaggctttgtccttcgattcgcgcgtgctgatcatggacgagccgacctcggcgctcaacgaagccgagatcgccgagctgttccgcatcattcgcgagttgaagagccggggcgtgggcatcgtctatatctcgcacaagatggatgagctcaagcagattgccgatcgcgttaccgtgctgcgtgacggcgaatatgtggcgaccgtctccgcgaaagacactagcgtcgaagcgatcatcggcatgatggtcgggcgaaccttgaccgacgtggcgccttctcacggtacggcggataaaggcgaggtcgcgctcgaagtcaggaatctgaacgccggcccgctcgtcagggacgtcagtttcacgcttcacaaaggcgagatattgggctttgcgggcttgatgggcgccggtcgcaccgaggtcgcgcgggcagtgttcggcgccgatccgagcgaatcgggcgagattgtcgtgaacggcgtggaagtaacgatcaggaatccgagcgatgcggtcgcgcgcgggatcggctatctctcgg

SEQ ID NO: 274276 - DNA, 802 bp, Unknown
  Bacterial polypeptide expressing nucleotide sequence isolated from the Sargasso Sea
catgaaaacaaatctcaaaatatcgaatgtaagtaaaatttatcctgggtgtgttgcaaatgacaatgtttctttagaatttgaaagcggtaaaatatacgctctccttggagaaaatggtgctggtaaatctacattagtcaaaattttatctggtgtaataatgccagatgaaggtgaaatatttttaaataaaaacactttaaaattaaattcccctcttgatgcaaaaaaaaatgatattggaatggtttttcaacatttcaatctttttgaaactttgtctgtatttgaaaatttaattattgactcagatgaaacgggtgaaaatcttagagaaaaaatagaattaattatgaaaaagtataatttttcaattaatcttgatgttcctgtactaaatctatctgcgggccaaaaacaaaaagttgagattataaggtgtcttattagaaatcctaaagttcttattatggatgagcctacttctgtattaacagaacaagaaacaagcgaattatttttatcattaaaaacattttctgaagagggaatcttaataatttatataactcataaacttaaagaggtaatacaactttgtgatgaggtagcggtcatgagaaaaggaaagctcgtttcagtaagtaaaataaaagatgaaaatattgagtcgcttgcaaataaaatggtgggtcaaaatttaaagacagttaagaaaaaaaaattaactgtatcttcttcagatcaattaatcaaaattataaatcttaattttaaaagtgaagatcctttcgaaact

SEQ ID NO: 274277 - DNA, 982 bp, Unknown
  Bacterial polypeptide expressing nucleotide sequence isolated from the Sargasso Sea
catggcggggatcggcaaatcatttggtccggttcacgcattaaaatcggtcgatttaaccgtttacccgtacgaaatacatgcgttgctaggggaaaacggtgccggaaaatcaacgttaatgaaagttttgtcgggaatacatgaaccgaccacaggcaccatcacggtgaataacgtgaattatgccagactcgaccataaattagcagccagactcggtatcggcattatttatcaagaactcagcgttattgatgaattaaccgtaatggaaaatttatatatcggccgccatctgacgaaaaaagtctgtggcgtcaatattatcgactggaaagagatgcgcatcagagcggcaatgatgctgctgcgcatcggattaaaggtcgatttagatgagaaagtcgcgaatctgtccatcagccataagcagatgctggaaatcgcgaaaacactgatgctcgacgccaaagtgctgatcatggatgaacctacctcttcgctgaccaacaaagaggtggactacctgttcctgatcatgaaccagctgcgtaaagaggggaccgccatcgtctatatctcgcacaagctggcggagatacgccggatctgcgaccgctacacggtgatgaaggacggtagcagcgtatgcagtggcatggtcagcgaggtcaataacgacgatatcgtacgtctgatggtcggtcgtgagttgcaaaaccgctttaacgcgatgaaagagaacaccggaaatatcgcgcgcgaaacggtattcgaggtgaaaaatgtcaccagccgggacaagaaaaaggtccgcgatatctcctttagcgtcaatcgcggtgaaattctcggctttgccggtctggtgggctccgggcgtaccgaactgatggattgtctgtttggcgttgataagcgcagcagcggtgaaatcatccctcatggtaaagcgattaccccgcgttcaccgctggat

SEQ ID NO: 274278 - DNA, 620 bp, Unknown
  Bacterial polypeptide expressing nucleotide sequence isolated from the Sargasso Sea
aatggctaaaaaagaattagaaattcttttaaaagcaacaaaaattagtaaatattttggtgattttgttgcaaatcaaaatattgatatttcaattgctaaagggcaaatacacgctcttttgggtgaaaatggcgcaggtaaatcaacgttggtaaaaatgttttatggcgtcttgcaaccagacagaggatttatagaaattaataacaaaaaagtttctataacatcacctaatgtggctcgaaaaaacggaataggaatggtttttcaacatttttctcttttccctgcccttactgttgcagaaaatatcttaatcgcactagataataagattaaattcaataaagtagtcaacgaaataacaaaattatcaaaagaatgggaattgtttgttgatcctttaaaattagttagtgagttatcagttggagaaaaacaaagagtagagattattagatgcttaatgcaaaatccaagtttattaataatggatgaaccaacatcagttcttactcctcaagaaatcaaaaatttattcaaaattttaaaaagacttgcatcttctggatgttctatactttacatcagccataaattagaagaaattgtcgagt

SEQ ID NO: 274279 - DNA, 740 bp, Unknown
  Bacterial polypeptide expressing nucleotide sequence isolated from the Sargasso Sea
aatgaatacaaaccttaaaatttcaaatgtaactaaaatttatcctgggtgtgttgcaaacgacaatgtttcactagaatttaatagtggtaaaatttatgctcttcttggagaaaatggtgctggaaaatctacactagttaaaattctatcaggcgtcatcattcctgacgaaggtaacatttatttaaatgaaaataatctaaagctcaattcgccattagatgcaaaaaaaaatgatatcggaatggtattccagcattttaatctttttgaaactttgtccgtatttgaaaacttaataatagactcagatgaagaaagggaaagtttaagagaaaagattgatacaataatgaaaaaatataatttttcaattgatcttgatattcctgttctaaatctatcagcaggtcaaaaacagaaagtggaaataataagatgcctaataaggagtccaaaagttttaattatggatgaaccaacatctgtattaacagaacaagaaacgagtgaattattcttatctttgaaaaaattttcagaagaaggaattttaattatttatattacacacaaactaaaggaagttatgcagctttgtgatgaagttgctgtaatgagaagaggaaagttagtttctgtaagtgaaataaagaacgaaaatattgagtcacttgctaacaaaatggtgggtcagaacctaaaaacaattaagaaaaaaaaagcaaaaacttcat

SEQ ID NO: 274280 - DNA, 520 bp, Unknown
  Bacterial polypeptide expressing nucleotide sequence isolated from the Sargasso Sea
aatgaatacaaaccttaaaatttcaaatgtaactaaaatatatcctgggtgtgttgcaaacgataatgtttcgctagagtttaatagtggtaaaatttatgctcttcttggagaaaatggtgctggaaaatctacactagttaaaattctatcaggcgtcataattcctgatgaaggtgaaatttatttaaataaaaataatctaaagctaaattcgccattagatgcaaaaaaaaatgatattggaatggtattccaacattttaatctttttgaaactttgtccgtatttgaaaacttaataatagactcagatgaacaaagggaaagtttaagagaaaaaattgattcaattatgaaaaaatacaatttttcaattgatcttgatattcctgttctaaatctgtcagcaggtcaaaaacagaaagtagaaataattagatgcctgataagaaatccaaaagttttaattatggatgagccaacatcagtattaacagagcaagaaacgagtgaatta

SEQ ID NO: 274281 - DNA, 570 bp, Unknown
  Bacterial polypeptide expressing nucleotide sequence isolated from the Sargasso Sea
gatgaatacaaaccttaaaatttcaaatgtaactaaaatatatcctgggtgtgttgctaacgataatgtttcactcgaatttaatagtggtaaaatttatgctctccttggtgaaaatggtgctggaaaatctactcttgttaaaattctctcaggtgttgtcattgctgatgaaggaaaaatttatttaaatgaaaatattctaaaacttaattcaccatcagatgcaaaaaaaaatgatattggaatggtattccaacattttaacctttttgaaactttgtctgtatttgaaaacttaataatagactcagatgaaaaaagagaaagtttaagagaaaaaatagatacaattatgaaaaaatacaatttttcaattgatcttgatattcctgttctcaatttatcagcaggtcaaaaacagaaagttgaaattataagatgccttataagaagcccaaaagttttaattatggatgaacccacatctgtattaacagagcaagaaacaagtgaattattcttatcactgaaaaaattttcaaaagaggggaattttaattatttata

SEQ ID NO: 274282 - DNA, 1738 bp, Unknown
  Bacterial polypeptide expressing nucleotide sequence isolated from the Sargasso Sea
ttgacgcaccatattcatgatgcgaagatcacaaaacggtttcggccatcagcgccatacaaagagaaagattccgccgtatcgacgaaggagacgtgtcagatgagtgagccggttgcggtcgcggccgcgtcatcgcctcaggttccattgatccgtgttgcgggcgtcaccaaacgattcggtggcgtgcaggcgctgcgcggcgtcagcctcgacgtattgcccggcgaagtccatgcgttgctcggcgaaaacggcgccggcaaatccactctgatcaagattctcagcggcgtgcatacctatgacgacggcgtcatcgagatcgccggtcagaaagtggcgttcgactcgccggcgcgctcgcgtgaagccggcgttgccgtggtctatcaggatctgagtctcgtcgaatcgctgtcggtcggcgcgaatctgatgctggggcgcgagccccgcacccgtctcggtttcgtgaagaaccggcaactgatggccaccgtccgcgaattcctccactcgcacggcatcccgctcgacccgcgcacgccggttggcgcattgccgttcgcgtaccggcaaatgaccgaaatctgcaaagcgctgatgggcgacgtgcgcgtgctgattctcgacgaaccgacctcggcgctgaccggcggcgaggaacagattctgttcgacgcgattcgcgcggtcacagagcgcggcgtcggtgtgatctatgtgacgcatcgtctgaacgaggtgttcaggatttcgcagcgtgtcaccgtgtttcgcgacggagccaacgcaggggtgttccagaccgcgcacaccgatatgaagcaactggtcgcagccatcgtcggacccggtcatgcggccttgcaggcgcgggagcggacggctgccggcatggcgggtgacgaaccgtttcccggacagcagaccctcgcgaccttccatgccgctgccgcgcccgtgctcaagttgtcgaacgtcagcaacgacaggcttcgtcacgtcgacctgctgattcgccgcggcgagatccacgggcttgcgggattgatcggcagcggacgcacggagatcctgcaaaccatttttggcattcgcacgatcgaggcaggcgcgatcgtgatcgaaggtcaatcccgcgcgcgtatgacgccggccgaagccatcctgctcggcgtcgcgctggtgccggaagaccgtcatctcgaagggctcgttctcgaccattcgatcgagcgcaatctgaccttgccgcgcttgccgcaattctcgcgttgggggtggctgcgcagccaggcggccgtcaatcaggcgaagcactcgatgcaggaactggccgtcaaggcaccgggctcgtcgaccccggtcaagtttctctcgggcggcaaccagcagaaagtggtctttgcgaagtggaatcacccgcgtcccaagatccttctgctcgacgaaccgacagtcggcgtggacgtcggcgcgcgcgaggagatctacgacgtgatccaggacgccgcgcaagcaggcaccggcgtgctcgtcgtgtcctcggacctcgacgagctgctgcgcctgtgcgcgcggatttcggtcgtcgtggacggctcgatcgtcaggaccattgagcgtgccgatctcgccaacgccgaggcgcttcatcacctgatccagttgtcccgttcctccatcgagtccctcgacgggacttcttccagggcgcattcaaaatgaa

SEQ ID NO: 274283 - DNA, 1062 bp, Unknown
  Bacterial polypeptide expressing nucleotide sequence isolated from the Sargasso Sea
aatgaatacaaaactcaaggtatctaaagtctcaaaaatttacccaggttgtatagcaaacaataatgtatctttagattttgaaagtggaaaaatttatgccttgttaggagagaatggtgcaggaaagtctactttagtaaaaatattatctggcgtaattaatcctgatgaaggtcaaattttcctaaacgataaactccttaaacttacttcacccaaagatgccaaaaataataatataggaatggtttttcaacattttaatctttttgaaacactctcagtttttgaaaatttaagcatcgatagtgaaaaaaataatgatcaattaagaattctagttaataacattttaaaaaaatataatttcaaaattgacttagatgttccaattttaaatctttctgcaggtcaaaaacagaaggtagaaattgtaagatgtctaataagaaatccaaaagttttaataatggatgaacctacctctgttttaacagagcaagaaactgaagatctatttttgtctttaaaaaaattttctaaagaaggaattttaattatttatattactcacaagttaaaagaggtcttgtcgttatgtgatgaagttgccgtaatgagaaagggtaaagttgtatctatcagtagaacagttaatgaagaactatcaagtctagcaaataaaatgattggagaaagtttaaacaagataaaaaaaatgacttcaaataatttaagtggagaacaaattttgagcgtttctaggctcaattttaatagtgaggatccctacgaagttaatttagttgatataaattttactcttaataaaggtgaatgccttgggattgcaggcatatcaggaaacggccaaaatgaattatttcaaattttaagtggtgagactatatcaaataacggttctattaagtttagaagtaaagaaattagcaaattaaaccctaaggaaagaagggaatatttaatggccttttcacccgaagatcgtatatctcaagcagctgttccttcattaaaaatttacgaaaacgtagcact

SEQ ID NO: 274284 - DNA, 1120 bp, Unknown
  Bacterial polypeptide expressing nucleotide sequence isolated from the Sargasso Sea
aatggatatcgatcccgatactccattgaaatacctctccattggtcagtggcagatggtagagattgctaaagcgctggcgcgaaatgccaaaattatcgcgtttgatgaaccaaccagctccctgtcggctcgcgagattgagaatctgtttcgtgtcatccgtgagctgcgcaacgaaggacgcatcattctgtacgtttcgcaccgtatggaggagatttttgccctcagcgatgccatcactgtgtttaaagatggtcattacgtcaaaacgttcacggatatgcagcaggtcgatcacgacgcgctggtgcaggcgatggtcgggcgcgacctcggggatatctatggctggaaatccagaccgtatggcacagagcgtctgcggttgcatgaggtaaaagccccgggcgtgcgtacgccaatcagtttatctgtgcgaagcggtgaaattgtcgggctgtttggcctggtgggggccggacgtagcgaattaatgaaaggactgttcggtggtacgcgtatcacggcgggccaggtatttattgatgaacaacctatcgatatccgtaaaccaagccatgccattgaagcagggatgatgctgtgcccggaggatcgcaaagccgaagggatcattccggtccattcagtgcgcaacaacatcaacattagtgcacgacgtaagcatgttctggggggatgcgtgatcaacaacggctgggaagagaccaatgccgatcaccatattcgttcactcaacatcaaaacaccgggtgcagagcaactgatcatgaatctctccggcggtaatcaacagaaggctatcctcggtcgttggttatcggaagagatgaaggtgattttgttggatgagcctacacgcggcattgatgtaggcgccaagcatgaaatttacaacgtgatttatgccctcgcagcgcgcggtgtggccgtattgtttgcttccagtgacctgccagaagtgctcggtgtcgccgatcgtattgtggtgatgagagaaggcgaaattgccggtgagttacttcatgaacaggcggatgagcgccaggcgttgagccttgctatgcctaaagtcagccaggctgtagcctga

SEQ ID NO: 274285 - DNA, 1501 bp, Unknown
  Bacterial polypeptide expressing nucleotide sequence isolated from the Sargasso Sea
atgaatacaaaactaataatatcaaaaatctcaaaaatatacccaggatgtattgcaaacgataaagtttccttagaatttggaagcggtaaaatatatgctttattgggggaaaacggtgctggaaaatcaacgttagtcaagattttatctggggtagtaaaaccagacgaaggagaagtttttttaaataatgaaaatatcaagcttaactctccattagatgcaaaaaaaaataatattggaatggtttttcaacatttcaatttatttgaaactttatctgtttttgaaaacttgagtattgatagtagcaaaaaaaatgaagaactaagactcctagtaaacgatattttaaaaaaatataatttcaaaattgatttagatattccagttcttaacttatcagcaggtcaaaaacaaaaagttgaaattataagatgtttaattagaaatcctaaagtattaataatggatgaaccaacatcagttttaactgagcaggaaacagaagatctttttgtttcattaaaaaaattctcgcaagaaggaattttaataatttatattacacataaattaaaagaggtactctcactttgtgatgaagtagcagtaatgagaaaaggtaaagttgtatctgtgagtaacacaaaagaggaaaaaattgagagtttagccaataaaatggttggggaaaatctaagtactataaagaaaaaaattaataattttaaaaatagtgaagaaattttaaaaatctcgaacctaaattttacaagtgatgacccttatgaaacaaatttaacaaatttaaatttttctttaaaaaaaggagaatgtttagggatagcaggaatttcaggaaatggtcaaagtgagctttttcaaattttgagtggagagataattactgagaatacttcaataatgtttagacaaaaagaaattagtaaactcaatccgagagaaagacgtgaatatctaatggctttttcacctgaggaccgtatttctcaagctgcagttcctgaattaaagatttacgaaaatgttgcattaaataattttaaatcctcaaatttttttgaaaagggattagtgaatgaaaaaaaaataaaagaacactcaaagaaaattctttctaatttttctgttaatactgataatgttgaattgaaaagtcaatttttgtcgggcggaaatctacaaaaattaataataggaagagaacttattacttctccagaacttttagtgtgctttaatccaacatggggacttgacgttggggcaatcaattatattcacgaaactcttataaatataaatgaacaaggcaaatcttctatagttatttcaacagataacgacgaacttttaagattgagtgacagaatttgtgtaatttataaaggtaagttatctaaaattatggatgcaaatacaattactcctgaaaaattaggagttctaatgggtggaggctctattgattaaa

SEQ ID NO: 274286 - DNA, 1078 bp, Unknown
  Bacterial polypeptide expressing nucleotide sequence isolated from the Sargasso Sea
atggttgatataaagtttaaagaattaaagattgaatcagtcagtaaatcttttcccggtgtgcaagctttagataatgtaagtatgaaaatttctgctggaaaagttcacgcacttatgggagaaaatggtgctggtaagtcaactctaattaaaattttagcaggagcttattcaaaagatacaggtaatattttatttgatgaaaataagttaaatatcagaaatccaaatgatagtttaaattatggaattaaagttgtttatcaagaaatctcactcatctctgaattttctgtagctgaaaatatattcctagataattttcctacaaatagtttgggtgtaatgaactggaataaactttataaagatacagaagagctatttaacagagtcggttttaatttaaatccaaaatctaaaattgcagatttatctatttctcaacaacaaatggttgaaattgcaagagctgtttttaaaaatgcttctgtagttataatggatgaaccaacttcttctttaactcctaatgaaattgaaaaattatttaccgttataaaaaatttaaagcaaaacaatatagcaattttatatgtaactcataaaattgatgaaatttttaaaatagctgatgaagttacagtactaagagacggacaacatatttcaaataaattaatatctgaaactaatgaagagttcattattaaagatatggttggcagaactgtaaatgcaacatttgaaagacctaaagatattttaaatgcaaaaacagtcatgaaggttaacaaaattagttctaagaataaaattaaaaatgtttcatttgatttacatgaaggtgaaattttaggattttttggactcatgggcgcaggaagaactgaattagcaaaagctgtttttggttatgataaaattactgaaggacaaatagaagttaataataatatttataaaagctttaatacatcaacaatggttaacaatggtattggctatattactgaagatagaaaaggtgagggtattgttaaagatatgaatttaagagaaaatatgagtctac

SEQ ID NO: 274287 - DNA, 559 bp, Unknown
  Bacterial polypeptide expressing nucleotide sequence isolated from the Sargasso Sea
atgaatacaaaccttaaaatttcaaacgtaacaaagatatatcctgggtgtgttgcaaacgataatgtttcgctagagtttaatagcggtaaaatttatgctcttcttggagaaaatggtgctggaaaatctacactagttaaaattctatcaggcgtcatcattcctgatgaaggtgaaatttatttaaataaaaataatctaaagctcaattcgccattagatgcaaaaaaaaatgatattggaatggtattccaacattttaatctttttgaaactttgtccgtatttgaaaacttaataatagactcagatgaacaaagggaaagtttaagagaaaaaattgattcaattatgaaaaaatataatttttcaattgatcttgatattcctgttctaaatctgtcagcaggtcaaaaacagaaagtggaaataattagatgtctgataagaaatccaaaagttttaattatggatgagccaacatcagtattaacagagcaagaaacgagtgaattattcttatctttgaaaaaattttcagaagaaggaaatttta

SEQ ID NO: 274288 - DNA, 1507 bp, Unknown
  Bacterial polypeptide expressing nucleotide sequence isolated from the Sargasso Sea
tatgagtgatacaatattaaatatagaaaatattacaaaatcttttccaagagtaattgcaaataaaaaggttacttttgatattaaaaaaaatgcagttcatgcaattttaggagaaaatggagcagggaaatctacgttggtaaaaattctatatggtctcttagaaccagatgaaggaaatattaaattaaataataaggattttaaagttaattccccagcagaagcaaggaaacaaggaataggaatggtatttcagcatttttctttatttgattctttatcagtaaaagaaaatttaattttaggaattgatgaaaagatgtcttattcagatttagaaaataagctagaaaatataagctcaagatataatcttcccttagatttagatgctccaattactgctttatcagctggagaaaagcagcgtgtagaaattgtaagaattttattacaagaccctcagatacttattatggatgagccaacttcagtcttaacaccacaagaagttgaaagtttatttgtaacattaaatgcactcgtcaaagaaggtcgtacaatattatatataactcataaactcgaagaagtaatatcaatatgtgatacagttactataatgagaagtggtgaaattatagatacttcaagtactgcaaatcaaactgcaaaaacacttgcaacaaaaatgctaggacaaaaattagatgacttaaaaactaattatggacatataaaagacgaagttaactttgaagtaaaaaatatttcatgtgactttaatgatccatttttaacagatcttaaaaatatttcttttcaagttagattgggtgaaatttatggcattgctggagttgctggtaatggacaatcagaattaatggatattttaacaggagaaaatataaatattaaatctggatcaattacttttgataataaaaaaattgaaaagtatgggccacaaaaaagaagagatttatctatttcttttgttcctgagaatagattgggtcatagtgcggtacctgagttaagtttgtctgaaaatattcttttgagtcaatttccaaaaaataattttattaaaaatggtataatattgaaaaataacattgatgattttgcgaataatgtaattaatgaatttaaagttattactcctggtaatgatgctaaagcatcaagcttgtctggaggaaatttacaaaaatatgtcattggtagagaaatatcatctaagccaaaaatattaattatttcacatccaacttgggggatagatgccggtgctgagcattctataagagagtctttgatagaattatctcaaaatggcacgtcaataattgttatttctcaagatttagatgagttgattgaaattactcataaaatatctgttatttatgatggtaatttatccaaaccttttaaaactagtgaaatagaaatagaaaaattaggattattgatgggtggaaaaaatgaatag

SEQ ID NO: 274289 - DNA, 1501 bp, Unknown
  Bacterial polypeptide expressing nucleotide sequence isolated from the Sargasso Sea
atgaatacaaatctgaaaatatcaaatgtatcaaaaatttatccaggatgtattgcaaacgacaatatatcgttagaatttaaaagtggaaaaatttatgctttacttggagaaaatggtgctggaaaatcaactttagttaaaattctttctggggtaataattcctgataaaggagaaatttttttaaataataaaattttaaaattaaaatcaccaattgatgccaagaaaaaaaaaattggtatggtatttcagcattttaatttattcgaaactttatctgtatttgaaaatttaattatagattcagatgaaaatagagaaaatcttcacgaaaaaatacaatcaataatgaaaaagtataatttttctatcgatttagatattcctgttttaaatctttctgcaggtcaaaaacaaaaagttgaaattataagatgcttgataagaaatccagaagttttaataatggatgaaccaacctctgtccttacagaacaagaaactagtgagctattttcatctttaagacaattttcaatggaaggtatattgataatttatattactcataaacttaaagaagtaatgtctttatgtgatgaggttgctgtgatgagaaaaggacaacttgtatctgtaagtaaaattgtaaatgaaaaaattgaaactttggcaaataaaatggttggccaaaatttaaaaacggttagaaaaagcatttctaatgaaagatctagagaaaaattaattaaaatttcaaatcttagttttagtagtgaagatccttttgaaactaatttggtgaatataaattttgaagtaaatcgaggagaatgccttggtatagctggtatttctggaaatggtcaaagcgaactatttcaaattttaagtggagaaattatttcagataaaaattctatagaatttaatagtaattttattgggaatcttaatccacaagaaagaagagaatatttaatggctttttctccagaagatagacttgaacaagctgcaattccacaaatgaaaatttttgaaaatgtggctttgaataacttcaagtcatcaaatttttttaacaatggtttaataaatgaaaataaaattaaagagcatgcaaaaaaaatcatttctgactttaatgttaatacagacaatattgaattaaaaagtcaatttttatcaggtggaaatttacagaaacttattattggaagagaattaataacatcgcccgatttattaatttgttttaatccgacatggggacttgatgttggagcaataaattatatccatgaaactctaattaaaataaatgatcaaaataaatcaataatattaatttccactgacactgatgagttattaaagttaagtgataaaatttcagtaatacacaaaggaaaattatcaaaaataatgaattcggacgaagtaacctctgaaaaacttggaatacttatgggaggaggagaaattgattaaa

SEQ ID NO: 274290 - DNA, 1186 bp, Unknown
  Bacterial polypeptide expressing nucleotide sequence isolated from the Sargasso Sea
aatgaacacaaaacttaaagtatctgaaatttcaaaaatatatccaggatgtattgcaaacgataaggtatcattagagtttggaagcgggagaatatatgctttattgggagaaaatggagctggcaagtctacacttgttaaaatcttgtctggggtggtaaaacctgatgagggcgaagtttttttaaataatgaaagtattaaacttaactctcccttagatgccaaaaaaaataatattggaatggtttttcaacatttcaaccttttcgagactttatcagtatttgaaaatttaagcatcgatagtgacaaaaaagacgaagatctaagagttttagtcaacgaaatattaaaaaagtataattttaaaattgatctagatattccagttctaaatttatcagcaggtcagaaacaaaaagtagaaattataaggtgtttaataagaaatccaaaagtattgattatggatgaacctacatcagttttaactgaacaagaaactgatgatttatttatttctttaaaacaattttcaaaagatggaatattaattatttatattactcataaattgaaagaagttttgtcactttgtgatgaggtagccgtaatgagaaaaggtaaagtggtttcggttagcaacacgattgatgaaaaaattgagagtttagctaataaaatggtaggtgaaaatttaaatactattaaaaaaaaaattaataattttaaaaatagcgaggaaattttaaaaatctcaaatttaaattttaaaagtgacgacccatatgaaacaaatttaaataatttaaacctttctttaaaaaaaggagagtgtttaggtatagctggtatttcaggaaatggacaaaatgaattatttcaaatactgagtggagaaataattgcggaaggtacttctataatgtttagaaataaagaaatcgggagattaaatcctagggaaagaagagaataccttatggctttttcacctgaagatcgtatctctcaagctgcagtccctgagttaaagatatatgaaaatgttgcattaaataattttaaatcatccaatttttttgaaaaaggtttagtgaatgaaaagaaaataaaagaacactcaaagaaaatactttctaatttttctgtcaacacagacaatgttgaattaaaaagt

SEQ ID NO: 274291 - DNA, 1513 bp, Unknown
  Bacterial polypeptide expressing nucleotide sequence isolated from the Sargasso Sea
atgagtaaatcaataaaaattcaggatatatcgaaaagttatccaggagttaaagctaactctaacgtatcgtttgacattgacaatgcttcaatacatgccattgttggtgaaaatggagctggaaaatctacattaatgaagatactttacggtatggtaaaacctgattttggagaaatatatgtcttcgacgaaaagatttctctaagttccccaaaagatgctattaattatggtcttggaatggttcatcagcactttatgttagctgacaattttacagtacttgaaagtatcattttgggcatagatggtgcaggaattacaaatctaaaacttgaaaaatacagagagtcaattaatgaggtcatgagcagatattcattgaatgtagagctagacagatttgttgacgatctaggtgtgggtgagaaacaaagagtagaaattttaaaggtattattcagaggagcaaaaatacttattcttgacgaaccgacagcagttttagttccccaagaagtagatgaattatttaaaaatcttaaagaattgcaaaaaaatggagtcacaataatctttatttcacataaattagatgaagtattgaaaattgcagatcaaataactgttatgagaggtggagaaattgttggcactgttgattccgaaggtatagacaagaaagatcttgctgaaatgatgataggaaaaagtttaccaaaacctcctgaaagaacttctgaaagtagtcaagataatgtattaaagatagaaaatttaaattctagaaatgaggagggaaagagagtctttgaagatatctcttttgaaattaaaaaatctgagattttgggaatagcgggtgtagaaggaaacgggcaaaaagaattaatcgaatcgataattggaatccatacaatagaggatggcgaagtatatcttgaaaatcaaaatttaaatgattatggagtaaaagatagacttgatttaggtataagcttcattcctgaggacaggcaagctcaggccctagtaatggaaatgaaactaaatgacaatattattctaggtcgtcaaacaaaagacatttataaaacaaacctctctactgtaaattttaaaaatgctggtgagatatcaagacaagtaatttccgattttaatgttaaaactccaaatgaaactactattgcaacagcattatcaggaggtaatcagcaaaaatttgtagttggtagggaattagatgatgatccaaaagttttaatcgcatcacaaccaacgaggggaattgatatcggcgcccaagctctaatttgggataaacttagagaaactagagataatggcttaggagtactcctagtctctgctgatttagaagaattaattggattatctgatcgcataatcgtaatttatcagggaaaatttgtagctaatttagatcctcaaaatataacaccagaggatctaggtgcttatatgacaggtttaaaacaatgaa

SEQ ID NO: 274292 - DNA, 1507 bp, Unknown
  Bacterial polypeptide expressing nucleotide sequence isolated from the Sargasso Sea
tatgaataatacatttattaaattcaacaatataacaaaaaagtttccaagagttatagcaaatgatgatgtttcttttgatattaaaaaatcatctgtacatgctttattaggagagaatggtgcaggaaaatctactttggttaaagttttatatggtttacttgcagctgatcatggaactataacttttaatgatcaagaattaaatatctcttctccttctgaagctagaaataaaggtattggaatggtattccaacatttttctctttttgaatcattaacagttagagataatttaattttaggaattgataaaaaaatttcttattctgacttaaaagatcagcttgaaaatatttcatctaaatataacttacctttagatctagatgctcctataacttcattatctgctggagaaaaacaaagagttgaaatagtaagaattcttttacaagatcctcaattattgattatggatgagcccacatcagtacttacgcctcaggaagttgaaaatctttttgtaacattaaatgctcttgttaaagaaggaagaacaattctgtatattactcataaactagaagaagttattactttatgtaatgatgttacaataatgaggaatggtaaagtaattgattcatgctcaactgataatcaaactgcaaaatcactggcgactaaaatgttgggtgaaaagttagaagacttaaaaactgattattctcatattaaaaatgaaataagtttttcttctaagaatatttcttgttcttttaatgatccattttttacagatttaaaaaatatttcttttaatgtaaatgtaggagaaatttttggtattgctggagtagcaggtaatggccaatctgaattaatggatattttggttggagaaaatactttaatagatagtggtgaattaatttttaataataaaaatattgaatatcttggccctcagaaaagaagagatttatcaattgcttttgttcctgaaaatagattgggtcatagcgcagtacctgaactaactttatcagaaaatattcttttgagtcaatttccaaataataaattttcaagaaatggaatattaaatcgcaattcaatagaagattacgcaattaaagtaatagaaaactttaatgtagttacacctggatctgatgcaaaagcttcaagtctttcagggggaaatttacaaaaatttgtcataggaagagagatatcatcaaaacctaaacttttaattatttctcatcctacttggggcattgatgcaggagcagaacattccattagagaatctcttattgatctctctaaaaatggaacatctattatagttttatctcaagatttagatgaattaattgaaatcactcatagaattgctgttatttttgatggaaaattatcaaaaccaataaatactaatgaagttgatatcactaaattaggattacttatgggtggaaaaaatgaataa

SEQ ID NO: 274293 - DNA, 1174 bp, Unknown
  Bacterial polypeptide expressing nucleotide sequence isolated from the Sargasso Sea
aatgaatacaaaactcaaagtatcagaaatttctaaaatttatccaggatgcattgcaaacgacaaagtatcattagaatttataagtggaaaaatatacgctttattgggagaaaatggtgctggtaagtctacgcttgttaaaatcttatctggggtagtaaagcctgatcagggtgaagtttttttaaataacgaaagtattaaactaaattctcccttagatgctaaaaagaataatattggaatggtttttcaacatttcaatctcttcgaaactttatcagtatttgaaaatttaagtatcgatagtgacaaaaaagatgaagatctaagaattttagtcaacgatatattaaaaaaatacaattttaaaattgatctagatattccagttctaaatttatcagcaggtcaaaaacagaaagtagaaattataaggtgtttaattagaaatccaaaagtattgattatggatgaacctacatcagttttaacagaacaagaaactgatgatttatttatttctttgaagcaattttctaaagatggaattttaattatttatattactcacaaattaaaagaagttttatctctttgtgatgaggtagccgtaatgagaaaaggtaaagtagtttcggttagtaatactattgacgaaaaaattgaaagtttagctaataaaatggtaggtgaaagtttaaatactattaaaaaaaaaattaataattttaaaaatagtgaagaaattttaaaaatctcaaatcttaattttaaaagtgacgacccatatgaaacaaacctaaatgatttaaacctgtctttaaaaaaaggagagtgtttaggtatcgctgggatttcgggaaatggtcagaatgaactatttcaaatactgagtggagaaataattactgaaggtacttcgataatgtttagaaataaagaaattagtaagttaaatccaagagaaagaagagagtaccttatggctttttcaccagaagatcgtatatcgcaagctgcagttcctgagttaaagatatttgaaaatgttgcattaaacaattttaagtcatcaaacttttttgaaaaagggttagtgaatgaaaaaaagataaaagaacacgccaaaaagatactttctaatttttctgtaaatacagacaatgta

SEQ ID NO: 274294 - DNA, 1288 bp, Unknown
  Bacterial polypeptide expressing nucleotide sequence isolated from the Sargasso Sea
tatgaaattagaactcaaaaaaatttccaaattttttcctggtataaaagcgttacaaaacgttgatttcaatttaaagcaaaatagtatccatgctcttcttggagaaaatggtgcaggaaaatcaactctagttaaaattttatgtggtgtgtatcaacctgatcaagggtcaatatatttagacaaaaaaaaacatattataactgatccaacatcttcattacagttaggtatttcagcaattcatcaagagtctgttatgtttgatgaattaagtgtaatggaaaatatatttattggaaatcatatagttaaaaaaaacagactcgttgattggcctgcaatggaaaagaaaactagagatcttcttagtaatcttgaagcagatattaaacctgatgaaaaaattaaagatttgagcattgcgcaaaggcatattgtgcaaatttcaagatcgttagttcatgatgctgatattgttataatggatgagccaactgcttcattatcacaaaaagagatagaagaactttattcaattataagaaatctaaaaaaacaaaataaatctattatttttatttctcataaattagatgaggttttggagatatgtgacgagtttactgttctaagagatggtgaagttatcaatacggatttaatttctaatactaacaaagatcaattaataacaaacatggccggaagagaaattagccaaatttttccaaaaaaacatgtcactattgagcaagaaattttaaacgtaaaaaatttatataaaaaaactcaatttaaaaatattaattttaacttaaagaaaaaagaaattttaggtttttatggtttagtaggttcgggtagaactgaagtaatgaaaactatttttggaataaataaatttgatgaaggtgaacttacttttaaaaatagtaaattaaaaattaaaacaccaaaagacgcaattcagaacggaattgtgtatttatctgaagagagacaaaacttaggtatgacgggtttgatgtctgttaaagataatattaacatggctgttatggataaaaattctaaatacttaatattagataaattaaaagatttacgtaatgcatcagaacttcaagaaaagcttaatataaaagtgtcttattggagtcagttagctcaaagtttatctgggggtaatcagcaaaaaactgttatagcaaaatggctttcaacaaaacctgaaattattattttagatgaacctacaaaaggaattgatgtaagatctaaa

SEQ ID NO: 274295 - DNA, 546 bp, Unknown
  Bacterial polypeptide expressing nucleotide sequence isolated from the Sargasso Sea
aatgaacacaaaactcaaagtatccgaaatttcaaaaatttatccaggatgtattgcgaacgataaggtatcattagaatttggaagtgggaaaatatatgcattgttgggagaaaatggggctggcaagtctacgctagttaaaatcttatcaggcgtagtaaaacctgatgagggcaaagtttttttaaatgatgaaagcattaaacttaactctccactagatgccaaaaaaaataatattggaatggtttttcaacacttcaacctcttcgagactttatcagtatttgaaaatttaagcatcgatagtgacaaaaaaaatgaagacctaagagttttagtcaacgatatattaaaaaagtacaattttaaaattgatctagatgttccagttttaaatttatcagcaggtcaaaaacaaaaagtagaaattataaggtgtttaattagaaatccaaaagtattgattatggatgaacctacatcagttttaactgaacaagaaactgaagatttatttatttctttaaaacaattttctaa

SEQ ID NO: 274296 - DNA, 709 bp, Unknown
  Bacterial polypeptide expressing nucleotide sequence isolated from the Sargasso Sea
atgaacaaacaggcggaagttgctgttgcgatgaggggaattacaaagcgatttcctggagtagtagcacttgatgacgtgaccctgcaggtgcgacgtggtgaggttcacgctatttgtggtgaaaacggagctggtaaaagtacgctgatgaagattttgtcaggagttcatcagccggacgctggtgaacttgagatagccggtcaaagcgtgcaatttcacagtactcgtgatgccgaaaatgctggtgttgcaatcattcatcaggagctagagctcgtagaagagttgacggtcgctgccaatatttttcttgggcgggagccaagaacacggttcggctttttgaacgatgctattgcgaaaagaaaagcacaagagttactaggtttacttgatgcatccatatcaccagaagaaatgacaagcggattacgagttggcgatcagcagcttgttgaaattgcgaaagccctttcattgcaggcatcaattatcgtcatggatgaaccaacaagtgcgctcacggatgcggaaacggagcgactcgaacgaactattgccaccttacgtctgcagggctgcacaatcctttatttctcacacaaaatggatgaagtgtttcgattggctgatcggattacgattctgcgagatggtcatcatgtttgtactgttaataaaacagaaacgacagcctctgagg

SEQ ID NO: 274297 - DNA, 1504 bp, Unknown
  Bacterial polypeptide expressing nucleotide sequence isolated from the Sargasso Sea
tatgaataatacatttattaaattcaacaatataacaaaaaagtttccaagagttgtagctaatgatgatgtttcttttgatattaaaaaatcatctgtacatgctttattgggagagaatggtgcaggaaaatctactttggttaaagttttatatggtttacttgcagctgatcatggaactataatttttaatgatcaagaattaaatatctcttctccttctgaagctagaaataaaggtattggaatggtattccaacatttttctctttttgaatcattaacagttagagataatttaattttaggaattgataaaaaaatttcttattctgacttaaaagatcagcttgaaaatatttcatctaaatataacttacctttagatcttgatgctcctataacttcattatctgctggagaaaaacaaagagttgaaatagtaagaattcttttacaagatccccaattattgattatggatgaacccacatcggtacttacccctcaagaagttgaaaatctttttgtaacattaaatgctcttgttaaagaaggaagaacaattctgtatattactcataaactagaagaagttattactttatgtaatgatgtaactataatgaggaatggtaaagtaattgactcatgctcaactgacaatcaaactgcaaaatcactggcgactaaaatgttgggtgaaaagttagaagacttaaaaactgattattctcatgttaaaaatgaaataagtttttcttctaagaatatttcttgttcttttaatgatccattttttacagatttaaaaaatatttcttttgacgtaaatataggtgaaatttttggcatagcaggtgtagctggtaatggtcaatctgaattaatggatattttagttggagaaaatacttccatagatagaggagaattaatatttaatgataagaatattgaacatcttgatccgcaaaagagaagagatttgtctattgcttttgtacctgaaaatagattgggccatagtgccgtacctgaactaactttatcagaaaatattcttttaagtcagttcccaaataatcaattttcaaaaaatggtatattaaatcataattcaatagaaaaatatgcaactaaagttatagaaaattttaatgtagttactccaggatcagatgcgaaggcatccagtctttcaggaggaaatttgcagaaatttgtaataggtagagaaatatcttcaaaacctagacttttaattatttctcaccctacttggggcattgatgcaggtgctgaacattcaattagagaatcccttattaatctttctaaaaatggaacatctattatagttttatctcaagatttagacgaattaattgaaattactcataaaattgctgttatttttgaaggtaaattatctaaacctctaaatactaacgaagtagatataactgaattagggttacttatgggtggaaaaaaatga

SEQ ID NO: 274298 - DNA, 1555 bp, Unknown
  Bacterial polypeptide expressing nucleotide sequence isolated from the Sargasso Sea
catgtcgcgatctgagtcgccccgcccgttgctcgagatgcgcgggatcagcaagacgttcccggccgtgcgcgcgctcgacaacgtcagcctgaccgtctatcccggcgagatccactcgctgatgggcgaaaacggcgccggcaaatcgacgctgatgaaaatcctgtcgggcgcataccgcgccgacgccggcggcgagatcctgatcgacggcgcccgcatcgacatcgacggcccgcttgccgcgcgcgatgcgggcgtcgcggtgatctaccaggaactgtgcctgtcgccgaacctgagcgtcgcggaaaacatctacatcggccgcgaactgcggcgcggcaaccggcgctggggcacgatcgaccgcgcggcgatggcgcgcggctgcgaggacgtgctcgcgcgcctcggtgcatcgttcggccccgacacactcgtcggtacgctgtcgatcgcggagcagcaactcgtcgagatcgcgcgtgccgtgcacacccgcgcacgcatcctcgtgatggacgagccgaccacgccgctgtcctcgcgcgaaaccgagcacctgttccgcctgatccgccagttgcgcgaggaaggtctcgcgatcatctacatcagccaccggatggcggaaatctacgagctgtccgaccgggtgtcggtgctgcgcgacggcacgtacgtcggcacgctcgaacgcgcatcgctgtcggccgagcgcctcgtcgcgatgatggtcgggcgcgacatctccggcttctacaagaaggaacatgcaccgtacgaccccggccacctgctgctgtcggtgcgcgacatcgccgacggcgcgcgcgtgcgcggctgcagcctcgacctgcacgccggcgaagtgctcggcatcgcggggctcgtcggtgcaggccgcaccgaactcgcgcggctgatcttcggcgccgaaccacgtgtgcgcggcgacgtgaaggtgggcgaacgcacgttcggcgcgcactcgccgcgcgacgcaatcgacgcgggcctcgtctacctgaccgaagaccgcaagcgccagggcctgttcctcgacatgagcgtgcgcgacaacatcaacatctcggtctgcaaccgagacgcgcggctcggtgcactcgatctcgcgcgcggcgccgaacgcgcgcaggacgccattgcgtcgctgtcgatccgcgtgccgaacgcgaacgtcaacgtcggcgcgctgtcgggcggcaaccagcagaaagtgctgctgtcgcgcctgctcgagacgaagccgcgcgtgctgattctcgatgaaccgacgcgcggcgtcgacatcggcgcgaaatccgagatctaccggatcatcaacgaactggcccgggccggcgtgggtgtcatcgtgatctcgagcgaactgccggagatcatcggtgtcgcagaccgcgtgctcgtgatgcgcgaaggggaaatcgccggagagcttggcggatacacgccgactcccatcacgcaggaagccatcatcgcgctcgccaccggctcgcaagccgagctcgccgacgcgcactga

SEQ ID NO: 274299 - DNA, 695 bp, Unknown
  Bacterial polypeptide expressing nucleotide sequence isolated from the Sargasso Sea
aatgaacacaaaacttaaagtatcagaaatttcaaaaatttatccagggtgtgttgcaaacgataaagtgtcattagaatttggaagtgggaaaatatatgcattattgggagaaaatggagctggcaagtctacactagttaaaatcttatctggagtagtaaaacctgatgagggcgaagtttttttaaatgatgaaagcattaaacttaactctccgctagattccaaaaaaaataatattggaatggtttttcaacatttcaacctcttcgagactttatcggtatttgaaaatttaagtatcgatagtgacaaaaaagatgaagaactaagagttttagtcaacgatatattaaaaaagtacaattttaaaattgatctagatattcctgttctaaatttatcagcaggtcaaaaacaaaaagtagaaattataaggtgtttaataagaaatccaaaaatattgattatggatgaacctacatcagttttaacagaacaagaaaccgatgatttatttatttctttaaaacaattttctaaagaaggaattttaataatttatattactcacaaattaaaagaagttttgtcactttgtgatgaagtagccgtaatgagaaaaggtaaagtagtttcggttagtaatacgattgatgaaaaaattgagagtttagctaataaaatggtag

SEQ ID NO: 274300 - DNA, 1501 bp, Unknown
  Bacterial polypeptide expressing nucleotide sequence isolated from the Sargasso Sea
aatgaatacaaaactcaaagtatcagaaatttcaaaaatttacccaggatgcattgcaaatgacaaagtatcattggaatttggaagtgggaaaatatacgctttattgggagaaaatggtgctggaaagtctacgctagttaaaatcttgtctggagtagtaaagcctgatgagggtgaagtttttttaaataatgaaagtattaaacttaactctcccctagatgccaaaaaaaataatattggaatggtctttcaacatttcaatctcttcgaaactttatctgtatttgaaaatttaagtatcgatagtgacaaaaaggatgaagaactaagagcattagtcaacgatatattaaaaaagtacaattttaaaattgatctagatattccagttctaaatttatcggcaggtcaaaaacaaaaagtagaaattataaggtgtttaattagaaatccaaaagtgttgattatggatgaacctacatcagttttaactgaacaagaaactgatgatttatttatttctttaaaacaattttctaaagatggaattttaattatttatattactcacaaattaaaagaagttttgtcactttgtgatgaggtagccgtaatgagaaaaggcaaagtagtttcggttagtaatacaattgatgaaaaaattgagagtttagctaataaaatggtaggtgaaaatttaaatactattaaaaaaaaaattaataattttaaaaatagcgaggaaattttaaaaatctctaatttaaattttaaaagtgacgacccatatgaaacaaatttaaataatttaaacctttctttaaaaaaaggagagtgtttaggtatagctgggatttcaggaaatggacaaaatgaattattccaaatactgagtggagaaataattaccgaaggtacttctataatgtttagaaataaagaaattggtaagttgaatcctagagaaagaagagaataccttatggctttttcacctgaagatcgtatctctcaagctgcagtcccggagttaaagatatatgaaaatgttgcattaaacaattttaagtcatcaaacttttttgaaaaaggtttagtgaatgaaaagaaaataaaagaacactccaagaagatactttctaatttttctgttaatacagacaatgttgaattaaaaagtcaatttttatctggcggaaatcttcaaaaattaattattggaagagaattaattacttcgcctgaattattggtatgttttaaccccacatggggtcttgatgttggtgcgatcaactacattcatgaaacattaattcaaattaatgaacaaggaaaatcatcaatattaatttctactgataacgatgaactattaaaattaagtgaccgtatttgtgtaatttataaaggtaaactatctaaaataatgaatgcagatactgttactgcagaaaaattaggaattttgatgggaggaggttcaattgattaa

SEQ ID NO: 274301 - DNA, 532 bp, Unknown
  Bacterial polypeptide expressing nucleotide sequence isolated from the Sargasso Sea
tatgaatacaaaccttaaagtatccaagataacaaaaatttatcctggatgtattgcaaataaaaatatttcattagaatttaatagtggaaaaatttatgctctactcggagagaatggagctggcaaatctacattagtaaagattctttcaggtgtgataatgccagatgagggtgaaatatttttaaataataaacctttaaagttaagttcaccaattgatgctaaaaaaaataatattggaatggtgtttcaacattttaatttatttgagactttgtcagtatttgaaaatcttattatagattcaaatgaaactagagataatttaagagaaaaaataaaatcgataatggaaaagtacaatttttcaattgatttagatattcctgtattgaatctttctgctggccaaaaacaaaaagtagaaataattagatgcttaataagaaatccagaagtattgattatggatgaacctacatcagttttaacagaacaagaaacaagtgaacttttttcgtcttaa

SEQ ID NO: 274302 - DNA, 697 bp, Unknown
  Bacterial polypeptide expressing nucleotide sequence isolated from the Sargasso Sea
tatgaaaacaaatttaaaaatatcaaaagttactaaaatttatcctggatgcattgcaaataaaaatatttctttagaatttaaaagcggaaaaatttatgccttacttggagaaaatggagctggaaaatctaccttagtaaaaattctttcaggcgtagtaattcctgacgaaggtcaaatatttttaaataataaaaatttaaaattaaattcaccaatagatgctaaaaaaaataatattggaatggtatttcaacattttaatttatttgagactttatcagtatttgaaaatcttattatagactcaaatgaaactagagagaatttaagaaaaaaaataatatcaataatggaaaaatataacttttctattgatttagatattcctgttttaaatttatcagcaggacaaaagcaaaaagtagaaataattagatgtttaataagaagtccacaagtattgattatggatgagccaacttcagttttaactgaacaagaaacaattgagcttttttcatctttaaaacaattttcagaagagggtattttaattatttacataactcacaaacttaaagaagtaatgtcactttgtgatgaggttgctgttatgagaaaaggtgaacttgtatctataagtaaaattgtagacgaaaaaattgaaactttggcaaataaaatggttgga

SEQ ID NO: 274303 - DNA, 1510 bp, Unknown
  Bacterial polypeptide expressing nucleotide sequence isolated from the Sargasso Sea
atgagtgattatattttagagctaaataacattacaaaaaattttcctggtgttaaagctcttgataatgcaaactttaaacttaaaaagaaatcaatccatgcgcttcttggtgaaaatggagctggtaaatctacattaattaaaattataacaggagtatataatcaaaatgaaggaaaattatttttaaacaatcaagagaagtctttttcttcacctaatgaagcaatgaatgctggaatttcagttgtgcatcaagaaagaaacttaattagaagattttctgttggtgaaaatttaatgttaaccaaccttcctaaaaataatttaggtttaatagattataatactgttgctaaagaatcaaaaaaatggctcgatattatggagttggacatagatccaaatacaatagtctcagatttaacagttgcaaaaatgcaactttgcgaaatagctaaagctttatccttagagtcaaaaatactattattagatgaaccaacttcttcattatctcctcaagatacaaaaaatctatttgcattacttaaacgattagttgctgagcaagatgtaagtatagtttttgttagtcacaaattagaagaagtatttgaaatttgtgatgaagttacagttcttagagatggtaaaaatgcttgcgattctgaacaaattactaatcttaataggcaaaaacttgttaaattaatgattggtagagatgaacaaataattaaatctaagaaagatgttgattttatagatgaaaatttactagatctaaaatcaataaacactgaccttggtcataaaaatattaatttaaatttaaaaaaaggtgaaatacttggcttatatggtttagttggggcaggaagaacggaattaataaaatgtgtacttggtcttgataaaattaattctggacagattttactcaacaataaagaaataaaaattaaatctccaaaagatgcactagaaaaatataaaattggatacataagtgaagacagaaaaaaagaggggttaattctaatgcatgatgttttatctaatgctggaataacagtctggtcaaatttgaaaaaaatattatcatttttaaatgacagtattgtttacaataaagtagatccttatgtgaaacaacttgaagtaaaaacaccttcataccaacaaatcgtttctaacttatctggaggtaatcagcaaaaaattagtgtagctaaatggctagcttctggaactgatatattatttattgatgaacccacagttggtatagatataaaaacaaaatcttaccttcatgaattaattattgaactatctttaaaaggcacatcaataattttaatcaccagtgatatgcctgaaatgattagcttagcagatagaattataacaatgaaagattttaaggtagttggtgaaactatcaataatcataactatgaagaaatgagttcatcaattatgggaaatattcatgaataaa

SEQ ID NO: 274304 - DNA, 1501 bp, Unknown
  Bacterial polypeptide expressing nucleotide sequence isolated from the Sargasso Sea
atgaatacaaaacttaaagtatcagaaatttcaaaaatttatccaggatgtattgcaaacgataagatatcattagaatttggaagtgggaaaatatatgcattattgggagaaaatggggctggcaagtctacgctagttaaaatcttgtctggagtagtaaaacctgatgagggcgaagtttttttaaatgatgaaagtattaaacttaactctcctctagatgccaaaaaaaataatattggaatggtttttcaacatttcaaccttttcgagactttatcagtatttgaaaatttaagcatcgatagtgacaaaaaagataaagatctaagagttatagttaaagatatattaaaaaagtacagttttaaaattgatctagacattccagttctaaatttatcagcaggtcaaaaacaaaaagtagaaattataaggtgtttaattagaaatccaaaaatattgattatggatgaacctacatcagttttaactgaacaagaaactgatgatttatttttttctttaaaacaattttctaaagatggaattttaattatttatattactcacaaattaaaagaagttttgtcactttgtgatgaggtagccgtaatgagaaaaggcaaagtagtttcagttagtaatacaatcgacgaaaaaattgagagtttagctaataaaatggtaggtgaaaatttaaatactattaaaaaaaaaattaataattttaagaatagcgaggaaattttaaaaatctcaaatttaaattttaaaagtgacgacccatatgaaacaaatttaaataatttaaacctttctttaaaaaaaggagagtgtttaggtatagctgggatttcaggaaatggacaaaatgaattattccaaatactgagtggagaaataattaccgaaggtacttctataatgtttagaaataaagaaattggtaagttgaatcctagagaaagaagagaataccttatggctttttcacctgaagatcgcatctctcaagctgcagtccctgagttaaagatatatgaaaatgttgcattaaacaattttaagtcatcaaacttttttgaaaaaggtttagtgaatgaaaaaaaaataaaagaacactccaaaaagatactttctaatttttctgttaatacagacaatgttgaattaaaaagtcaatttttatctggcggaaatcttcaaaaattaattattggaagagaattaattacttcgcctgaattgttggtatgttttaaccccacatggggtcttgatgttggtgcgatcaattatattcatgaaacattaattcaaattaatgaacaaggaaaatcatcaatattaatttctactgataacgatgaactattaaaattaagtgaccgtgtttgtgtaatttataaaggtaaactatctaaaataatgaatgcagatactgttactgctgaaaatttaggaattttgatgggaggaggttcaattgattagg

SEQ ID NO: 274305 - DNA, 841 bp, Unknown
  Bacterial polypeptide expressing nucleotide sequence isolated from the Sargasso Sea
aatgaatacaaaccttaaaatttcaaatgtaactaaaatatatcctgggtgtgttgcaaacgacaatatttcactcgaatttaatagtggtaaaatttatgctcttcttggagaaaatggtgctggaaaatctacactagttaaaattctatcaggagtaatcattcctgacgaaggtaaaatttatttaaatgaaaataatctaaagcttaattcaccattagatgcaaaaaaaaatgatatcggaatggtattccagcattttaatctttttgaaactttgtccgtatttgaaaacttaataatagactcagatgaacaaagggaaagtgtaagagaaaaaattgatgcaattatgaaaaaatataatttttcaattgatcttgatattcctgttctaaatctttcagcaggtcaaaaacagaaagtggaaataataagatgcctaataaggagtccaaaagttttaattatggatgaaccaacatctgtattaacagaacaagaaacgagtgaattattcttatcgttgaaaaaattttcagatgaaggaattttaattatttatattacacataaactaaaggaagttatgcagctttgtgatgaagttgctgtaatgagaagaggaaagttagtttctgtaagtgaaataaagaacgaaaatattgagtcacttgctaacaaaatggtgggtcagaacctaaaaacaattaagaaaaaaaaggcgaaaacttcatcagatcaattaattaaaataacgaatcttaattttacaagtgaagatccttttgaaacaaatttaatggatattaatttttctgttaatcgaggggagtgt

SEQ ID NO: 274306 - DNA, 1510 bp, Unknown
  Bacterial polypeptide expressing nucleotide sequence isolated from the Sargasso Sea
atgtctgagaatattttaacaattaaaaatgtttcaaaatcttttcctaaagttattgcaaacaaaaatgtttcttttaatattaaaaagaatactgttcacgcacttttaggtgagaatggtgctggaaaatctacattagtaaaaatcttgtatggattgttaaaatctgatgaaggtgaaataacttttaacaatagtccattaaaagttcaatcaccttcggaggcaagaaaaaataaaatcggaatggtttttcaacatttttctttattcgactcacttactgtcagagaaaatttaattttgggtattgatcagaatatgtcattttctaacttacaagaaaaagtaaatgaaatatcaaatagatataaattacctttagatcttgatgctcctataaatactctatctgctggacagaaacaaagagttgaaattgtaagaattcttttgcaagatccagaattgttaataatggatgagccaacttctgtcctaacgcctcaggaagtcgaaagtttgtttgaaacgctcaatactcttttaaaagaaggtagaactattttgtatattacgcataaattagaagaagtgatcaatttatgcgatgaagttacaattttaagaaatggcgaagttatagagtcaagtaaactcgagaatgaaactgctgagactttagcaactaaaatgttgggaaaaaaactaagtgaaattacaacagattattcaaatatcacttcaaaaataaatttatcagctaaaaatttatccataaaattcaatgatccttttttagtagatttaaaaaatatttcttttgatatcaaagagggggaaatatttgggatagcaggtgttgctggtaatggacaatctgaattaatgaatttgttaactggagaggaaattgagggagttagcggagagctagattttaacaaaattgatataaagaatttttctccaaaaaagagacgagatatgtctatagcattcgtgcctgaaaataggctcggtcacagtgctgttcctgaattaacattaactgaaaatattttacttagtcaatttcctgataatgactttcaaaaaaatggattgataagttttgaaaatattgaagttcaagcaaaaaaagtaattgaaaaatttaatgttgttacacctgggcctgatgcaaaagcttctagtttatcaggaggtaatttgcagaaatttgtcataggaagagaaatattatctaaccctaagctcttaattatatcgcatccaacatggggtatagatgcaggagctgaacatgctattaggcagtccttaattgaattggctaaaaacggaacttcaataatcgtaatctcacaagacttagatgaacttattgaaattacacatcgtttgtcggtaatttttaatggaaaattatctaaaagttatgacacaagagagatatccatttctcaaattggattattaatgggagggcataaagttgattaat

SEQ ID NO: 274307 - DNA, 1510 bp, Unknown
  Bacterial polypeptide expressing nucleotide sequence isolated from the Sargasso Sea
tatgagtgataatatactcgaacttaaaaaaattaccaaaaattttcctggtgttaaagcattagataatgcaaactttagacttaaaaaaaaatcaatccatgctttacttggtgaaaatggagcaggtaaatctacattaattaaaataattacaggtgtttataatcaaaatgaaggtgaactatttttgaataataaagtacaatcttttaattcacctaatgaagcaatgaattcaggaatttcagttgttcaccaagaaagaaatcttattagaagattctcagttggtgaaaatttaatgttaactaatctacctaaaaataacttaggattaatagattataacgcagtagctaaagagtcaaaaaaatggcttgatattatggaattagacatagatccaaacacaatagtttcagatttaactgtagcaaaaatgcaattatgtgaaatagcaaaagctctttcgttggaatctaaaatattattattagatgagccaacttcatcattatctcctcaggatacaaaaaacttatttatattacttaagagattagttgctgaacaagatgtaagtattgtttttgtaagtcataaacttgaagaagtttttgagatctgtgatgaagttactgttttaagagatggaaaaaatgcatgtgagtcagaacaaatcacaaatcttaatagacaacaattagtaaaattaatgattggtagggatgagcaaataattaactcaaaaaaagaagtgaattttgatgatcaaaatttattgaatttacaatctataaacacagatttaggtcataaggatatcaatttaaatcttaaaagaggtgaaattcttggtttatatggattagtcggagctggcagaacagaacttttaaaatgtgttttaggtttagaaaaaataaattctggtcaaattttccttaataataaagaaataaaaatcaaatctccaaaagatgcattagaaaaatttaaaattggatacataagtgaagacagaaaaaaagaaggattaattctgatgcatgacgttttgtctaatgctggaataacagtttggtcaaatcttaaaaaaatactttcatttttaaatgatcaaatagtctacaataaagtagatccttatgtaaaacaactagaagttaaaactccttcatatcaacaaatcgtttctaatttatctggaggtaatcagcaaaaaattagtgtagctaaatggcttgcttctggaactgatatattatttattgatgaacctacagttggtattgatataaaaacaaaatcttaccttcatgaattaattatagatctatcattaaaaggtacttctattattttgataacaagtgatatgcctgaaatgattagtcttgctgatcgaattattacaatgaaagattttaaagtagtaggtgaaactattaacaatcacaattatgaacaaatgagttcttcaataatggggaatatccatgaataa

SEQ ID NO: 274308 - DNA, 1204 bp, Unknown
  Bacterial polypeptide expressing nucleotide sequence isolated from the Sargasso Sea
atgaatacaaatcttaaaatatcaaatgtaacaaaaatttatcctggctgtattgctaatgataacatttctttggaatttgaaagtggaaaaatatatgcgttgcttggagaaaatggagctggaaaatctacattggtaaaaattttatctggcgtaattataccagatgaaggtgaaatatttttaaataaaaatattttaaaattaaactctccaattgatgcaaaaaaaaatgatattggtatggtttttcagcacttcaacctttttgaaactttatccgtgtttgaaaatttaattattgattcagaagaaacaccagaaaatcttaaagaaaaaattcaattaattatgaaaaaatataatttttcaattaatcttgatgttccagttttaaatctatcagcaggacaaaagcaaaaggttgaaataattagatgtttaataagaaatcccaaagtacttattatggacgagcctacatcagtgttaactgaacaggaaacaagtgaattatttttatctttaaaaaaattttctgaagaaaaaattttaataatttacataactcataaacttaaggaagtaatgaaactttgtgatgaagttgcagtcatgagaagaggaaagcttgtttctgttagcaaaataaaagatgaaaatattgaatcacttgctactaaaatggtaggtcaaaatttaaaaacaattaagaaaaaaaaatcatctatatcttcttcagatcaattaatcaaagttaccgatctaaatttcactagtgaagacccttttgaaaccaatttagaaaatattaatttttctgttaatagaggtgaatgcctgggcatagctggaatatcaggaaatggtcaaagcgaactatttcaaattttaagtggagaaataatctcagataagaattcaatagaatttagtaataattttattggagatcttaatccacaagaaagaagagaatatttaatggcattttctccagaagatagacttgagcaagcagcaattccacaaatgaaaatttttgaaaatgttgctttaaataattttaaatcatcaaatttttttaataatggcttgattaatgagaatagaattaaagagcattcaaaaaaaataatttctgactttaatgttaatacagataatatcgaaactaagagtccatttctatcagggggaa

SEQ ID NO: 274309 - DNA, 1288 bp, Unknown
  Bacterial polypeptide expressing nucleotide sequence isolated from the Sargasso Sea
tatgaatacaaaactcaaagtatccgaaatttcaaaaatttatccaggatgcattgcaaacgataaagtatcattagaatttggaagtgggaaaatatacgctttattaggagaaaatggtgccggtaagtctacgctagttaaaatcctgtcaggagttgtaaagcctgattcgggtgaagtttttttaaataacgaaagtataaaactaaattctcccttagatgccaaaaaaaataatattggaatggtttttcaacattttaatctctttgagactttatcagtatttgaaaatttaagcatcgatagtgacaataaagatgaagatctaagagttttagtaaacgatatattaaaaaaatataattttaaaatcgatctagatattcctgttctaaatttatctgcaggtcaaaaacaaaaagtagaaataataagatgtttaattagaaatccaaaagtattgattatggatgaacctacatcagttttaactgaacaagaaaccgatgatttattcatttcattaaaacaattttctaaagatggaattttaattatttatattacacataaattgaaagaagttttatcactttgtgatgaggtggccgtaatgagaaaaggcaaagtagtttccgttagcaatacaataaatgaaaaaattgaaagtttagccaataaaatggtaggtgaaaatctaaatacaattaagaagaaaattaataattttaaggacagtgaagaaattttaaaagtctcaaatttaaattttaaaagtgacgatccatatgaaacaaacttaaaagatttaaacctttctttaaaaaaaggagagtgtttaggtatagctggtatttcaggaaacggtcaaaatgaactatttcaaatactaagtggtgaaataattaccgaaggtacgtctataatgttcagaaataaagaaattggaaagttaaaccctagagaaagaagagaataccttatggctttttcaccagaagatcgtatctcgcaagctgcagtacctgaattaaagatatatgaaaatgttgcattaaacaattttaaatcatcaaacttttttgaaaaaggtttagtgaatgaaaagaaaataaaagaacactccaagaagatactttctaatttttctgttaatacagacaatgttgaactaaaaagtcaatttttgtctggcggaaatcttcaaaaattaattattggaagagaattaattacttctcctgaaaaattggtatgttttaaccccaccatggggtcttga

SEQ ID NO: 274310 - DNA, 1482 bp, Unknown
  Bacterial polypeptide expressing nucleotide sequence isolated from the Sargasso Sea
tattaaatatatcaaaaatatatccaggatgtgtagctaatgataatgtatctcttcaatttaaaagtggaaaaatatacgcacttttgggagagaacggagctggtaaatccacattggtaaaaattttgtctggtgtgataagcccagataatggtgaggtttttttaaatgaaaaaaatttaaaattaagttctccactcgatgccaaaaaaaataaaattggaatggtttttcagcatttcaatttatttgaaactttgtcagtatttgaaaacttaagtatagatgcaactgaagataacaaaagtttaagggtaagaataaatgaaatattaaaaaaatataactttagtattgaccttgatgttcctgtattaaatttatcagcaggacaaaagcaaaaagttgagattataagatgccttttaagaagccctaaagttctaatcatggacgagcctacatctgttttgactgagcaagaaacagaagaattatttatatctttaaaaaaattctgtgatgaaggaatattaattatttacattactcacaaattaaaagaagttttgtctttatgcgatgaagttgcagtaatgcgaaaaggtaaggtcgtatctgttagccaaacacaaaatgaaaaagttgaaactctcgcaaataagatggttggtcaaaaactagcgaaaattaagaaaaaaattaatatttccaaaaataaagatgagatatttaaagtaaaacatttaaatttttatagcgatgatccttttgaaacaaatttagttaatctaaacttttctgtaaagaaaggagaatgtttaggtatagcaggtatttctggcaatggtcaaaacgaactctttcaaattttgagtggggaaataattacacctgatacatcaatcatttttcgaaataaagaaattgctaaactaaatccaaagcaacgacgagagtatttaatggctttttctcctgaagatagaatatctcaagcagctgtacctgaattaaaaatatatgaaaatgtagctttaaataatttcaaatcgtcaaatttttttgaaaaaggtttggtaaatgaaagaaaaattaaagagcattcaaagaaaatattatctgatttctcagtaaatacagacaatgttgaattaaaaagtcaatttctatcgggtggaaatttacaaaaacttattttagggagagagttaattacagctccagaattattaatttgttacaatccaacatgggggctcgatgtgggtgcaatcaattatattcatgaaacacttataaaaattaacgatcaagaaaaatcaacgattttaatttctacagatacggaggagttattaaaactcagtgatagaattgcagttatttataaaggtaagctttcaaaaataatgccttcagaggaagtcactccagaaaaattaggagttctaatgggaggaggttccattgattaaa

SEQ ID NO: 274311 - DNA, 1552 bp, Unknown
  Bacterial polypeptide expressing nucleotide sequence isolated from the Sargasso Sea
gatgacggtttctcatattggcgaaacggcgctgcccgcagaggcgcactcacctgcgcttacgtcggctgacccgtatctgcggctcgacggcatcaccgtgcgctttcccggcgtgctcgcgctcgaccaggtgtcgctcgacgtacggcgcggcgaagtacacggcttgatgggcgaaaacggcgccggcaaatcgacgctgctcaaagtgctgtccggcgtgaatcagccggcggcgggcagcttgtcgctcgatggcgtcgagcagcagttcgtcaccacgaaagcggctatcgcggcgggcgttgcgatcatctaccaggaactgcatctggttccggagttgacggtggcggaaaacctgatgcttggtgcgttgcccaaccgcttcggtgtacttgatgaaaaagcgctgctggcacgcgcagtgcgggagctggaaagactcggcgaaaagatcgaccctgcgcagcaggtgaaaaatctctcgatcggtcagcgccagatgatcgagatcggcaaggcgctgatgcgcgatgcgcgcgtaatcgcgttcgatgaaccgacaagttcgttatcgtcgcgcgaaaccacgcagctgttccggattattcgcgcattgaaggctgagggccgcgcgattatctacgtcacgcatcggatggacgaagtctacgaactgtgcgaccgcgtgacggtgtttcgcgatggccgccgcatcgatacgttcgaagccggcgcagggctcgatcgcgatcgcctgatcagttgcatggtgggccgctcgatcgccgacgtgtacggctatcgctcacgcgaactcggcggtgtgcacctcgaggtcagggaattgatggggcgtggcctgcgcgaaccggcttcgtttagcgcacgcaaaggcgaaatcctcggcttcttcgggctggtcggcgccggacgttccgagttgatgaagcttatctacggggccgtgaaaccggaggccggcgagattgcgctcaaaggccggcgcgtgcgcttcgccacgccgcgcgatgcggtgcgtgcgggcgtcgcgctgtgtccggaagatcgcaagcaggaaggcatcgtttcgattgcctcggtatcggacaacctcaatatcagttgccgccgccatttcagccgcttcaacgtgctcaacggccgcaaggaagcgcaaaccgcgaaagagtttatcggcaagctgtcgatcaaaacgcgcaacggcgaaacaccgatcggcaccctctccggcggcaatcagcagaaggtgattctgtcgcgctggctcgccgaagaaatcgacgtgttcctgatggacgaacccacgcgcggcatcgacgtcggcgcgcgcagcgaaatatacgggctgttgtacggactcgctgaagccggccgcacagtcatcgttgtgtcgagcgatctggccgaagtgatcggcgtggcggatcgcgtgatcgtgatgaaggaaggctgcatcgtcggcaacctgcctaaagcgcaggccacacccgatgcactgatcaagctcgcgctgccccgatag

SEQ ID NO: 274312 - DNA, 1549 bp, Unknown
  Bacterial polypeptide expressing nucleotide sequence isolated from the Sargasso Sea
gatgacggccgtatccggcaacgatggcgacaccggcggcgatgccgccgagtcgccgccgggcggcccgctgctcgcgctcgacggcatcacggtgacgttcccgggcgtgcgtgcgctcgacgccgtgtcgctgtcggtgcgcgcgggcgaagtgcacgggctgatgggcgagaacggcgcggggaagtcgacgctgctgaaggtgctgtccggcgtgaaccagccgcaggccggcacgctgacgctgaacggcaccgagcagcgcttcgcgtcgacgcgcgcggcgctcgaggccggcatcgcgatcatctaccaggagctgcatctggtgcccgagttgacggtggccgagaacctgatgctcgggcagctgccgagccggctcggcgtggtcgacgaacgcacgcttgccgcgcgcgcgctcgatgcgctggagcgactcggcgagcacatcgatccgggcatcccggtgaagtacctgtcgatcggccagcgccagatgatcgagatcggcaaggcgctgatgcgcgacgcgcgcgtgatcgcgttcgacgagccgacgagttcgctgtccgcgcgcgaaaccacgcaactgttccggatcatccgcgcgctgcgcgcggaaggccgcgcgatcatctacgtcacgcaccggatggaagaggtgtacgaactgtgcgaccgcgtgacggtgttccgcgacggccgccgcatcgacacgttcgattccgtcaccgatctcgaccgcgaccggttgatcggctgcatggtcggccgctcgatcgaggacgtgtacggctaccggccgcgcgcggccggtgacgtgctgatcgaggcgaaggggctggcggggcccgggttgtccgagcccgtgtcgttcaccgcgcggcgcggcgagatcgtcggcttcttcgggctcgtgggcgcgggccgctcggagttgatgaagctgctgtacggcgccgcgcgcccgagcgcggggcacgtcgaactgaacggcaagcgcgtggcgttcgggagcccgcgcgacgcggtgcgcgccggcctcgcgctgtgcccggaagaccgcaagcaggaaggcatcgtcgcgatcgcgtcggtggccgacaacctgaacatcagcgcgcgccggcatttcagcccggcgcgggtgctgctcgacgggcggcgcgaacgcgaactcgcgcagcgctacatcgagcggctcgcgatcaagacgcgcgatggcgacacgccgatcggcgcgctgtccggcggcaaccagcagaaagtcgtgctcgcgcgctggctggccgagcgcatcgacgtgttcctgatggacgagccgacgcgcggcatcgacgtcggcgcgcgcgcggaaatctacaacctgttctacgaactcgcggaagcgggccgcacggtgatcctcgtgtcgagcgacctggccgaggtgatcggcgtgtcggaccggatcatcgtgatgaaggaagggcggatcgcgggcgaggtcgcgaaggcgcacgcgacgcccgacgcgctgatcaagctcgcgctgccgcgctag

SEQ ID NO: 274313 - DNA, 1657 bp, Unknown
  Bacterial polypeptide expressing nucleotide sequence isolated from the Sargasso Sea
ctgaccggtgatccgttgaactgcgcgaacccggcgcgaccgggttcgcgcgcgacttgtcgaggaacgtccatgtttacagccagagtcgcgcgcccgatggccggcgacgatgcgcgggccgcttcgtccggctcgaccggcgtgtcggccccgccggcttcttccgcggccgactgcgtgctcgaagtgcgcggcgtcggcaagtcctttccgggcgtcgtcgcgctcgacggcgtgcagttccgcgtgcgtcgcggcaccgtccatgcgctgatgggcgagaacggcgcgggcaagtcgacgctgatgaagatcatcgcgggcgtctacacgcccgaccagggcgagatcctgatcaacggcgagccggtcgtgctgaacggcccgctcgacgcgctcgaccgcggcatcgcgatgatccaccaggaactcaacctgatgccgtacatgacggtcgcggagaacatctggatccgccgcgaaccgaagaaccgcttcgggctgatcgatcacgccgcgctgcgccgccagacggccgcgctgttcgagcggctgtcgatcgacatcgatccggaaaccgacgtgcgcacgctgacggtcgcgagccgccagatggtcgagatcgcgaaggccgtgtcgttcgactcggacgtgctgatcatggacgagcccacctccgcgctgaccgacaaggaagtcacgcacctgttccggatcattcgccagctgcgcgagcagggcaagggcatcgtctacatcacgcacaagatgaacgagctgttcgagatcgccgacgagttctcggtgttccgcgacggcaagtacatcggcacgcatgcatcgagcgacgtcacgcgcgacgacatcatccgcatgatggtcgggcgcgagatcacgcagatgttcccgaaggaggaggtgccgatcggcgaggtcgtgctgtcggtgaagaacctcggcgtcgacggcgtgttccgcgacgtgagcttcgagctgcgcgcgggcgagatcctcggcgtggccggcctcgtcggctcggggcgctcgaacgtcgcggaggcgctgttcggcgtcgtgccggccacgtcgggcgagatccgcatcgacggcaagccggtgcgcatcacgacgcccgcgcaggcgatgaagcacgggatggcgttcctcaccgaggatcgcaaggacaccggctgcttcctgaatctcgacctgctcgccaacatggaagccgcggtgctcagccaccgctacgtgaagttcaatttcgtgcggcaggcgcagctgaagcgcgactgcgaggaaatgagccggatgctgcgcgtgaagtcgcccgggctgcacgaggaaatccagaacctgtcgggcggcaaccagcagaaggtgctgatcggccggtggctcctcacgcagccgcgcatcctgatcctcgacgaaccgacgcgcggcatcgacgtcggcgcgaaggccgagatccaccggctcgtcagcgcactcgccggcaagggcgtcgcggtgctgatgatctcgtcggagatgccggaagtgctgggaatgagcgatcgcgtgatggtgatgcacgaagggcgcatgaccggcatcgtcgatcgcaaggacgccgaccaggtccgcatcatggatctcgcgtcgcgctgag

SEQ ID NO: 274314 - DNA, 694 bp, Unknown
  Bacterial polypeptide expressing nucleotide sequence isolated from the Sargasso Sea
caacccggcgaaagagctggcgaacgtacaggatttaacggtccgtggcgcgaagctgctgctgattaaccctaccgattctgatgcggtaggtaacgccgtgaagatggctaaccaggcgaagatcccggtgattaccctcgaccgtcaggcttcgaaaggcgacgtcgtcagccatatcgcgtctgataacgtgctgggcggtaagatggccggcgactacattgcgaagaaagccggtgaaggcgcgaaagtgattgaactgcagggtattgcagggacttccgcggctcgtgaacgtggtgagggctttaagcaggccgttgccgcgcacaaattcaatgttctggccagccagccggcggacttcgaccgtaccaaaggtctgaacgtcatgcagaacctgctgaccgcccatcctgatgtgaaagcggtatttgcgcagaatgatgaaatggcgctgggtgcgctgcgtgcattacaaacggcaggcaaatccgatgtgatggtggttggatttgacggtactccggatggcgaaaaagccgtaaatagtggcaaactggcagcgaccatcgctcagttgccagagcagatcggcgtgaaaggcgtcgagactgctgataaagtgctgaagggtgagaaagtggatgccagctatccggttgagctgaagctggtcattaagcagtaa

SEQ ID NO: 274315 - DNA, 685 bp, Unknown
  Bacterial polypeptide expressing nucleotide sequence isolated from the Sargasso Sea
tatctggaggaaacgtcaaagagtagctataggtagagctattacaagaaaaccgaaagtttttttattcgatgaaccattatctaatttagatgcggctttaagagtacaaatgagagtagagttggcaaaattacatgatcaacttaatgctaccatgatctatgtaactcacgatcagactgaagccatgacactcgcaaacgatattgttgtattggatcaagggatagtttcgcaaaagggatcacccatgaacttatataataacccagataatttatttgttggaggttttattggatctccaaaaatgaattttatagatagtaaaattttaagtaaaagctcaaagagttctgaagtagatataatggggactggaaagttaaatgtaccaaaaatttctgaaaatactcaagaaggggatagtataaaaattggtataagaccagagcacttaatattaaattcagatttagattctttgtgggaaagcaaggttttcgttgtagaaaaattagggtcgggaacatatttatatttagagaaagagggagatcctcttgttgtacaaactgatggggacactaatattaaagtaggtgatattgttaaaataggttttgatccatttcgatgccatttatttgataataaaggtatttcttttaaaaattcctaa

SEQ ID NO: 274316 - DNA, 696 bp, Unknown
  Bacterial polypeptide expressing nucleotide sequence isolated from the Sargasso Sea
gaaaaccaaaacagctttctggcgttcagagacaaagggttgctataggaagagcaataacaagaaaacctaaagtttttttgtttgatgaacctctttcaaatctagatgcggcacttcgagttcaaatgcgtgttgaattagctaaattacatgatcaattaaatgcaacaatgatttacgtaactcatgatcaaactgaagcaatgactttagctgatgatatagtagttttagacgaaggtgttatatctcaatcaggttcaccaatggatttatatagtcatccctccaacttatttgttgcaggttttattggttctccaaaaatgaattttatttcaactaaaattagtagttctagttctagttcaacggaagtagatctttttggtcagtccaaattagctatatctaaaacatcttcaaatacttcagagggtgatcaaattcaattgggaataagacctgaacatttacttgtcaatcaagatgctgatgcaagttgggagggaaaagtatttgttgttgaaaaactaggatcaggaactttcttatatttagaaaaagaaggagaacctctagtagttgaagctgaaggagactcaaatataaaagtaggtgataccgttaaagttggatttagcgcttcaagatgtcacttatttggaaatgatagtcaagcgttcaaataac

SEQ ID NO: 274317 - DNA, 658 bp, Unknown
  Bacterial polypeptide expressing nucleotide sequence isolated from the Sargasso Sea
gttgctattggaagagctataactcgtaaaccaaaagtgttcttatttgatgaacctttatcaaatctagatgctgcacttcgtgttcaaatgcgtgttgagttagcgaaactgcacgatcaactaaatgcaactatgatatatgttacacatgatcaaactgaagcaatgacactagcaaatgacattgtcgttcttgatgaaggtatcgtttcacaaaaaggatcacctatggatctatataatgatccaaataatttatttgtaggaggatttattggatctcctaaaatgaattttatctctactaaaataacaagtaaaagtaatgataagacggaagtagatttaatgggatcttcaaaaattagtattccaaaaacttcagcatcagcctctgaaggtgattcagtacaattaggtattcgtcctgaacacctaattgttaatcaagatggtgatggaagttgggagagtaaagtttttgttgttgaaaaattaggatcaggaacattcctttatcttgaaaaagaaggtgaacctctagttgttgaaactgagggtgattcaaatattaaagttggagatacagttaaagttggtttttcagcttctcgctgccatttatttgatagctcaaaacaagcttttaaatagt

SEQ ID NO: 274318 - DNA, 941 bp, Unknown
  Bacterial polypeptide expressing nucleotide sequence isolated from the Sargasso Sea
ttaaaaattattggggacgttaaagctgttcatgactttaatcttaaaattgctgagggggaatttattgttttagttggaccatcaggatgtggaaagtcaactactttaagaatgattgctggattagaggatattacttctggactaatatacattgatgagaaagttattaacaaaattcatcctaaaaatcgtgacatagctatggtttttcaaaattacgctctttatccgcatttatcagtaaaagataatatttcatttgggctgagggcccaaaaaattcccaaagttgaggtggaaaaaagagttgttgaagcctccgaaacgcttggtttggaaggattattatcaagaaggcctggagaactatcaggtggtcaaaaacagcgagtggcaatgggaagagcaattgtaagaaaccctaaagtatttttgtttgatgaacctttatcaaatttagacgctaaacttcgtcataagatgagagcagaaatgaaaaaacttcacaaaaaagttggaaccactactatttatgttacccacgatcaaattgaagcaatgaccttggctgatagaattgtgataatgaaggatggtctaattgagcaagtaggaacaccagacgaagtttacagaaggcctaacaatatctttgtagctagttttattggtacgccggcaatgaattttatagaaggtaaagtaagtaatgtttctaaaggatcatcaatgattatgctggaagatcaaaaaagtataaaattaaaaggtaaaaatttttataataaccaaaatattatcttagggctaagaccagaagatataactgtaacatctaaaaaatctgttaaaagtcacaatataatagaactggatgcagaaatttctgtaattgagcctatgggtcatgaaactgttgtaatttgtgacagcaa

SEQ ID NO: 274319 - DNA, 655 bp, Unknown
  Bacterial polypeptide expressing nucleotide sequence isolated from the Sargasso Sea
caattaggaagggccattactcgaaaacctaaagtttttttatttgatgagccgttatcaaacttagatgcagcactacgtgttcagatgcgtgttgagctagcaaaattacatgaccaactaaatgcaacaatgatttatgttacacacgatcaaactgaagcaatgacccttgcgaatgatattgtcgtattagatgaaggtatagtatctcaaaaaggttcaccgatggatctctacaacaatccaaataacttgtttgtaggtggttttattggttcaccaaaaatgaattttatctcaactaaaattataagcaaaagtggcgataagactgaggttgatataatgggatcttctaaaattagtattcctaaaacgtctgcttcagcttctgaaggtgactcagttgaattaggcattagacccgaacacttaactgttaaccagagtggtgatgctagctgggaaagcaaagtgtttgttgtagaaaaactaggttcaggaactttcctataccttgaaaaagaaggagagccattagttgtagaaactgatggagactcaaatattaaagttggtgacacagtaaaagtaggatttgacgctgaacgctgtcacctatttgatagctcaaaacaagctttcaaataat

SEQ ID NO: 274320 - DNA, 541 bp, Unknown
  Bacterial polypeptide expressing nucleotide sequence isolated from the Sargasso Sea
atggccgatgtaaaaatgagatcaattttcaagtcctttggaaatacagaggttattcacggtgttgatcttgaaataaaagatcatgaatttgtggtttttgtaggaccatctggatgcggaaaatcaactcttttgagactgattgcaggtttggaagatgtctcccagggagagattgaaattgagggccagcgtgtagaccacctccctccagcaaaacgagggatcgctatggtgtttcagtcatatgccctttatccgcacatgaatgtttaccaaaatatgtcattcggattaaaactggcaaaaactgataaaaaaataactgaccaaaaagttagggatgctgctgaaattctgcagataacagaattgctagaacgcaagccaaaggaactatcagggggccagagacaaagagttgccattggaagagctatagttagggatccaaaggttttcctgtttgatgagccactttcaaatcttgatgcaaaacttcgtgtgcaaatgaggatagagctaaccaagttgcaca

SEQ ID NO: 274321 - DNA, 805 bp, Unknown
  Bacterial polypeptide expressing nucleotide sequence isolated from the Sargasso Sea
ttttgataacatggcctttggtttaaaattagagaaaagatcaaaagaggaaattaatgaacgtgttcaagaggcggcaagaatacttcaaattgaggattatttgcatagaaagcccaaacaattatcaggtggacaaagacaaagggtcgctattggaagagctataactcgtaaaccaaaagtattcttatttgatgagccattatcaaacctagatgctgctcttcgtgttcaaatgcgtgtcgaattagcaaaactacatgatcagcttaatgcaacaatgatttatgttactcatgatcaaacagaagcaatgacactagcaaatgatatagttgttcttgatgaaggtatcgtttcacaaaaaggatcacctatggatctttacaatgatccaaataatctatttgtaggaggatttattggatctcctaaaatgaattttatctctactaaaataacaagcaaaagtaatgataagactgaagtagatttaatgggatcttcaaaaatcagtattccaaaaacttcagcatcagcctctgaaggtgattcagtacaattaggtattcgtcctgaacacctaattgttaatcaagatggtgatggcagttgggagagtaaagtatttgttgttgaaaaattaggatcgggaactttcctttatctagaaaaagaaggtgagcctttggttgttgaaactgagggtgattcaaatattaaggttggcgatacggttaaagttggcttttcagcttctcgttgccatttatttgataactcacaacaagcttttaaataa

SEQ ID NO: 274322 - DNA, 716 bp, Unknown
  Bacterial polypeptide expressing nucleotide sequence isolated from the Sargasso Sea
aattgaagattatcttaagcgcaaacctaagcaattatctggtggtcaaagacaaagagtagcaataggtagagcaattactagaaaaccaaaagttttcttatttgatgagcctttatcaaatttagatgcagcattaagagtccaaatgcgtgtagagttagcaaaattacatgatcaattaaatgctacaatgatttatgttactcatgatcaaacagaagcaatgactttagctgatgatatagtggttttagatgaaggaattgtttcacaaaaaggttcaccaatggagctttatgataatccttctaatttatttgtgggtggctttattggatcaccaaaaatgaattttatatcttcaaaggttctaagtgctaaccaaaatagtactgaagttgatatttttggatcatcaaaaatatctatacaaaaaacttctaaagatgcttcagctggtgaagaagtacatttaggcattcgacctgagcatcttcttattaaccaagaaggtgatgctagttgggaaagcaaagtatttgttgtcgaaaaacttggttctggaacttttttatatcttgagaaagaaggtgaaccattagttgtcgaaactgaaggagactcaaatataaaagttggcgatactgttaaagtaggttttactgcaagtagatgtcatctatttgataaaaataatcaggcttttacttaag

SEQ ID NO: 274323 - DNA, 955 bp, Unknown
  Bacterial polypeptide expressing nucleotide sequence isolated from the Sargasso Sea
tgtggtaagtctactatgctaagaatgattgctggattagaggatataaattcaggtacaatttcaattgatggtcaagtagttaacgatctaccgccaaaacaaagaaatattgcaatggtatttcaatcttatgcactgtatccgcatatgacagtttttgataatatggcttttggcttgaaattagaaaaaagatcaaaagatgaaattaatgaaagagtaaatgaagctgcaagaatattgcagatagaagattatctaaaaagaaaaccaaaacaattgtctggaggacaaagacaaagagttgcaattggaagagcaataactcgtaaaccaaaggtttttctttttgatgaacccctttcaaatttagacgcagcattaagggttcaaatgagagttgaattagcaaaacttcacaatgagcttgaagcaacaatgatctatgttactcatgatcaaactgaagcaatgacactagcagacgatattgtagtattggatactggaattgtatctcaaaaaggcacgcctttagaactttatgataggccaaataatatgtttgtcggtggttttattggatctcctaagatgaattttatttcaactaaaataatatcaaaaagtggtaattcaacagaagtagatttaatgggtatgtcaaaaattgcagttccaaaaatgtctgcctcatcttcagaaggcgattctgtaactcttggtatcagaccagaacatcttatagttaatcaggactctgatggtagctgggaaagtaaggtatttgttgttgaaaaacttggttctggaacttttttatacttagaaaaagatggtgagcccctagttgttgaaactgaaggtcactcaaatattaaagttggagatactgaaaaagtagggtttcagtcaaatagatgtcatttatttgatagctcacaacaagctt

SEQ ID NO: 274324 - DNA, 1087 bp, Unknown
  Bacterial polypeptide expressing nucleotide sequence isolated from the Sargasso Sea
aatggcaagtattaaaatagataaagtaaacaagttttttggtagcacacatgtgattaaagatgtttctcttgatataaaaagtgagtctttcacagttctagtaggcccaagcggatgtggtaaatctacaattttaagaatgattgctggtttagaggaaattaattcaggtacaatatctattgacgataaagttgttaacgatctaccacctaaagaaagaaatattgcaatggtatttcaatcttatgctctttaccctcatatgacagtatttgataatatggcttttggtttaaagattgaaaaaaaatcaaaagaagaaatagagcaaagagtaatggaggctgctaaaattctgcaaatagaggagtatcttgagagaaaacccaaacaattatctggaggacaacgtcaaagagtagctattggtagagccattacaagaaaaccaaaagttttcttattcgatgaaccattatctaatctagatgcagcattaagagtacaaatgagagtagaattagcaaaattacatgatcaacttaatgcaacaatgatttacgtaactcatgatcaaactgaagccatgacacttgcaaatgatattgttgtattggatcaaggtatagtttcacaaaagggatcacccatgaacttatataataacccagataatctgtttgttggtggttttatcggatctccaaaaatgaattttatagatagtaaaattttaagtaaaagttcaaagagttctgaagtagatataatggggactggaaagttaaatgtaccaaaaatttctgataatactcaagaaggggatagtataaaaattggaataagaccagagcatttgatattaaatgcaaaaacagattcattatgggaaagtaaagtcttcgttgtagaaaaattagggtcaggaacatatttatatttagagaaagagggagatcctcttgttgtacaaactgatggagacacaaatattaaagtaggtgacactgttaaaataggttttgatccatttcgttgccatttatttgataataaaggtatttcttttaaaaattcttga

SEQ ID NO: 274325 - DNA, 1138 bp, Unknown
  Bacterial polypeptide expressing nucleotide sequence isolated from the Sargasso Sea
catggctgaagtagtactcaacaacgttcgcaaaaattacgacccggctgttcacaaggacaccctgcgcaatatcaacctggccatcaaggaaggggagttcatcgtcttcgtcggtccgtccggttgcggcaagtccaccctgctgcggatgatcgcgggtctggaagacatcaccagcggcgagctgaccatcggtggtcgttacatgaacgacgtgccgccggtagagcgcaacgtgggcatggtgttccagtcctacgccctctatccgcacatgaacatctacgagaacatggccttcggcctcaagctcaagaagatggacaaggagaacatccacaagcgggtgatgcgcgccgccgagatcctgggtctcgagccgctgctggaccgcaagcccaaggcactctccggcggtcagcgccagcgggtcgccatcggccgctccatcgtccagcaaccgcaggtgttcctgtttgacgagcctctgtccaacctggatgccgccctgcgggtcaagatgcgcatcgagattgccaagctgcacaaggagctcaactccaccatcatctacgtgacccacgaccaggtggaggccatgaccctggccaaccgcatcgtggtgctgagcccgctcaagggcgaggcgaccaccaacctggagcagttcggcaccccgctcgagctctaccacaacccggacaacaagttcgtggccggtttcatcggctctcccaagatgaacttcctggccggcgagctggtggagattggcgagcaggagtgcgtggtcaagctgaccaccggcgataccgtgcgtgcccgggtcgatgcccgcagcggcgcggtcggcgacaaggtggagctgggcattcgtcccgagcacttggtgccgctggatcacccccatgccgacagcaaggtgagcggggtggtgcaggtggccgaacatctgggggccgaatccttcgtctacatggacgtggcagggcacgacttcaccgtcaaggccagctccgacgtggacgtggccaccggtcagcagtacagcgtcggcattccggccgaagcctgctacctgttcgatgccaaggagcaagccttcccgcgcacggccaaatacatccgcacctga

SEQ ID NO: 274326 - DNA, 1048 bp, Unknown
  Bacterial polypeptide expressing nucleotide sequence isolated from the Sargasso Sea
atgagttttttagaattacaaaatattacaaaaatttatcctaacggaacaaaggctgtgaatgaaacatctttgaatattgataacggtgaattcgttgtatttgtcggtcctagtggatgtggtaaatcaacattattaagaatgattgctggtttagaggatattactagtggtgaaatatcattagatggcaatataattaataatattgacccttcagaaagagatgtggctatggtttttcaaaattatgctctttatccacatatgtctgtatttaataatatgtcttatggcctgaaaaatagagggatatctaaagatgaaatcaaaaataaagttaatgatgttgctaaacttctagaaatagatcaattacttagtagaaaaccaagtatgctttctggtgggcaaagacaaagagttgcaatgggtagagctattgtcagaaatccaaaaatatttttatttgatgagccgttatctaatctagatgcaaaactcagaaatcaaatgagattagaaattaaaaaactacagcgtcagatgggcgtaacaagtatctttgtaactcatgatcaaaccgaagctatgaccttaggtgatagaatagtagttattaataacggagtagtagaacaagttggcactcctaaagagatttactctaaaccaaacactaagtttgttgcagaatttataggctcacctcagatgaatttatttcaatgcaaaatagaaaatggattagctaaaatttcagatatgcaaattaatttaaataattcactaaatattcaagatgcatgtattggcgttagaccagatgatattttaatatcagatcaaggagaatattctagttcagctaatctagttgagtatttaggttctgacatgatcatctattcaagtgttggaggacaagagtttagctgcaaattatcatctaaaattaatttgaaagctggtgataattttaaattcaacatttctccatcagtgctacatatttttgacaatacctcaggacaaagagtttaat

SEQ ID NO: 274327 - DNA, 665 bp, Unknown
  Bacterial polypeptide expressing nucleotide sequence isolated from the Sargasso Sea
agatattttggataaatataatatcaaaccaactgttccagttaacgctatgttagctgatcggtaccctcggatggttcaagagtgtatagatcgtggctgggagatagcggggcatggaataagcgccactcaaatgattacttcagatatttccttacccaaagaaaaagaaacaatcgccacatcattagaaacattgcagaaaagatatggcaagaaggtaaagggatggttcggacaagactattctcaaagcacgagcacatttaaactgctttctgaatttggtatagagtacgttgcagacttcccaaatgatgacagcccgtatgctacaaactataacagccttatatgcatcccaaatcaatcagagtgggatgatactcaactaatggcggtaaggcgattgatgccttggcgttggcgagatgtagtatgtgaggcgtttgattacctttacaacgaggcgcatccctccggtaccgttatgactctctctatccatccttggctgctaggccaagcccatcgaatcaagtatcttgatgaagcgttgaaaaaaatgacaggctataaggatgtttggcagacaaacgcacttgaagtaacgacccattatagaaatagttcttcaaaacaaagtgttaataatgattaag

SEQ ID NO: 274328 - DNA, 240 bp, Unknown
  Bacterial polypeptide expressing nucleotide sequence isolated from the Sargasso Sea
tatgagtattcgtttaactaatatttccaaaaaatttggccaatttcaggcgctctcgccgctcaatctggatattcaagaaggcgagatgataggtcttctcgggccttccggctcgggtaaaaccaccctattgcggattattgctggccttgagggcgcagatagcggccaaatccatttcggtaatcgcgatgtgacccaagtgcatgtacgcgaccgcagagtcgggtttgtttt

SEQ ID NO: 274329 - DNA, 226 bp, Unknown
  Bacterial polypeptide expressing nucleotide sequence isolated from the Sargasso Sea
atgattggcggtgagcagcctgtggtttacgtcacccatgaccagcaggaggcgatggcgctggctgatcgcatcgctgtgatgcgcgatggaaggattgaacagatcggaacaccccgcgagctgtacatgcaaccggccagcacatacgttgcccagttcatcggccgcccgcagatgaatctgctgcctgccaagaacggggtgatcactggcatccgaccgg

SEQ ID NO: 274330 - DNA, 229 bp, Unknown
  Bacterial polypeptide expressing nucleotide sequence isolated from the Sargasso Sea
atgagtattcgtttaactaatatttccaaaaaatttggccaatttcaggcgctctcgccgctcaatctggatattcaagaaggcgagatgataggtcttctcgggccttccggctcgggtaaaaccaccctattgcggattattgctggccttgagggcgcagatagcggccaaatccatttcggtaatcgcgatgtgacccaagtgcatgtacgcgaccgcagagtcg

SEQ ID NO: 274331 - DNA, 491 bp, Unknown
  Bacterial polypeptide expressing nucleotide sequence isolated from the Sargasso Sea
cctggatgcacagttgcgtgatgagctgcgtcccgagctacgccagctgatcctgcatggatcgcaaccggtggtctacgtcacccacgatcagcaggaggcgatggctctggccaaccgcatcgcggtcctcaaggggggacgcatcgaacagatcggaacccctgaagagctctacaaaactccggccagctgctttgtcgccagcttcatcggtcgtccccagatcaatctgctgaacattgatcagcagctcacgatcggcattcgaccggaggaccttcacttcgaccccgaggggatgccctgccgtttgatcagccgtgaatggcaaggcgcgagccaattgttgttgctggacagcccgcgtggtgcgttgcgaatgctttgttctggtgatgccgccctgggcgagtccttatcggtgagctggccgacccgtgctgagcatcgctttgatgccatcagtggacgtcggctggctggataac

SEQ ID NO: 274332 - DNA, 721 bp, Unknown
  Bacterial polypeptide expressing nucleotide sequence isolated from the Sargasso Sea
aatgaacaaattgcttacactttcaaatatatctaaatcttttgatagagatagggtgcatgcattaaaaaaaataagttttgagtgcgataaaggcgatgtgatttcaattgtaggaagtagcggtagtggaaaatctacactcttgagaattattgcgggtttagaaatcccagataaaggtgaaataacactcaacggaaatctaattaatgataataaaatttttacttccgctgaaaagcgtgattgctctcttgtttttcaagactttgcacttttcccaaatatgacagttattgagaatatttgttttgggaaaaaagctgctaacaataaaactttgatcgatgaattaatggaattcactgtaattactgatcttgcagatcgctaccctcatgaaatttctggaggtcaacagcaaagagttgcattagtaagggcactgtccaataacccttcgttgcttttactagatgagccgcttagtcatctagatttcgagctaaaagataatgttagaaatgaattaattaatctaattcaaaaagttggcgcgactgtcttaatggtcacgcacgatacaaaagatgcaatgcttatggcagataaaattatagtattaaatgatgggcaaattgatcaaatcaattcaccaccaaaaatatttaacttccctgcaaatgcttatgttgctcgactattggaaaaactaata

SEQ ID NO: 274333 - DNA, 343 bp, Unknown
  Bacterial polypeptide expressing nucleotide sequence isolated from the Sargasso Sea
atgagcatccgcatagatcagatcaataaaaaattcggcgactttattgccgtcgataatgtcagtttatccattcagaccggcgaattaaccgccttacttggcccttcaggttcaggcaaaaccagcttattgcgtattattgccggcttagagcaagccgacagtggcagtatccattttgatgatctggatatcagcgcacgccatgtttcagaacgtggtgtaggttttgtatttcagcactatgcgctgtttaagcatatgaccgtctatgaaaacgtagcttttggtttaacagtcaaacccaaaaagcatcgtccttcaccggagcttatccgca

SEQ ID NO: 274334 - DNA, 410 bp, Unknown
  Bacterial polypeptide expressing nucleotide sequence isolated from the Sargasso Sea
gatggaaaaattattagaaattaaaagcttaagacacagctataatactaattctgaagtactaaaaggtattgattttgatgttttaaaaggtgaaatcatttctatcttaggtccatcaggttgtggtaaaacaacattattaagaattattgcaggtttagaaaaacaaagtgagggaactgtttcgataggaaatcaaattgttgctggtcacctacagcatttgccaacagaaagaagaaatattggattagtggttcaagaaagagcattatttcctcatttgacaaatttaaaaaatgttaaatttggaatcaaaggaaatgaaaaagataaaacctcaatagcttttgaatttttaaagcttttcaaagttgaaaaatacgctgaaaactttccccatgaga

SEQ ID NO: 274335 - DNA, 711 bp, Unknown
  Bacterial polypeptide expressing nucleotide sequence isolated from the Sargasso Sea
tctctttcgacatttatgaaggggagaccgtcagcctgattggccactcaggatgcggtaaatcaacgctgctgaacctgattgccggcattaccttacccacggaaggcgggctgctgtgcgataaccgcgaaatcgccggaccgggccccgagcgtgcggtggtctttcagaaccactccctgctgccgtggctgacctgctttgacaatgtggcgctggcggtcgaccaggtttttcgccgcaccatgagcaaagccgagcgcaaggagtggatcgaacacaacctggatcgggtgcaaatgggccacgcgctgcacaagcgtccgggtgagatctccggcggcatgaagcagcgggtagggattgccagagcgctggcgatgaagccgaaggtgctgctgctggatgaaccgtttggcgcgctcgacgccttgacccgcgcccatttgcaggatgcggtgatgcagattcagcaggcgctgaacaccaccatcgtgatgattacccacgatgtcgatgaagcggtgctgctctctgaccgcgtcatgatgatgaccaacggcccggcggcgacggtgggagagattctcgccatcgacctgccccggccgcgcaatcgtgtccagttggcggatgacagccgttatcaccacctgcgccagcagattctccatttcctctacgaaaaacagccgaaggcggcgtaag

SEQ ID NO: 274336 - DNA, 292 bp, Unknown
  Bacterial polypeptide expressing nucleotide sequence isolated from the Sargasso Sea
atgaataggcttaaactagacgaaataacatattcgtattctaagaataaaataataaatggtcttaatctagaaattatcgaaggtgaaatagtatgcctaattggtgaatcgggaacaggaaaaacaaccttgctaagaataattgcagggctagagatacaagataagggctcagtcctattggatggtaaagttatctccaataatgactacaatcttgaaactcacaaaagaaatattggattagtgcttcaagaaagagctttatttccgcatcttgatgttttta

SEQ ID NO: 274337 - DNA, 358 bp, Unknown
  Bacterial polypeptide expressing nucleotide sequence isolated from the Sargasso Sea
catgagtatcgaagtcaaaggcgtcaacaaacggttcggccagttcacggcgctgaacgacatcaatctgaacatccagagcggcgagctggtggccctgctcggcccgtccggttgcggcaagaccaccctgctgcgcatcatcgccggcctggaaaccccggacagcggcagcatcggcttccacggcgaggacgtgtccgaccacgacgtgcgtgatcgcaacgtcggcttcgtgttccagcactacgaccctgttccgccacatgacggtgttcgacaacgtcgccttcggcctgcgcatgaagcccaagggcgagcgcccgagcgaggcgaagatcgccgagaaagtgcatga

SEQ ID NO: 274338 - DNA, 580 bp, Unknown
  Bacterial polypeptide expressing nucleotide sequence isolated from the Sargasso Sea
tgacccggagagcggctcggtgcagttggacgggcgcgacgttcggacgctcgacctcgagtggctccgctcccaagcaggctacgtctgccaggagcccgcgctcttcgacctctcggtgacgggcaacgtgctcttcggcccgcagcctccgcccgaggagagccgggtggaggaggcgctgcgtgccgtgggggcggccccgtttgtggagcgactcccggaggggcggggcacgaaggtgggcgaggctggtcgtgggctgtcgggggggcagaggcagcggctggcggtggcgcgcgccctcgtgcgctcgccgccgatactcctttgggacgaagccacgtccgccctggacgtcgcgtccgagcagctcgtgcatgacgccctccgcgcgagtggccagcgggagcgcaaccgcaccgccgtcatcgtggcgcaccggctctcgtctgtgctctgcgcggatcgcgtggccgtgcttcgcgaggggcgcatcgagcaggtaggtaccccccacgagctgcgccagctcaagggcggctggttctaccagaacttttacgcgagcggcagttga

SEQ ID NO: 274339 - DNA, 643 bp, Unknown
  Bacterial polypeptide expressing nucleotide sequence isolated from the Sargasso Sea
gcctgatgcttttttgttcgatgaaccattatcaaatctagacgccaaactaagaacacaaatgcgaactgaaattaaaaaacttcatcaaaagttaaaaacaacagtgatctacgtaacgcatgatcaagttgaagccatgacacttgctgatcggattgttataatgaaagatggagtaatcgagcaaattggaactccacttgaattatttgaaaaaccagcaaccaaatttgttgcaacatttattggttcaccctcaatgaatatgattgaagctaaaataactaatatttcaggagaactttgtatgaaaactaatgacgatatttctgtatcagttccaaaacataaaataaattctttatcagagggacaaagaatctcttttggttttagggcagaagatattgtcccactaaaatttggtcagaaaccaaaaaattcatggagtatgaaatctaaggttaatcttgcagaaccgcttggaacagaaactttgatctttactaatttaggtaatacagaagttgtaagtagaatgtttacacctgaattagttaattctaatgatgaattagaatttgcattaaatcttgatagaacttatttgtttgatggagatactggtttggcgatatga

SEQ ID NO: 274340 - DNA, 850 bp, Unknown
  Bacterial polypeptide expressing nucleotide sequence isolated from the Sargasso Sea
aatggctaatgttaagtttgaaaaattatctaaaaattttggagatgtaaaggctgtagaggattttacacttaaaattgaagatggtgaatttatagttttggtggggccatctggttgtggaaagtcaacaacattaagaatgattgcaggattagaagacgctaccacaggtttaatatatatagatgacaaagctgttaataaagttcatccaaaaaatcgtgacatagctatggtgtttcaaaattatgctttgtatcctcatctaagtgtaagagacaatatatcctttggtattagagctcaaaagttacctaagaaagaaatagaagagcgaacaatgaaagcttcagaaacattaggtttggaagatcttttacatagaaggccaggagaactctcaggaggtcaaaaacaaagagtggcgatgggacgagctatagtaagaaaccctaaagtttttttatttgatgaacctttatctaatcttgatgcaaagttaagacatcgaatgcgaactgaaatgaaaaaattgcataaacaatttaggactacaactatttatgttactcatgatcaagttgaagcaatgacattagctgataagattgtaattatgagagatggtcgaatagagcaagtaggaattccaaatgaattatatcaaaagccaaaaaatacctttgttgcaagttttattggaactccagcgatgaattttattcatggggaagtttttgaaatgaatagtcaattaggtataaaattaccagatggtttaactttttcaatgcctaaaaagtttgctagcaaaggccaaaaagtaatcctaggaattaggccggaa

SEQ ID NO: 274341 - DNA, 505 bp, Unknown
  Bacterial polypeptide expressing nucleotide sequence isolated from the Sargasso Sea
aatgggtgttacaagtgtatttgttacacatgatcaagtagaagcgatgacattaggagatcgattagctgtcataaatgcgggagttattgaacaagtaggctcccctattgaagtatacgaaaagccggcaacacattttgttgcagaatttattggaacgccgcaaatgaattttattaatggtaaaattcattcaaataaatttatttcagatggatttgaatgttcaataaataacgatttaaatgatcaagaagtaatttttggtgttagaccggaaaacctaaaagtaagtgcaaatggtagtataaaaattaaagtagacctcatagaaaagcttggggctgacagtattatctatggttatgataaatcaaacaattatctatgttatcgagaaaatgggaatactaaaataaaagcaaatgatgaaatttcattagaaattgaagacgaaaattatcacttgtttgataaagagacaaaagaaagattaaactag

SEQ ID NO: 274342 - DNA, 256 bp, Unknown
  Bacterial polypeptide expressing nucleotide sequence isolated from the Sargasso Sea
tatgcaaaaagagaccacatctataagcctaaaatcttgtggaaaaacttttaaagacggtactagggcattagaagaaataaatttagatataagtggaggtgaaactgttgttcttctagggccatctggctgtggaaagactactttattaagaattatagcaggtctagaagaaccagataaaggtggtcagattatatttaatgatgaggatgtaagtaaattacaaatgaaaaaaggaatgtgggtatgg

SEQ ID NO: 274343 - DNA, 534 bp, Unknown
  Bacterial polypeptide expressing nucleotide sequence isolated from the Sargasso Sea
gctgtcgggtgcgcgaaaaacgcgatgcggtcgcgcagcacatcgaacttgtcggcctgaaaggcttcgaaaatgcgtatccgcatcagttgtcgggcggcatggcgcaacgcgtggcgatcgcccgcggtctcgtgaaccgtccgcgcgtcctgctgctcgacgaaccgttcggcgcgctcgacgcgctcacgcgcggccgcttgcagaacgaactgcaacgcatctgggaacacgagcgcatcacgatgattctcgtcacgcacgacgtcgacgaggcgctctatctcggcgaccgcgtcgtcacgatggcgccgcgtcccggtcgcatcaaacggattgtcgacgtggccttgccgcgtccacgcgagcgtaacgatccccgcttcattcgtttgcgcgacgaggtactggccgatttcgccgaacacgacggcgcgcgccgcgaccctcatgaagacgaaccgccgcacggcggcacgcgcattccggtcgcgagtccgccgatcaccgaatggcggctcgcgtggtgag

SEQ ID NO: 274344 - DNA, 883 bp, Unknown
  Bacterial polypeptide expressing nucleotide sequence isolated from the Sargasso Sea
cctgactcttcctcgtcccccttttcctcgcaccgccatgacgactctcgcctccgattcgctcgacatcctccatgtgagcaagcactacgcgcaacgcggcgcggcgctcgccgtactcgacgacgtgtcgctgcacgtgcgcgccggtgaattcgtcacgatcgtcggctcgagcggttgcggcaagtcgacgctgctgcggctgatcgccgggctcgataccgattacgcgggcgagatccgggccggtgccgaacgcgtgcacgacacgtcgctgcagcgcgggatcgtgtttcaggatcaccggctgttcccgtggctcaccgtcgcgcagaacatcgaggccgcgctgcgcaacgcgccgctcgacgcggccgcgaagcggcgcgcggttgccgatcacatcgcgctcgtcgggctgaacggcttcgagcacgcgtatccgaaccagctgtcgggcgggatggcgcagcgcgtcgcgatcgcgcgcggcctcgtgaaccgcccgcgcgtgctgctgctcgacgagccgttcggcgcgctcgacgcgcagacgcgcgcgcggatgcagaacgaactgctgcgcatctgggaacaggagcgcatcacgatgatcctcgtcacgcacgacgtcgacgaagccgtgtatctcggcgaccgcgtcgtgacgatggcgccgcgcccgggccgtatcgaacgcatcgtcgatgtcgcgttgccgcgcccgcgccggcgcgattcgcccgcattcgcgcgattgcgcgacaccgtgctcgccgatttcgacgaccacgaaccgccgggcgacgaccgcccgggcggccggcgcatcgacacgccgcgcccgcaccggatcggcgaatggcggctggcgtggtag

SEQ ID NO: 274345 - DNA, 529 bp, Unknown
  Bacterial polypeptide expressing nucleotide sequence isolated from the Sargasso Sea
catgagcatccgaatagagcaaatcaataaaaaatttggtgactttgttgccgtcgataatgtcagtttatccattcagaccggtgagctcaccgccttacttggcccttcaggttcaggcaaaaccagcttactgcgtattattgccggcttagaacaagctgacagtggccgcatccattttgatgagctggatatcagcgcgcgccatgtgtcagagcgaggtgtaggttttgtatttcagcactatgcgctgtttaagcatatgacagtctatgaaaacgtggcttttggtttaacagtcaaaccgaaaaaataccgtcctaccccagagcaaatccgtaaaaaagtgcagcatttgctcgagctggtgcaactggattggactgcagaccgctatccttcacagctttccggtggtcagcgccagcgtattgccttagcccgggctttagccgttgagcctaaagtactgctgctggacgagccttttggtgctttggatgccaaggtcagagccgaactacgc

SEQ ID NO: 274346 - DNA, 928 bp, Unknown
  Bacterial polypeptide expressing nucleotide sequence isolated from the Sargasso Sea
aaagttgaaaaaatctatccaggtgggggttcaagcaattcaaagcatgaattttgatatcaaagatggtgaatttgttgtgcttgtcggtccttcaggttgtggaaaatcaacaatgctacgtctgatagcagggttagaagaaatttctaaaggtgaaatatacattgatgacgaattagttaatgataaggaacctgccgatagagacatagcaatggtatttcaaaattatgccctttatccgcatatgacagtctatgaaaacatggcctatggactgaaaaacagaaaaattaaaaaagaaagaatcaatgaacttgtaaacgaagtagccaaaacacttgaattaagtgatttgctcttaagaaaacccaaggcactttcaggaggacaacgtcaacgtgttgctatgggaagggcaatcgtaagggaacccaaggtttttttgtttgatgaacctttgtctaatttagatgcaaagcttagagtccaaatgaggttagaaatcaagcaattacaagaaagacttggagtcacttcaatctatgtaacccatgaccaaattgaagctatgacacttggtcaaaggctggttcttatggaaaaggggagaatagagcaaattggcacaccaatagaagtttatgagtatccatcatcaatttttgttgcttcatttattgggtctccacccatgaacttagtcaaaggcaaaatgataagaaaaagtgagttggaattgaatggaggtttagttataaaatctgagtcttttgaagattttgatattgacaaacaaataacaataggggttagaccagaacatattgtgttaaataataaagctgagtgttcaattaaagtaaatacacataattttgaacgacagggagctgattcgtttatttatggaactgtattaaac

SEQ ID NO: 274347 - DNA, 745 bp, Unknown
  Bacterial polypeptide expressing nucleotide sequence isolated from the Sargasso Sea
ctgtttgcagagggagtcagccggaccgtagaggagactgaagcgatgaaaaccgatgacgtgatcgtcagctttcgaggggtgcgcaagacgtacgacggcgaaacgctggtcgtcaagcaactcgatctggatatctatcaaggcgaatttctgacgctgctcggaccgtcgggatcagggaaaaccacatgtttgatgatgctggcgggctttgaatttcccaccggcggcgagatctggctcgatggcacgctgctcaataccgtgccgccgcataagcgcaacatcggcatggtgtttcagaactacgcgctgtttccgcatttgacggtcgagcagaacgttgcgtatccgctcaccgtgcgcaagctatccgcggaagagcgggcccatcgcacgaataatgcattgaagatggtgcgcatggagagcttcgcgaagcgctatccggcgcagctttccggcggccagcagcagcgtatcgcgttggcgcgggcgctcgtgttcgagccgaagctcgtgctgatggacgagccgctcggtgcactcgacaaacaattgcgcgaacacatgcagtacgaacttaaatcactgcacgagaagcttggcgtgacttttgtgtacgtcacacacgatcagggcgaagcgctgaccatgtcggaccgcgttgccgtgttcgacaagggcatcgtgcagcaactcgacaccgtggaccgtttgtacgaatcaccgtgcaacgagt

SEQ ID NO: 274348 - DNA, 721 bp, Unknown
  Bacterial polypeptide expressing nucleotide sequence isolated from the Sargasso Sea
gaaaaaaaagtaaatcaagtagctgaacttttagaaatcaaagaatttctattaagaaaaccgggtcaactttcaggtggacaaagacaacgtgttgcaatgggcagagctatagtcagaaacccaaaagcctttttatttgatgagcctttatctaacctagatgcaaaattaagaggacaagttagaattgaaattaaaaaattgcaaaagcaaatgggtgttacaagtgtatttgttacacatgatcaagtagaagctatgacattaggagatcgattagctgtaataaatgaaggggttattgagcaagtaggctcacccattgaggtttatgaaaagccagcaacatattttgtagcagaatttataggaacaccacaaatgaattttattaatggtaaaattcatgcaaataaatttatttcagatggatttgaatgttcaataaataatgatgtaaaggatcaagaagtaatttttggtattagaccagaaaacctaaaagtgagcgcaaatggcagtataaagattaaagtagatctcatagaaaagcttggcgctgacagtattatctatggttatgataaatcaaacaattatttatgttatagagaaaatggtaatactaaaataaaagcgaatgaagaaatttcattagaaattgaagatgaaaattatcacttgtttgatcaagagacaaaaaaaagattaaactaaa

SEQ ID NO: 274349 - DNA, 390 bp, Unknown
  Bacterial polypeptide expressing nucleotide sequence isolated from the Sargasso Sea
tatgaaaaaagatactacttcaataagcctaaaatcttgtgggaaaacgtttaaagacggtactaaggcattagaagagataaatttagatataagtggaggtgaaacaattgtccttctggggccatctggttgtggtaagactactttattacggattatagcaggtctggaggaaccagataaaggtggtcagattatatttaatgatgaggatgtgagtagattacaaattgaaaaaaggaatgtgggtatggtatttcaatcctatgcacttttcccgaatatgaacgttaaagaaaatataggttatggtcttaaagtcaggaaattagataaagatcaaattgaaaaacgtgtatctgaaatgttaaatatgatgcacatttc

SEQ ID NO: 274350 - DNA, 307 bp, Unknown
  Bacterial polypeptide expressing nucleotide sequence isolated from the Sargasso Sea
tatgcaaaaagagaccacttcgataactttaaaatcttgtagaaaaacatttaaagatggtactcgagcgctagaagaaataaatttagatataagtggaggtgaaacagttgtccttctgggaccatctggttgtggcaaaactactttattgagaattattgccggtttagaggaacctgataagggtggtcagataatttttaatgaagaggatgttagtaatttacaaattgaaaaaagaaatgtaggaatggtttttcaatcctatgcactcttcccaaatatgaacgttaaagaaatgtag

SEQ ID NO: 274351 - DNA, 761 bp, Unknown
  Bacterial polypeptide expressing nucleotide sequence isolated from the Sargasso Sea
tatgcaaaaagagaccacatctataagcctaaaatcttgtggaaaaacttttaaagacggtactagggcattagaagaaataaatttagatattagtggaggtgaaacagttgttcttctaggtccatctggctgtggaaagacaactttattaagaattatagcaggtctagaagaaccagataaaggcggtcagattatatttaatgatgaggatgtaagtaagttacaaatcgaaaaaaggaatgtgggtatggtttttcaatcctatgcattgttcccgaatatgaacgttaaagaaaatataggttatggattgaaagtcaggaaattagataaaggtcaaattgataaacgtgtgtctgaaatgttagagatgatgcacattactgacttgtcaattagaaatatagatcaactttctggagggcaaagacaaagagtagcgttggctagagctattgcagttaggccaagagtccttttgcttgatgaaccattgacagctttggatgcaattttaagagataggctaagagttgaaatagatattctcctcagaagtcttggcataacagctatatatgttactcatgatcaatctgaagcaatggcactaggtgatcgaatagttgtcatgtgtaatggacaaatatctcaggtaggtactccaagaaatatatattttagaccagcaaatgaattcgttgctgattttattgggactgtgaatcgtattcatgtaaaaaatctaaaaaact

SEQ ID NO: 274352 - DNA, 679 bp, Unknown
  Bacterial polypeptide expressing nucleotide sequence isolated from the Sargasso Sea
gccgagatcgaccgcaaggtcgaggacgcggccaagatcctgaacctcaccgtttatctcgaccgcaagccgcgcgcgctttccggcggccagcgccagcgcgtggcgatcggccgcgcgatcgtgcgcaatccggaatgcttcctgttcgacgagccgctctcgaacctcgatgcagcgctccgggtcaacatgcggcttgaaatcaccgagctgcaccagcagctcgatgccacctcgatctacgtgacccatgaccaggtcgaggccatgaccatggccgacaagatcgtggtgctgcgcgccggcaatatcgagcaggtcggctcgccgctggagctttaccgcaagcccgccaacctgttcgtcgccggctttatcggctcgccgaagatgaattttgtgaccggcaaggatgcggaaggctacaaggcgcacacgatcggcgtgcgacccgagcatctgacgctctcgaccgaaagcggcacatggcagggcaaggtcgtggtcgccgagcatctggggtccgacaccttcctgcatatcgatgtcgacgggatcggccagctcaccgctcgcgccaatggcgacttcccggtgcgtcacggcgacgtcgtctatgtcacccccgatccggagcgcatttaccgcttcgacgacaagggtctggcgctctgat

SEQ ID NO: 274353 - DNA, 787 bp, Unknown
  Bacterial polypeptide expressing nucleotide sequence isolated from the Sargasso Sea
tatggcgttttcccttaaaatgcgaaaattagaccgatctttgattaaagagaaaatcgatacagcagctgaagttttagggctaactccttacctaaaaagatatcctcgtgcactctcaggtggccaaagacaaagggtagccatgggccgggctatcgttagagatccccaggtttttctattcgatgagcctttatcaaatttagacgctaagcttcgggtccaaatgcgagccgaaatcagggaactacaccaaagactaaagtctacaactttatatgtaactcatgaccaaattgaagccatgacaatggctgataagattgttgtaatgcaagatggatatattgaacaaattggtacgcccctagagctttatgaccgaccaagcaatatttttgtcgctggtttcattggatcccctgcaatgaatttaattcctggtattaccaaaaaatcaggtaaaagttttgctgctgaaatatatggaggcaaactgccattaccagaaattaaaaacttagcagatggacaagaagtattaatcggtgtccgcccagaacagttaattccaggtaaaactgggatagcctcgacagtttcagtagtggaaccaacaggttcagaaacacacctaatcgtcaggagtggagatcaagatcttatatctgtcatccgtgataggagtagctttagcgtgggagaaaagataaatctttctgcggaaaaaagctttttgcatgtatttgatgcaaaaacatctgagagattaaatgatgattaa

SEQ ID NO: 274354 - DNA, 661 bp, Unknown
  Bacterial polypeptide expressing nucleotide sequence isolated from the Sargasso Sea
atgctgcgcatagaccatattgccaagcagtacaaggaaacgccggtgctgcgcgacattgacctgttggtggaggggggcgagttcgtcagcctgctcggcccttcgggctgcggcaagaccacgctgctgcgcattctgtgcggcatcgagcaggccgatgcgggctgcattgtgtttcagggcgaggacatcacacgctggcccgccgcgcgccggggctttggcgtggtgttccagagctacgcactgtttccgaacctgacggcggcccagaacgtggctttcggcctcaagggccaacccgtggcgcaggtgcaggcccgggtgcaggagatgctggctctggtaggcctgggcgcgcaggcgcagcgctacccggcgcaattgtcgggcggccagcagcagcgcattgcgctggcccgcgcactggcgccgagcccgcgtctgctgttgctggacgagccgctgtccgcactggatgcccaggtgcgcaccgagctgcgcagcgaaatccgccagttgcagcgtcaactgggcattgcctgcgtgatggtcacgcacgaccaggaagaagcgctctccatggccgaccgcgtggtgttgatgcacccaggggcgtatcgagcagcagggctcgcccgagcagctctacgccaag

SEQ ID NO: 274355 - DNA, 763 bp, Unknown
  Bacterial polypeptide expressing nucleotide sequence isolated from the Sargasso Sea
gccggatcggcgacgggtggccatggtcttccagagctatgccctcttcccccatctctgcatccgggagaatctgaatctcggacttcgcatccgtggggtgtcccccgatgatcaacgccgcagggtggcgtcgatcctcgaagtgatgcagctgggatcgctggcggaacggcggccttcggagctgtcgggagggcaacggcagagggttgccctggcacgggcgttgctgcgggatccgcttgtgtatctgctggatgaaccgatgagcaatctcgacgcccagctcagggaggagctgaggcctgagctcaagcgactcgtcctgcagggtccacagccggtggtgtacgtgacccacgaccagcaggaggcgatggcgctggcagaccgcattgccgtgctttgcaacggcaggatcgaacagatcggaacgcccagggagttgtacgaacgcccggcgaccctgtttgtcgcacagttcatcggacgaccacagatgaacctgctgcatcgggagacgggattgatcgtggggatcagacctgagcatctgcgactcaatcgcgaaggcctcccctgccgtctgatcggccgggaatggctgggggccgggcagcagctccttctggagtgcagcgctggaacgctgcgcatgctgtgcgacggcacggttgagcctggcgacgatctcagggtgtcgtggaacagctccgatgagcaccggtttctggacggctgcggaactcgaatggcctga

SEQ ID NO: 274356 - DNA, 691 bp, Unknown
  Bacterial polypeptide expressing nucleotide sequence isolated from the Sargasso Sea
attatttgatgtaaatttagatattaaggatggtgagtttatagtacttgttggaccttctggctgtggtaaatcaactcttcttcgaatgattgcaggattagaagatatcaatagtggagaaatatcattaggtggaaaagttattaatcaattagctccaagagacagagatgtatcaatggtatttcaaaactacgctctttatcctcatttatcagtcgctaaaaatattggttttagcttgcgtatgcgtaaagttgaaaaatctattattgataaaaaagtagctgatgctgcagaaatgttaggccttactcatttactatcacgcctacctcgtaatctatcaggaggagaaagacaacgtgttgcaatgggaagagctatagttcgtgatccagaagtatttttatttgatgagccactatcaaacttagatgctaaattaagagtaatgatgagaaatcaaataaaagaaattcattatgaagttaaaacaacaactgtttatgttacgcatgatcaaattgaggctatgacaatggcagataaaattgttgttttaaatggaggtattgttgaacaagtaggttcaccagacgaattatatgaccaaccaaataatacctttgttgctagttttattggctctccaacaatgaatcaaattcttggaaaagttgtttct

SEQ ID NO: 274357 - DNA, 584 bp, Unknown
  Bacterial polypeptide expressing nucleotide sequence isolated from the Sargasso Sea
tatgactgcgcaagctgggaacgacgcgttcctgcgattcaccaacgtcaagaagacctacgatcacaagaccctggtggtcaaggacttcaacctcaacgtggccaagggcgaattcatcaccctgctcggcccctccggctcaggcaagaccacctgcctgatgatgctcgccggcttcgaggacgtgaccagcggcgagatcctgatcaacggccgcaacgtcaccagcatcgccccctacgctcgcaacatcggcatggtcttccagcagtacgccctgttcccgcacatgaccatccgcgagaacctggcctacccactgaaaatccgcaaattgcccaaggacgagattcgcgccaaggtcgaggagtacctcgccctggtcgaactgcaggccttcggcggccgctaccccgcccagctttccggcggccagcgccagcgcgtggccctggcccgcgcgctgatcttcgccccggacatcgtgctgatggacgagccgctcggcgcactggacaagaagctgcgcgagcagatgcagttcgagatcaagcgcctgcacgagcagctcggcttcaccg

SEQ ID NO: 274358 - DNA, 532 bp, Unknown
  Bacterial polypeptide expressing nucleotide sequence isolated from the Sargasso Sea
acgcacgaccaggaagaggcgctggaagtggccgacaacgtggtgctgatgaaccgcggccaggtggagcaggtcggcagcccagatgcggtctacaacacgccggccacgccgttcgtctacggcttcctcggcaacgtgaacctgttccacggccgcctggaagagggcgagggcggcagcgtgctgcacgtgggcgattcggccatcgccgtgccgtcgggcggggtggattcgtcccgcgccgatcaggcggtggctttcgtgcgcccgcacgagatcgacctggagcgctatgcgccgggcgccgagggcattcccgtgacgctgcgccgtgcgctcacgctgggcgccatcgcacagcttgagctggagcgcgaagacaccgacgacatcatcgaagtctccctgcccatcgagcgctttcgcgccgagggcttccgtgaaggcgaaacgctggtggtgcgcccgcgcgcgatccgcgtgttcgcgcaaggcaatgcacggcccgtcgcgcaagccgccgtgtaac

SEQ ID NO: 274359 - DNA, 796 bp, Unknown
  Bacterial polypeptide expressing nucleotide sequence isolated from the Sargasso Sea
gctcttttcccaaatctgacggtttatcagaatatagcctacggattagaaaatcaaaaattacctaaacaagaaatccataaaagagtcacagatttactagaacttgttggtctaccagatcaaaaagaaaaatatcccacacaactatcaggtggacaacagcaacgggtggcattatcacgcgctttggctacttccccgggattattgttactcgacgaaccactgagtgcactagacgcacgagttagatctgcattaagactagaaattcgagcacttcataaaaacctaggcattactactattcttgttacacacgatcaagaagaagcactttcaatggcagatcgaatcgttgttatggatcagggacgaattgaacaggtgggaacacctatagaaatctatagtaatccggcatctccctttgtagcagattttatcggggttatgaattttatttttggtgaagtcacgtcaccaggcatagttaaaatcggagataataccttgaaatgtaacaccgaaaacattccagagaaaaataatgttagagttacaattcgccccgaagatattttatgccattctgaattgattgaatcacccaacacactggaagtaaaagtcaaatccctcgaattccttggttccttctataggctttttatttttgggccaaatggctttgggaaactaatggcagacctctccataaagcaagtccatgagcaaaatataactcctgagtctaaactgactatagaattaccacaaaatcgtctcttga

SEQ ID NO: 274360 - DNA, 865 bp, Unknown
  Bacterial polypeptide expressing nucleotide sequence isolated from the Sargasso Sea
ctctatggtttttcaaattatgctctttacccacatatgactgtagaagaaaatttaggatttagtcttaaaatagcaaaagaagaaaaaaaggaaatagaaactagagttaaagaggctgttcagattttagggcttgaagaattacgaaaaagaaaaccctctcaactttcaggaggtcaaagacaaagagttgcaatgggcagagctattgtaagaagacctgatgcttttttatttgatgagccattatcaaatcttgatgcaaaactaagaactcaaatgagaactgaaataaaaaaacttcatcaaaagttaaaaactacagttatttatgtaactcatgatcaagtagaagcaatgaccttagctgatcgtatagttataatgaaagatggggttatagaacaaataggtacaccattagatttgttcgaaaaaccagcaactaaatttgtagcaacttttattggatcaccatcaatgaatatgattaaagctacaatttctaatcaatcaggcaaactctctatgaaaacagacgatggtatatctgttccagtacctgaacataaaataaattctttaactgaaggacaaattatttcgtttggttttagggctgaagatattgttcctttaaaatatggacaaaaaccttctaattcatggattatgcattctaaagttaatcttgcagaacctttaggaactgaaacgttaatatttactaattttggtcatactgagatagtaagcagaatgtttacacctgaattagtaaactcaaacgatgaattagaatttgctttaaatctggatagaacatatttatttgatgataaaactgatttagctatatgag

SEQ ID NO: 274361 - DNA, 763 bp, Unknown
  Bacterial polypeptide expressing nucleotide sequence isolated from the Sargasso Sea
gaaagagtaaatgaagctgcaactattcttgatatatctgaatttcttcaaagaaagcccgcacaattatctggaggtcaaagacaaagggttgcaatgggaagagcgattgtaaggaggcctgatgtgtttttatttgatgaaccattatctaatcttgacgcaaaattaagaaatcaaatgagaacagaaataaaaagattacatcaaaaggtttcaactacaattgtttatgttactcatgatcaagttgaagccatgactcttgctgatcgtattgttattatgaaagatggaattatagagcaaattggaacgccattagatttatttgaaagaccagcaacaaaatttgtagcaacatttattggatctccatcaatgaatatgattagtgcaataattgttaagcataacagtaaacttcatatgaaaactgaagacgaaatacttattcctgttcccgatcaaaaagtgaaattaattagggaagatcaaaaaatatctttcggttttagagcagaagatattgttcctcttaagtttggaaataagccatctaatttttgggatatgcaatcaacagttaatctttctgaacctttaggaacagaaactttaatttttacaaattttggcaatgttgaaattgtaagtagaatgtttactccagaacaagtaaattcaaatgaaactttaaatttctcattaaacttagatagaacttatttatttgatgaaggaagtggttttgctatatgaa

SEQ ID NO: 274362 - DNA, 727 bp, Unknown
  Bacterial polypeptide expressing nucleotide sequence isolated from the Sargasso Sea
atgacagcactagaaattaaagatttaaatcactattacgttaaagggaagaatgtccttaatgacgtaaatatagagcttgaagagggagaaatattatcaattcttggtccttcaggctgcggtaaaactacattattgagaataattgctggcttagagaaagaaactagcggtagtattttaatgaaagatcaaattatctcagatcattttcatactgttttgactgaaaatagagatgttggattagttgttcaggaaagagctttatttcctcatttgacaataataaacaatgtaatgtttggagtgagtggcagtaaagctaatagacattcaaccgccatgagacttcttaagctatttagagttgaccgatatgcttataattatccaaacgaaatctccagtggggagcagcaacgagttgcaattgcaagagcaatggctccaaatcctaaaatacttttgatggatgagccatttggaactctagatcaatcacttacaaatcagctgcgtgttgaaacaagaaaaattttaaaagacaacaatataacggcaattatcgtctctcatgattttgatgatgcgctttcgatgtcagataaggtcattgttattgaagacggaacagttatacagagtggctctgcaaaagatattacccatatatctagagaaaaatcagtaaaattcagtagtattaaagccaatacttaat

SEQ ID NO: 274363 - DNA, 589 bp, Unknown
  Bacterial polypeptide expressing nucleotide sequence isolated from the Sargasso Sea
aatgagttatttagagttagacaatataactaaaatttatccaaatggaacaaaagctgtaaatgaaacttctctaagtattagtgagggagaactaatggtatttgttggaccaagtggatgtggcaaatcaactttattaagaatgatagctggtttagaagatattactggtggagaaattaaattagataatagagtaattaataaagttgacccttctgaaagagatgttgcaatggtttttcaaaattatgctctttatccacacatgaatgttttcaagaatttagcatatggattaaaaaataaaggagaatcaaaggaagagatagaaaaaaaagtaaatcaagtagctgaacttttagaaatcaaagaatttctattaagaaaaccgggtcaactttcaggtggacaaagacaacgtgttgcaatgggcagagctatagtcagaaacccaaaagcctttttatttgatgagcctttatctaacctagatgcaaaattaagaggacaagttagaattgaaattaaaaaattgcaaaagcaaatgggtgttacaagtgtatttgttacacatgatcaagta

SEQ ID NO: 274364 - DNA, 571 bp, Unknown
  Bacterial polypeptide expressing nucleotide sequence isolated from the Sargasso Sea
ttcggcgcgctggatgccaaggtgcgcaaggagttgcgtagctggctgcgtcgtctgcatgacgatctgcatatctcgacgattttcgtcacgcacgatcaggaagaagcgctcgaagtggccgaccggattgtcgtgctgaatcgtgggcacgtggagcaggtgggcagtccgcaggacgtgtacgaccatccgcaaacctcgttcgtctacgagtttctcggcgcggcgaaccgtctgcatggcaacgtggatgcgagtggcttcgtggtcgacggcgcggcgttgccggtcgcgatcaaagccgatttcagcgggccggcattcgcgtatgtgcggccgcacgatctgcagttgtacccgcaagcgtccggccatcgcgaaggcatcgtggtcgacgtgcggcgcgtggtgacgctcggcggctcggtgcgggtggaactggcgggtcgtgaaggcaacctgctcgaggcggaactcgaccgcgaatcgtggcgcgatctgcaactggcgatcggcgacggcgtgaccgccgtgccgcgcgcgttgcgcgtatttccggcgcaataag

SEQ ID NO: 274365 - DNA, 1132 bp, Unknown
  Bacterial polypeptide expressing nucleotide sequence isolated from the Sargasso Sea
atgagtattcgtttaactaatatttccaaaaaatttggccaatttcaggcgctctcgccgctcaatctggatattcaagaaggcgagatgataggtcttctcgggccttccggctcgggtaaaaccaccctattgcggattattgctggccttgagggcgcagatagcggccaaatccatttcggtaatcgcgatgtgacccaagtgcatgtacgcgaccgcagagtcgggtttgttttccaaaactatgccctgttccgtcatatgacggtagccgataacgtcgcctttggactcgaagtcattccgaaaaaacagcgcccgtcaaaggccgaaatccaaaagcgcgtcagccatttactcgaaatggtgcaacttgggcacctagcacagcgttaccctgagcagctctcgggcggacaaaaacagcgtatcgccttggcccgcgccttagcgactcagcccgaagtactgttactcgatgagccctttggcgccctcgatgccaaggtgcgtaaagaactgcgccgctggttgcgcagccttcacgatgagctgaaattcactagcgtgtttgtaacccacgatcaggacgaagccttagagctttccgatagagtggtggtgatgagcaacggccatattgagcaggtcaatacccctattgagttgtatgcccaacccaatagccgctttgtgtttgatttcttaggtaacgtcaatcggtttgaggcaagctggcaacagaatcgttggaccaatggtgacgccttcttagtgcctcctgagcaagcgccactgcaacaaaacggcgcgctctatgtgcgtagccatgagctggcactggcggataaacccaatagccaagcccatatcccttttaccatagtggcgataacaccggttggcgcagaagtgcgtgtcgaactggcgcctatcggctggcagagtgaagaactgtgggaagccacctttacccaccaccatctgcaagaattagggctgcaaaaaggcagtgtggtctacgccaccccaagaacgggttatttctttgctgaacaaggtgatggttcgcctattcgtcaaagctggcccttcctgccaccgggcagcttagtcttcgatatttaat

SEQ ID NO: 274366 - DNA, 1033 bp, Unknown
  Bacterial polypeptide expressing nucleotide sequence isolated from the Sargasso Sea
atggcaaagataaaattcataaacgtagaaaaatcatttggtaataacaaagttattaaaaaatttaacttagaaattgatgatggtgaatttaccgttttagtgggtccttctggatgcggaaagtctaccgttttaagaatgatttcaggcctagagaaaatagataaaggcacaatacttttaaataaaaatattattaatgatttgttaccctcaaaaagagatatagcaatggtgtttcagtcttatgctttatacccacatatgaatgtttatgaaaatatgtcatttggattaaaaatggaaaagatctccaaaaacaatattcaaaagaaagtaaatcaagcagcaaagatactaaaaataaaacatcttttggatagaaaaccgggacagctatctggtggtcaaagacaaagggttgcaataggaagagcaatttctagaaatccaaaaatatttttatttgatgagcctctatcaaatttagatgcagcattgagatcagaaatgagagttgaaatttctaaattacataaaaaaataaaaacaaatatgatttacgttactcatgaccaggtagaggctatgactttggcagataaaatggttattttaaatgaaggtagaattgaacaagttggttcccctgatgagatatataatttccctaataacttgtttgttgcagaatttattggaacaccaaagatgaatattatcaaaattaataaatccaatattataaacaataatactttaaaaatttttggaagagaatatgagtttaaaaattataaatttagcaatgaaatatatttaggaattagaccagaacatatacatcctaatcataaacaagaaatacagtttaatataaatattgatcttatagagaatttgggctctgacaaaattatttacggtttattcaaagataacgaaattagaataagaacatcagaagagtttcctcaaaataatacaagtttttctttcaataaagacaaagtcgtattctttgatacaa

SEQ ID NO: 274367 - DNA, 1072 bp, Unknown
  Bacterial polypeptide expressing nucleotide sequence isolated from the Sargasso Sea
atggcattccttgagatagaaaatctgcataaggccttcggggcgaacacggcgctgcatcatttcgacatgaagatcgagcgcggcgaattcatcacgtttcttggaccgtccggttgcggcaagaccacggtgctgcggatgatcgccggtttcgaaacgccgacgcgcggcaccatccggctggataacaaggacgtgacgcatttgcgcacgcggcagcgcaaggtcggcatggtgtttcagtcgtatgcgctgtttccgaacatgaccgtggccgataacatcggtttcgggctgaagatcgcgcaccgtccgcaggcggagatcagcaagcgcgtcgaggagatgttgcaactgatcaagctgccgcacctgggtgcgcgctatccgtggcaactgtcgggcggtcagcagcagcgcgtggcgctggcgcgcgcgctcgccggcaagccccaggtgctgctgctcgacgaaccgctctccgcgctcgacgcgaagattcgcatttcgttgcggcaagacattcgggcgttgcagcgtgagttgggcatcacgtcgattttcgtcacgcacgatcaggaagaggcgctgtcgatttcggaccgcatcgtggtgatgaatgaggggcgcgtcgaacaggtcggttcgccctcggagatctacaactatccgcgcacgcgctttgtcgcgtcgtttgtcggcacattgaacattctcgcggggcatgtgatcgacccgaaatccggcaggatggccgtcgacggtcaggagctgaccactacgcaagcgttgccggcgggcgacgcgggcaagcaacgcatgctcgcgctacggcctgaagccatcgttctggaaccggccgcgccgggccgcaatacgctcagcgcaatcgtcgaagaagtgaattttctcggcgcggtggtgcgcatcagaacacgcgtgaaggatgcggtcatctcactcgatgtgttcaatgatccgaatcgcggcttgcccgaacgtggtcagccggtgtcgctgggtttctcgcacgaaaacctgttagtgctggaagagggcggcgcataga

SEQ ID NO: 274368 - DNA, 715 bp, Unknown
  Bacterial polypeptide expressing nucleotide sequence isolated from the Sargasso Sea
atggatataattcttgaactaaaaaatataaaacacagcttcacaagagataatgaagttttaaaagatgtttctctacaagtaaatcgaggagagataattacaatcttaggaccatctggatgcggcaaaactactttgctaagaattattgcaggtctagaagaacaatcagcaggaacagtatcgatagataatgaaattgtttcagggcatttaaatcatgtaaatactgaggaacgaaatattggattggttgttcaggaaagagcattgtttccacacctctcgattgtgaataatgtaaaatttggaataaaaggtacgaataaaaataatactgagagagctatgagtttattaaagttatttagtgttgagagatatgcaaaaaactatccacacgaaatatcaagtggtgaacaacaaagggttgcattggcaagagctatggcgccaaatccaaaaattttgttaatggatgaaccttttggagctttggataaggaattaaaagtaagattgagatctgaaacaaataaaattcttcgtgataacctcactacaactatcattgtttctcacgatactgaagacgcgctagcaatgtctgatagagttttaatcatgaaagatggtaattttattcaaaacggcaaacctgaagatgtcatctctataagttcaaccgcatctcaaaaaaaccttatttaat

SEQ ID NO: 274369 - DNA, 1093 bp, Unknown
  Bacterial polypeptide expressing nucleotide sequence isolated from the Sargasso Sea
catggcaccttatctgagcgcagaacgcatcgagaagcggtacaacgacacgcaggtcctgaccgacatcaacctgagcgtgatgaagggcgaaatgatctgcttcctggggccgtccggctgcgggaagaccacgctgctgcggatcatcgcagggctcgagacgcagaacgccggccacatcatgcaggacggccgcgacatctcgcggctgccgccgcaactgcgcgactacggcatcgtgttccagtcgtacgcgctgttcccgaacctcacggtgtacgacaacgtcgcgtacgggctcgtgaaccgcaggatgaagcgcgacgcgatccacgagcgcgtgcacacgctgctcgcactggtcggcctgcccgacagccatcgcaagcatccgggccagctgtccggcggccagcagcagcgcatcgcactggcgcgcgcgctcgcctcctcccccggcctgctgctgctcgacgagccgctgtcggcgctcgatgcgcgggtgcgcgtgcggctgcgccaggagatccgcgcgctgcagcagcggctcggcgtgacgacgatcatggtcacgcacgaccaggaagaggcgctgtcgatggccgaccgcatcgtcgtgatgaaccacggcgtgatcgagcagatcggcacgccgctcgaaatctaccggcagcccgcgtcgccgttcgtcgcggacttcatcggccgcgtgaacacgattccggccgaagtcgcgcaggacggcacgctgcgcgcaggcgcggtcgggctcgactgccgccacggtgcggcccgccccacgcaaggcgcggcggtatcggtctacgtgcggcccgaggacctgcgcatccgcgtgccgggcgagacggccgacaacgtgctggccggccgcgtcgagaagctcgaattcctcggcgcgttctgccgcgtgagcttccggatcgacgggctcgacggccaggagatcgtcgccgacctgtcgtatcacgacgtcgaccgcaccggcgtgcaggccggcgcgcgcatcgacctcgcgctcgatcgcgagcatgtccgcgtgttcccgagcgcgaaggagcgactgcaatga

SEQ ID NO: 274370 - DNA, 1072 bp, Unknown
  Bacterial polypeptide expressing nucleotide sequence isolated from the Sargasso Sea
aatggccgaagtaagcattgccaatgttagaaaagtttatggctcaacagaggtaattcatgatcttagtataaaagttgatgatggagaatttgtcgttctcgttgggccgtcaggctgtggaaaatcaactttattgaggatggtcgctggactggaaagtatcactgcaggaaatattagtatcggagggaaaactgtcaacaatctgcctccatcagagcgcgatatagccatggttttccaaaactatgcgttataccctcataaaacagtcgaagcaaatatggccttttctctaaaaatgcgaaagctagatcgaacgttgattaaggaaaaagtcgatgtagcagctgaggttttagggctcactccttacctaaaaagatatcctcgtgccttatctggaggccaaagacaaagagtagcaatgggccgggcgatcgtcagagatccccaggtttttctatttgatgagcccttgtcaaatttagatgctaagcttcgtgttcaaatgcgtgccgaaatcagggaactacatcaaagactaaaatctacaacggtatatgtaactcatgaccagattgaagccatgacaatggccgacaagattgttgttatgcaagatggctatattgaacaaattggtacgcctttggagctttatgaccgaccaagcaacgtttttgttgctggtttcattggatcccctgccatgaatttaattcctggcgttgctaaaaaatcaggcagcaatttttctgctgaaatatatggaggcaaattgcccttaccaaaaattaaaaacttagcagatggacaagaattattaatcggtgtccgcccagaacagttaattccaggtaaaactgggatagccgcgacagtttcagtagtggaaccaacaggctcagaaacacacctgatcgtcaggagtggagatcaagaccttatatctgtcatccgtgatagaagtagctttagtgtgggagaaacgataaatctttctgcggaaaaaagctttttgcatgtatttgatgcaaaaacatctgagagattgaatgatgattaa

SEQ ID NO: 274371 - DNA, 1054 bp, Unknown
  Bacterial polypeptide expressing nucleotide sequence isolated from the Sargasso Sea
aatggcaaaagtaagcttacaaggtgtctcaaaattttacggaaaggttcaagcagtaaaaaaaattgatctagaaattattgataaagaatttttagttctagttggaccatcgggttgtggaaaatcatcttctctaagaatgattgcaggattagaggaaatagatgagggtattatcaaaattggtgacaaagaaatgaataatctagaacctagagaaagaaatgtttcgatggtatttcaaaactatgctctttatcctcatatgacagtagaagaaaacttaggattttcactaaagattgcaggacttgctaaaaaagaaattgaagaaagagtacacgaggctgcaggaattttagatataactgaatttttacaaagaaaaccatcgcaattatcaggtggtcaaagacaaagagttgcaatgggaagagcaattgtaagaagaccagatgtttttttatttgatgaacctttatctaatttagatgcaaaattaagaaatcaaatgaggacagaaattaaaagattacatcaaaaagtatcaacaacaattgtctacgttacgcacgatcaagttgaagcaatgactttagctgatcgaattgtaataatgaaagatggtataatagaacaaataggaacaccattagatctatttgagagaccggctacaaaatttgtagccacttttattggatctccttccatgaatatgattaaggcttcaatagtgaaacagaataatgaattatctatgaagacaaacgatggaattatagtaccagtacccaaagataaacaaaattctgtaagtgaaggtcaaaatatttcttttggatttagagctgaagatatagtgccactaaaatttggacaaaaaccatctagtgcttgggaaatgcaatcatcagttaatttagctgaaccacttggaacagaaactttgatttttacaaactttggtgaaatagaaatagttagtagaatgtttactcctgaacaagttaaatcaaatgatgttttagattttgctttaaatttagat

SEQ ID NO: 274372 - DNA, 1114 bp, Unknown
  Bacterial polypeptide expressing nucleotide sequence isolated from the Sargasso Sea
catgccggccccgccggcgccgtttcgtcgaaatcgtaaagaggcaaccagaatgggtatcaccgtccgtaaccttcagaagcgcttcggcgatttcacggcgctcgacaacgtatcgctcgactttccgcccggcgagctggtcgcgctgctcgggccgtcaggctgcggcaagaccacgctgctgcgcgtgatcgcgggcctcgagcacgcggacgccggccaggtcgtgctgcaggggctcgacgtcgcatcggtcggcgcacgcgaccgccaggtcggtttcgtgttccagcactacgcgctgttccgccatatgacggtgttcgagaacgtcgcgttcgggctgcgcgtgaagccgcgccgcgagcggccgtcggaagccgcgatccgcgagaaggtgcacgaattgctgaagctcgtgcagctcgactggctcgcgcagcgctacccgtccgagctgtcgggcgggcagcgccagcgcatcgcgctcgcccgcgcgctcgcggtcgagccgaaggtactgctgctcgacgagccgttcggcgcgctcgacgcgaaggtccgcaaggagctgcgcggctggctgcgtcgcctgcacgacgacctgcacatctcgacgatcttcgtcacgcacgaccaggaagaggcgctcgaagtggccgatcgcatcgtcgtgctgaaccgcggccacgtcgagcaggtcggcagcccgcaggacgtctacgatcatccgcagagcgcgttcgtctacgagttcctcggtgcggccaaccggctgccgggcacggtcgccgggcgcggcttcgtcgccgagggggcggccgcgccgatcgaggtcgacgccgatttcgcaggccctgcgaacgcctatgtgcggccgcacgacctgcagctgtggccggtcggcgaagaagggcaccgcgacggcatcgcggtggacgtgcgccgcgtgatcccgctcggcggctcggtgcgcgtggagctcgaggcgcgtgcaggcggcgcgctcgaggcggaactcgatcgcgatgcgtggcgtgcgctgtcgctgcaggtcggcgatggggcgaccgccgtgccgcgcgccgtgcgggtgtttcccgcgcgttga

SEQ ID NO: 274373 - DNA, 1069 bp, Unknown
  Bacterial polypeptide expressing nucleotide sequence isolated from the Sargasso Sea
catgagcattcaggtacaaggactcaacaagcatttcaaccagtacgcggcgctggccgacatcaacctcgactttcacgacggtgagctggtggcgctgctcggcccctccggctgcggcaagaccacgttgctgcggatcatcgccgggctggagcaggccgacagcggcagcgtgatcatccgcggcgaggatgcctcggatctgcacgtacgcgagcgcaacgtcggcttcgtgttccagcactacgccctgtttcgtcatatgacggtgttcgagaacgtggcgtttggccttagggtcaagccgcgcagcgagcgaccggccgaggcggcgatccgcgcccgggtcaaggagctgctggatctggtgcagctcagccacgtggccgcgcgctacccgacccagctctccggcggccagcgtcagcgggtcgcgctggcccgcgcgctggcggtgcagcccaaggtgctgctgttggacgagcccttcggcgccctcgacgcccaggtgcgcaaggagctgcgccgctggttgcgcgagctgcacgacgagctgcatgtcaccagcctgttcgtcacccacgatcaggaggaggcactggaggtggcggatcgggtggtgctgatgaacgccggcaaggtcgagcagatcggcaccccggccgaggtctacgaccagcccgccagctccttcgtgcacagcttcctcggcagcgtgaacctgtttcgcggccgggtggccgggcaggggctcggcatcggcgagcagctgctgggcgggcccatcagctcccagctggcggagggcagcgcggccgtcgcctatgtgcgtccccacgagctggagatactgccggcggatgcgccgggcggcatcagcgccaccatcacccgcctgctgcccatggggccgcgcatccgggtggaactgcgtggtaatggggatacaaacggtgcacacttcgaagccgagctgagcaaggaggcggcccgcgccttcagcccgggccagggggtgcggctggtggccaagcaggcccagctctacccggattaccagatttga

SEQ ID NO: 274374 - DNA, 463 bp, Unknown
  Bacterial polypeptide expressing nucleotide sequence isolated from the Sargasso Sea
atgagtatcgaaatccgcaacgtcagcaagaacttcaatgcgttcaaggcgctgaacgagatcaacctgaacatccagagcggcgaactggtcgccctgctcggcccgtccggctgcggcaagaccaccctgctgcgcatcatcgccggcctggaaaccccggacagcggcaccatcgagttccacggcgaggacgtctccaaccacgacgtgcgtgatcgcaacgtcggcttcgtgttccagcactacgcgctgttccgccacatgacggtgttcgacaacgtcgccttcggcctgcgcatgaagcccaagggtcagcgcccgagcgaagaggtgatcaagcgcaaggtccacgaactgctcgacctggtgcagctcgactggctcggcgatcgctacccggaacagctctccggcggtcagcgccagcgtattgccctggctcgcgccctggcggggagcc

SEQ ID NO: 274375 - DNA, 1108 bp, Unknown
  Bacterial polypeptide expressing nucleotide sequence isolated from the Sargasso Sea
atgaagtccgatgatgtgatcgtcagctttcgcggcgtgcggaagacctacgacggcgaaacgctggtcgtcaaatcgctcgacctcgatatccaccgcggggaattcctgacgctgctcgggccgtccggctcgggaaagaccacctgcctgatgatgctggccggcttcgaattcccgaccggcggcgagatccgcctcgacggcgagttgctgaacaacgtgccgccgcacaagcgcaacatcggcatggtgttccagaactacgcgctgtttccgcacctgacggtcgagcagaacgtcgcgtacccgctgaccgtgcgcaagctgccggcgggcgagcgcgcggaacgcgtcgcgcatgcgctgaagatggtgcagatggagcgcttcgcgaaacgctacccggcgcagttgtcgggcggccagcagcagcgcatcgcgctggcgcgggcgctcgtgttcgagccgaagctggtgctgatggacgagccgctcggtgcgctcgacaagcagctgcgcgaacacatgcagtacgaactgaaggcgctgcacgaaaaactcggcgtgaccttcgtgtatgtgacgcacgaccagggcgaggcactgacgatgtccgatcgcgtcgccgtgttcgacaagggcatcgtgcagcagctcgacaccgtcgaccgcctgtacgaatcgccttgcaacgaattcgtcgcgaacttcatcggcgacagcaaccggctgcgcggcaccatcgcgcgcgtcgacggcgaattctgcgaattccggctcgacgacggcacgaaactcgtcggccgccgcatcggcgatgcagccgagggggcgccggccgtcgcgtgcatccgccccgaacgcatgagcctcgccgcgcacggcgcgaacgggcacgcgaacggcgcggctgccaaccagctgagcggcgaggcgcgcagcctcatctatttcggcgaccacgtgcgcatgcgttgcgcgctgcccggccaggacgaatgcttcgtgaaggtgccgctcggtaccggcgcgctcgatgcgttctcgcccggcgcaccggtcgcgctcgcgttctcgcccgaacacctgcgcgtgttcgcatgag

SEQ ID NO: 274376 - DNA, 1132 bp, Unknown
  Bacterial polypeptide expressing nucleotide sequence isolated from the Sargasso Sea
atgagtattcgtttaactaatatttccaaaaaatttggccaatttcaggcgctctcgccgctcaatttggatattcaagaaggcgagatgataggtcttctcggcccttccggctcgggtaaaaccaccctattgcggattattgccggccttgagggcgcagatagcggccaaatccatttcggcaatcgcgatgtgacccaagtgcatgtgcgcgatcgcagagtcgggtttgtgtttcaaaactacgccctgttccgccatatgacggtcgccgacaacgtcgcctttgggctcgaagtcattccgaaaaaacagcgcccgtctaaggccgaaatccaaaagcgcgtcagccatttactcgaaatggtgcaacttggccacctagcacagcgttaccctgagcagctctcgggcggacaaaaacagcgtatcgccttggcccgcgccttagcgactcagcccgaagtactgttactggatgagccctttggcgccctcgatgccaaggtgcgtaaagaactgcgccgctggttgcgcagtcttcacgatgagctgaagttcacgagtgtgtttgtgacccacgatcaggacgaagccttagagctttccgatagagtggtggtgatgagcaacggcaatatcgagcaggtcaatactccgattgagttgtacgcccaacccaatagccgctttgtgtttgattttttaggtaacgtcaatcgatttgaggcgagctggcaacagaatcgttggactaatggtgacgccttcttagtgccaccggagcaaacgccactgcaacaacacggcgcgctctatgtgcgtagccatgagctagcgctggcggataaacccaacagccaagcccatattccctttaccatagtggcaataacaccagttggcgcagaagtgcgcgtcgaactggcgcctatcggctggcagagtgaagaactgtgggaagccacctttacccaccatcatctgcaagaattaggactgcaaaaaggcagtgtggtctacgccaccccaagaacggcttatttctttggtgaacaaactgatggctcgcctattcgtcaaagctggcccttcctcccgccgggcagcttggccttcgatatttaat

SEQ ID NO: 274377 - DNA, 771 bp, Unknown
  Bacterial polypeptide expressing nucleotide sequence isolated from the Sargasso Sea
tgcgcaatgcggcgaagattctgcacatcgaccatctgctcgatcgcaagccgaagcagctctcgggcggtcagcgtcagcgggttgccatcggccgcgcgattacgcgcaagccgaaagtgttcctgttcgacgaacccttgtcgaacctggacgccgcgctgcgcgtaaaaatgcgcctcgaattcgcgcgtctgcacgacgagctgaagaccacgatgatctacgtgacgcacgatcaggtcgaagccatgacgctggccgacaaaatcgtcgtgctgtcggcgggcaatgtggagcaggtcggcagcccgaccatgctgtatcacgcgccggccaatcgcttcgtcgccggttttatcggttcgccgaagatgaatttcatggaaggagtggtgcagtcggtgacgcatgatggcgtcacggtgcgctacgaaaccggcgagacgcagcgtgtcgcggtggagccgggcgcggtgaagcagggcgacaaggtcaccgtcggcattcgtccggagcacttgcacgtgggcatggccgacgacggtgtgtcggcgaaaaccatggcggtcgaatcgctgggtgacgcagcgtatctgtatgcggaatcgagcgtggcgccggacggcctgatcgcgcggattccgccgctcgagcgccacagcaagggcgaaacgcaacggctcggcgcgacgcccgagcactgccatctgttcgacagcgaaggcaaagccttccagcgcaagatcgtcgaagtgctggctgcgtgag

SEQ ID NO: 274378 - DNA, 802 bp, Unknown
  Bacterial polypeptide expressing nucleotide sequence isolated from the Sargasso Sea
atggcagatttaacaataaataatgtaaataagttttatgataaaacacaagtattatttgatgtaagtttatcaattaaagatggagaatttatagtacttgttgggccttctggctgtggtaaatcaacacttcttcgaatgattgctggattagaggatatcaatagtggagaaatttcgttaggaaataaagtaatcaatcaattagctccaagagatagagatgtttcaatggtatttcaaaactacgctctttatcctcatttatcagttgctaaaaatattggttttagtttacgtatgcgtaaagttgaaaaatccattattgataaaaaagtggcagatgctgcagaaatgttaggccttactcatttattatcacgtctacctcgtaatttatcgggaggagaaagacaacgtgttgcaatgggaagagctatagttcgtgatccagaagtatttttatttgatgagccgctatcaaacttagatgctaaattaagagttatgatgagaaatcaaataaaagaaattcattatgaagttaaaacaacaactgtttatgttacacatgatcaaattgaagctatgacaatggcagataaaattgttgtactaaatggaggcattgttgagcaggtaggatcaccagatgaattatacgataatccaagcaatacatttgttgctagttttattggttctccttccatgaatcaaattcatggtaaagttgtttctgaaaaaggaaaaaaatattttcagtcaaaagataattcattatttttactacctgaaa

SEQ ID NO: 274379 - DNA, 928 bp, Unknown
  Bacterial polypeptide expressing nucleotide sequence isolated from the Sargasso Sea
aatggctgaagtaaaacttaaaaatataacaaaaaaatatggtgatgtgttagccgtaaaaaatatgagtttaagtattcctcataatgaatttcttgttttagttgggccttcaggatgtggaaaatcaacaacgttaagaatgattgctggtttagaagaaatttcaggtggagaaatctatattggagatcaagttgttaatgaaaaagatccaaaagatagaaatatttcaatggtttttcaaaattatgctctttacccacatatgactgtagaagaaaatttaggatttagtcttaaaatagcaaaagaagaaaaaaacgaaattgaaattagagttaaagaggcggttcagattttaggattagaagaattacgcaaaagaaaaccatcccaactctcaggcggtcaaagacaaagagttgcaatgggtagagcaattgtaagaagacctgacgcgtttttatttgatgaaccattatctaatcttgatgcaaaactaagaacacaaatgagaactgaaattaaaaaacttcatcaaaagttaaaaactacagttatttatgtaactcatgatcaagtagaagctatgactttagctgatcgtattgttataatgaaagatggagtgatagagcagataggcacaccattagatttatttgaaaagccatcaactaaatttgtagcaacttttattgggtcaccttcaatgaacatgattaaagcaacaattactaatcgatcagacaaactttttatgaaaacagatgatgatatatatgttccagcacctgaacataaaataaattctttgactgaaggacaaattatttcctttgggtttagagctgaagatattgttccattaaaatttggacaaaaaccttctaattcatggacgatgcattcaaaagttaacctg

SEQ ID NO: 274380 - DNA, 1057 bp, Unknown
  Bacterial polypeptide expressing nucleotide sequence isolated from the Sargasso Sea
tatggcaaagataaaatttataaatgtagaaaaatcatttggcaaaaacaaagttattaaaaaatttaatttagaaataaacgatggtgaatttactgttttagtggggccttctggatgtggaaagtctacccttttaagaatgatttcaggcctagaaaaaatagataaaggcacaatacttttaaataaaaacattattaatgatttgttaccctcaaaaagagatatggcaatggtgtttcagtcttatgctttatacccacatatgaatgtttatgaaaacatgtcatttggattaaaaatggaaaaaatatccaaaaacaatattcaaaagaaagtaaatcaagcagcaaagatactaaaaataaaacatcttttggatagaaaaccgggacagttatctggtggtcaaagacaaagggttgcaataggaagagcaatttctagaaatccaaaaatatttttatttgatgaacctttatcaaatttagatgcagcattgagatcagagatgagagttgaaatttctaaattacataaaaaaataaaaaccaatatgatttatgttactcatgaccaggtagaggccatgactttggcagataaaatggttattttaaatgaaggtagaattgaacaagttggttctcccgatgagatatataactttcctaataacttatttgttgcagaatttattggaacgccaaaaatgaatattatcaaaattgataaatctaatattataaacaatactactttaagaatttttggaaaagaatatgagtttaaaaattataaatttagcaatgaaatatatttaggaattagaccagagcatatacatcctaatcttaaacatgaaatagagtttaatattaatattgatctcatagagaatttgggttctgacaaaattatttacggtttattcaaagataacgaaataagaataaggacatcagaagacctttctcaaaataacacaggtttttctttcaataaaaataaaatcgtattcttcgatagtaaaaaaaataaacttaattattaa

SEQ ID NO: 274381 - DNA, 643 bp, Unknown
  Bacterial polypeptide expressing nucleotide sequence isolated from the Sargasso Sea
aagagggagaattttgtcattttgggtccttcaggatgcggtaaaacaaccttattaagaataattgctggacttgaaaaagaaaagaatggcagcatacaaataaacaatagaattgtttcagatcattttcacactttgcccactgagaagagagatattggattagttgttcaagaacgggcattatttcctcatatgtccattattaaaaatgtgatgtttgggattaaatttaataaagcaaaaaaacaagaaattgcgatgaatttattaagactatttgaagttgataaatatgcctataattttccaaatgaaatatctagtggagagcagcaaagagttgcaatcgcaagagcaatggctcccaatccaaaaattttattaatggacgaaccttttggaacacttgatcactctctcacgcatcaattaagaattgaaacaaaaaaagttctaaaagataataaaattacagctattatagtttcacatgactttgatgatgctatttcaatgtcagatagagtaattgtcattgaggaaggggttattaagcagcaaggcaccgcaaaagatataactaatatagtaagagaaaaatctatagatttcagtagcataagcgagaaatcttaat

SEQ ID NO: 274382 - DNA, 1093 bp, Unknown
  Bacterial polypeptide expressing nucleotide sequence isolated from the Sargasso Sea
atgtcggattacctgcgcatcgaagggattcacaagcagttcggttcgaccccggttctgaaggatgtcaatctgacaatcttcaagggggaaatggtctgttttctgggcccttcgggttgtggcaagaccaccttgctacggatcatcgcgggtctggagacgcaaagcgcgggcaccatcgcgcaggccggcaaggacatttcgatgctgccgcccatgctgcgcgactacggcatcgtgtttcagtcgtacgcgctgtttccgaatctcacggtcaacgagaacgtcgcctatggtctgacgaaccggaaagtgcgcaaagcggtgatccgcgagcgtgtggccgaactgctcgcgctcgtcggtctgcccgatagcggcccaaaacatcccggtcaactgtccggcggccagcagcagcgcatcgctctcgcgcgggcgctggctacttcgcccggtctgttgttgctcgacgaacctctgtctgcgctcgatgcgcgggtgcgggttcgtttgcgtcaggagatccgccagctgcaacagcgtctcggggtgacgacgatcatggtgacgcacgatcaggaggaggcgctttcgatggccgaccgcatcgtggtgatgaatcacggcgtgatcgagcaaatcggcacaccgaccgagatttatcgcgagcccgcaacgccgttcgttgccgactttgtcggcaaggccaacattctgccggccaccgtgagtgcgaacggcgcgatccaggtgggtgatgtcggcctgaactgcgtgaaggtgagcgagtcgctcaagggcggttcgcgagtgtcgctgttcctgcgtccggaggatctcgtcgtgcggggtgtcgacacgaaagccggcaacacgctgagtggccgtatcgggaagctggaatttctgggagcattctgccgggtcagcgttcaggtggacggcatgcccgggaccgaagtactggccgacctgtcgtatcacgatatgactgaattcgacctgcaggaaggctcggtgcttaatctcgctgtcctcggcaaccgcgtgcggatcttcggtgaagaccagcggagggtgcaatgag

SEQ ID NO: 274383 - DNA, 1033 bp, Unknown
  Bacterial polypeptide expressing nucleotide sequence isolated from the Sargasso Sea
catgaaactcgattccactcccatcaccctgacccgctgcgcgaagacgttccgcggcacgcgcgtgctcgaaccgctcgacctgtcgatcggcgcgggcgaaacgctcgtgctgctcgggccgtcgggctgcggcaagaccacgacgctgcgcctgatcgcgggcctcgacacgccggacgccggcggcacgatcgcgttcggcaacgacgacgtcaccgcgctgccgatcgagcgccggcaggtcggcatggtgttccagaactacgcgctgtttccgaacctgacggtgcgcggcaatgtcggctacgggctgaagatccgcaagaccgagccgcgcgcgctgcgcgagcgtgtcgacgagctgctcgcgatgatgcggctcgacgcgcacgcggacaaaccgatcgaccagctgtcgggcggccagcgccagcgcgtcgcactggcccgcgccctggcggtgcggccgcgcgtgctgctgctcgacgagccgctgaccgcgctcgacgcgaagctgcgcgacacgctgcgtcgcgagatgaatacgctgctgcgcgaactaggtgtgacgacggtctacgtgacgcacgaccaggccgaggcgatggagctcggcgaccggatcgtcgtgatgggcgcaggccgcatcgagcagatcggcacgccgcgcgacatctactaccatccggcgaatcgcacggtcgcgcagttcatcggcacgctgaaccggctcgccgggcaatggcgcgacggcacgctggtgaccacgggcggcgcgatcgcgacgccgcacgccgccgacgagtggttctttcgccccgaggatgcacaactcgccgatcccgcgcatgcgccgctgcgcggtgccgtgagtgcgtgcgcgttcctcggcgagcgcacgcggctcacgatcgagcacgcggcacccgatgcgctcgtgatcgacgtgccgggccgcatcgcgcttgcacgcggcacggcggtcggcctcacggtcgcgccggaaggcctgatcgcgctcggcgcctga

SEQ ID NO: 274384 - DNA, 682 bp, Unknown
  Bacterial polypeptide expressing nucleotide sequence isolated from the Sargasso Sea
aatgaataactttatagaaatcataaatttaaaaaaagtatttaacatatcaagcaataataaattattactatttaaaaatttaaattttaatattcctaggaatagtattacttctataataggcccatctggatgtggaaaatctactttactaaacatactaggtctactagattctagttttggtggagagtatttttttgatagtatttcaataaataaaattaataataaaaaattaaataaaattaggaatcaaaaaattggttttgtgcatcagttttttcatttaatcccagaattaagtgtagtggaaaacataatattgcccgcattagtgcaaaaagataaaatttctgacataattaaagatgctgataacttgttaaaagtttttgaaatttttgataaaaaaaatatgaaacctaataagttatcagggggagaacaacaaagagtagctattgcgagatcacttataaataaaccagatttgattttagctgacgaaatgactggtaacttagatgaaaacacatctgatgaaataattaatttttttttaaattttgtagcgaatcataatatatctttaatttatgtaacgcacaatcaaagatatgctgatatggctgaaacaaaatataagcttgaaaataaaaatttagttttaaaatga

SEQ ID NO: 274385 - DNA, 178 bp, Unknown
  Bacterial polypeptide expressing nucleotide sequence isolated from the Sargasso Sea
aaaaaaattatactatcattggttgtaacacataatatgcaacaagcagcaagagtatctcaaaaaacagctttttttcatttaggacatttgatagagtttgggaatacagaagagattttcacttcacctaatgaaataaaaacacaagattatataacaggaagatttggataaa

SEQ ID NO: 274386 - DNA, 522 bp, Unknown
  Bacterial polypeptide expressing nucleotide sequence isolated from the Sargasso Sea
aatgaataaattaattgaaataagtaatttaaaaaaaatatacaatctgtcaaataaagataaattattattaattgataatctaaatttaactatttctaaaaatagcattacttcaataatagggccgtccggatgtggaaaatccactttgcttaatattttaggtcttctagattcaaacttttatggcaactatttttttgaaagtaaatctattaaagaaattagcagtaaaaatttgagtaatataagaaacagaaaaataggttttgtgcatcagttctttcacttgatccctgaattaactgttctagaaaatgtaatattacctgctctagttcaaagtaataatatatcagatataaataatgatgcttacaaattattagaaatgtttgaaattattgataaaaaaaatatgaaaccaaataaattatcgggaggagagcaacaacgtgttgctatagctcgatctcttataaacaagccaaatttaatattggcagatgaaatgactgg

SEQ ID NO: 274387 - DNA, 727 bp, Unknown
  Bacterial polypeptide expressing nucleotide sequence isolated from the Sargasso Sea
tatgctgaaccttggaaatccaaaattagatttaaatggttttgatgcatttgcaaaagttagaattttgtctgccttggcttttaacagcaaaatatcaaataaaaaatgtttaatggaaggaatagaaaagattgatttaaaagatattaaaattgcaaatcaattagatttaagtattaaattattgggtatctctgaacttaaaaataatcaactttttgaaactgttcatccatgccttgtaagtaaaaaatcatatatcggtaatgtaaatggagttatgaatgcagtgatccttaatggtaagcctgtaggtgaaagtgtattgcaaggggagggtgctggtccaggtcctacttcatcatcattattatctgacttattatcgattttgagaggaaatatcaaaaaaccatttggtgtaagtgtaaataaactaaaaacttttaaaacttacaatgtaaacaattatgttaattccttatatttaagatttgaagttaaagatagaccaggtgttttgtcccaaataactaatcgtttagccaaatataaaatttctgtaaaaaggttaattcaaactccagataaaaaaaataataaagctacaatagtaatagttacacataaaactacagaattaaattgtaatagttgtttatctatatttaaaaaaaataagaatatcttaaaatcgcccacgataattagattgcttgattaa

SEQ ID NO: 274388 - DNA, 280 bp, Unknown
  Bacterial polypeptide expressing nucleotide sequence isolated from the Sargasso Sea
atgtctaaaaatccagaattcgttaaattcgataaagtagataaaagttatgacggtaaagttcttgtagtgaaagatctacagctagatattgctgaaggtgaatttataactatgcttggtccatctggttcaggtaaaacaacatgtctaatgatgttagctggatttgaaactccaactcatggcgaaatattattagatggaaatataatttctaatattccacctcataaaagaggaattggaatggtctttcaaaactatgcgttatttcctc

SEQ ID NO: 274389 - DNA, 614 bp, Unknown
  Bacterial polypeptide expressing nucleotide sequence isolated from the Sargasso Sea
aatgcaagcggttcgaccattaccggctgcgggtaaaaaaactaaattaaataatacagataaagtgatagaaattaagggtgtttctgcaggttatggtggagatgtaatgtcaaaaccaaaagaggtaattttgaaagatataaatctaaaactatctagaggtgaagttcttggagttataggtgaatctggatctgggaaatctacactcgcaagagtaattgctggtttgttgccctcttttaaaggtgaaattctcttagacggacaacaattaaagccaaggcttgaagatagaccaagatctgaactaagaaaaattcagtttgtttatcagatggctgatactgctataaaccccaaacaaactattgggaatattttaggaagacccttagagttttatctaaatatgtatgggcaaaagcaaaaagatagagttttagaattattagatatggtcgagctaccaaaggaatttttcactaggtatccacatgaattgtcgggaggtcaaaaacaaaggataaacttagctagggcgctagcagccgaaccagaggttttattgtgtgacgaagtaacatctgctcttgatagtattgtcggtg

SEQ ID NO: 274390 - DNA, 754 bp, Unknown
  Bacterial polypeptide expressing nucleotide sequence isolated from the Sargasso Sea
gcgatccacgtcgacgggcaggtgagctctcgttcatgggacgtgaggctggatgtcgagcccggcgaggttgtcgccgtcatggggcctaacggggcggggaagtcgacccttgcgagtgtcgtgactggattgcttgccttggatcgtggccgggtgtgcatcggtcggcagcttgttgacgccggggatggtcgcatcgtgctgcctggacgccgcggagttggtttgctcacccaggacgcgctcatcttcgagcacatgtcggtgctcgataacgttgcctacggtccacggtgtcatggcttaagtcgagcacaggcgcagaaggtggcctatgcccaactcgctgcggtgggatgcgctcaccttgctgcacgtcgcggtggagaactttcgggtggccaggcagcgctagtaggtctggctcgggcattcgccgtcgaaccggccgttctggtactcgacgagcccactgccgcacttgacattgacgctcagatacgagtgcgcgacctgctgaagtctcagttggatcgcaccaatatgacggctctgatcatcacccacgacgtcgccgacacgatgagggtggccggacgattagttgttctggagcacggccggatcatcgaggatggcgttgtgtcccagttacttgagaacccgaaaacggcttttacggctcagctcgccgcattagtgaagttcgaggtcaggactaactcacagggcgcggagtcttcctcgtgat

SEQ ID NO: 274391 - DNA, 427 bp, Unknown
  Bacterial polypeptide expressing nucleotide sequence isolated from the Sargasso Sea
aatgaattcggaacagcccatcgtttccctgaaagacgttcacaaatccttcggtgatctcgaggtgttgaaggggatcagtttcgatgtaaaaaaaggcgaagtgatctgcatcatcgggccttccggttccggcaaatcgaccctcatccgctgcatcaacgctctcaatgacatcaattcgggttcgatcaaggttcatggaagggaggtccacgatcccaagcttgacaagcttgaactccggaaaaaagtaggcatggtttttcagcagttcaaccttttcccgcacaagactgccctggaaaacgtgatgatggctccggttctggtactcaagcaaaataaagaagaggttcggaaacgtgcagaggatctgatccgtaaagtccgtctgcagggcaaggaagacagttacccggggtga

SEQ ID NO: 274392 - DNA, 745 bp, Unknown
  Bacterial polypeptide expressing nucleotide sequence isolated from the Sargasso Sea
ttttcaagttttaaaaatataaatattaaaaatattgcttttaattataaaaatagttcagataccactttaaaaaatttatcttttcaaattaaaagaggtgaaaaaattggtattactggaccaagtggttctggcaaaacaacactcattcatattcttttaggtttaataaaacaatcttctggagaaataaaaatagatgacgaaattttggctaaaaataatttaacacaatggcaaaaattattaggttttgttccccaaagtgtatttcttacatcaaaatcaattaaagaaaatatagcatttggagtggaaaaagatcaaatagacaaaaataaaataaaaaaactaatagatttttctcaattgaccgaaatagtttctactttaccagaaaaagaaaattcaaaaattggagaaagaggaataaaattatctgggggtcagcaacaaagattaggtatagcaagggctttttatccagatccaaagattgttttttttgatgaagcgacaaattctctcgatgtattaaccgagaatgaaattatgaattcattaaacaatttagacaaagatattaccgttataatgatagcccacaggttagatgtaataaaaaaatttgataaaataatttatttaaataaaggtaaaattgacgggtttgggacctttgatgaacttttaaaaaataatttaaactttaagaaactggttgaagcaaaaaatctatgaa

SEQ ID NO: 274393 - DNA, 567 bp, Unknown
  Bacterial polypeptide expressing nucleotide sequence isolated from the Sargasso Sea
aatgatcgaaataaaaaattgttttaaatcatatagtaaggaagcattgtttagtaacctttcattaaaggtaagtgaaggtgaaagaatagcaatcattgggccatccgggtgcggtaagagtaccatattaaagtacttattaggaattgctcagccagatagtggttcgattatagttgatggcattaatttaaataacatttctaaatcagagttaatgcaggtgcgaatgaaaattggcatgttatttcaatcggccgctttatttgattcgttaacaatatctgaaaatattgcctttccattaatcgaaagttatggtcgaaagttaaatgaaacaacaagcgatgtcaatcgggtattggatcttgttgggctggctggatttaatgaaaagtatccatatcagttatcgggagggcaacaaaaaagagttgggttagcacgagccattgtaacgaatccgaaatatattttttacgatgaaccaacaactgggttggatcctatgatgtccaaaacaattgaagatgtaatggttcgtttaaatagcgtgatgaatat

SEQ ID NO: 274394 - DNA, 697 bp, Unknown
  Bacterial polypeptide expressing nucleotide sequence isolated from the Sargasso Sea
atggcggatattcttgaaatcaaaaacgtctccatgacgtacaacgccgacagcgacaatccggtgaatgcgctggatggggtagatttgaacgtcgccgaaggtgagttcgtatccgtgatcgggccgtccggttgcggtaaatcgaccctcttcaacatcatcggcggactgatcaacgatcacgacggcgaagtacttatcgatgaccgacccgtcgatggcgcgcacaaagacgtaggcgttgtgttccaggaagaatctacatttccgtggcgtacgacgcttgacaatgttggctttccgcttgaggtcgagggcgtcgagaaggccgagcggcaagaaaccgcgcgaaagttcatcaagttggtggggctggagggtttcgaaaaccattatcccgcgcaattatccggcgggatgaaacagcggaccgccgttgcgcggacgctggcctatgagccgcggattatgctgttggatgaacccttcggtgcgcttgacgaacagaccagaatgttgctgggcgacaagatgctggaaatctggtctgagttgaaccagaccatgctgctgatcacccataacattaccgaggcggtacagctttcggacagggtggtcgtcatgtcgttccggccgggggtcatcaaggagatcattgacatagaattgcctcggccgcggtcgtcggagg

SEQ ID NO: 274395 - DNA, 712 bp, Unknown
  Bacterial polypeptide expressing nucleotide sequence isolated from the Sargasso Sea
aataaccaagtagcagttgatacattgtatgaagagtttcaatttatcaatacattttcaaaaaatactttacaacaaaatgagtcatataattttgacaaaagtataaatgttaaaattgactatcatcaatttcttaactcaaaaaagaaaattttagaaaatataaatttcgatataaaaaaaaatacgttatttggtataaacggtctaaatggaactggaaaaacaactctgtctaattttattttaggtttaattaaacctacttcaggaaaaattctattggatgataaatataatattaaacagtttgaaaataattatagaaaaattttgagttttgttccacagaacacttttttatttgaaggttctatttatgataatatagtttttggggagacatatgatgatgaagaaaaactaaagaatgaaaaaaaagtagagcaaataattaatagttctaaaatatttcaatttattagtaatttagataagaagatgcacacggaaataaaagaaaatgcaacaaatctctcaggaggtcaaaaacagtgcgtatcaatagccagagcactttactacaatccaaagatactaatattagatgagccaacaaattctctagataaagatatcaaattagaattttttgatttgatttcttcacttaaaaacaatattacaatcattgccattacacatgatc

SEQ ID NO: 274396 - DNA, 922 bp, Unknown
  Bacterial polypeptide expressing nucleotide sequence isolated from the Sargasso Sea
gcctgtttggtgggcgcggcgtcatcctgggcacgctggtggaggcgctgattgtgggcgtgttccgcaacgggctcacgctgatgggcgtgtcgtcggtgtaccagatcctcgtcaccggcatccttgtgatcctggccgtggccaccgaccaactctcgcgcaaaggagtgcgttgatcatgaccaactccacccacacaacgaaagctccactggtgatgcaggccaagggcctggtcaagcgctacgggcaggtcactgcgctcgacggcgctgactttgaactgcgcgctggcgagatcctggccgtgatcggcgacaacggtgcgggcaagtccagcctgatcaaggcgctgtccggcgccaccgtgccggatgagggcgagatcctgctcgacggccagcgcatccaattcaaaagccctatcgacgcacgccgtgcgggcatcgaaaccgtctaccaggacctggctgttgccccggccatgaccattgccgaaaacctgttcctcggacgcgagctgcgccgcccgggcctcttgggcagcgcgctgcgtatgctcgacaagaaaaagatgctcgaagaaagcgtggcccgcatggccgagctgaaggtgggcatccgctccatgacgcaggcggtggagaccctctccggcggccagcgccagtgcgtggccgtggcgcgtgcagcagcgtttgcgcgccacgtggtcatcatggacgagcccaccgccgccctcggcgtgaaggaaggcaacatggtgctggagctgatccgccgcgtgcgcgacaagggcctgcccgtcatcctcatcagccacaacatgccccatgtgttcgagattgccgaccgcatccacatcgcccgcctgggcaagcgtgcggccgtggtcaaccccaaaaagatcagcatgagc

SEQ ID NO: 274397 - DNA, 188 bp, Unknown
  Bacterial polypeptide expressing nucleotide sequence isolated from the Sargasso Sea
gatggatgctggagaactcgttttcgatatcaaaggtctaggtgtttcttatggggacttccgggctgtgcgtgacgtcgactttccgatccgcagcaatgagatcacagccatgatcggaccatctggctgcgggcagtcgacggtccttcgctgtctcaaccgaatgaatgacctaatcgatacgg

SEQ ID NO: 274398 - DNA, 436 bp, Unknown
  Bacterial polypeptide expressing nucleotide sequence isolated from the Sargasso Sea
atgactatttattctaaaagtggagataaaatatattctattactagtccaaattcaatttatgacaatattgaattaagatttgaactaaaaaaacctatcattaacattatcagtggtgaagaaactaaatatattattagttcagaagaatctacactttcagacaacaataaactcctgaaattgaaaggaaatgttaaattaaaaacccttaaaaaagatcaggatattttatatgctgataattttatttggaatatagaaaagactaactatctattagaaggtaatattagatttgaaaatcaaaatatcattttaaattcaggaaaagccatattggacaaagacaacataattgaatttttttatccagtaaaatatataattaaagatgaaaataacgaaaataaatatgaaataaattcagaaa

SEQ ID NO: 274399 - DNA, 346 bp, Unknown
  Bacterial polypeptide expressing nucleotide sequence isolated from the Sargasso Sea
atgactgttgccatccgcgccaccgacctggtgaagagctacacccctggggtgagggctctggatcaggtgagcctggaggtgagcagcggtgaggtgctggtggtgatgggtccttccggatcgggcaagagcaccctgatccgcactttcaacggactcgagaggctggatggtggcgccctggatgtgctgggggtgcgtctggattccacccatgctgagcctcaggtgcgggcgatccgccgtcgggtgggaatggtgtttcagcagttcaacctgttcccccatctctcgatcctcgagaacatctccctcgcgccggtgaaggtgcagaagcgtccga

SEQ ID NO: 274400 - DNA, 876 bp, Unknown
  Bacterial polypeptide expressing nucleotide sequence isolated from the Sargasso Sea
gtgattttatcttttggcgcaggcgagctggaaaacaacagatttaaagcggtgaataaccgcaaccgtcagctggatgtcaaaatggaagcgactcgcgccatcagcgtctcgctgattcagttgattgcttcttttgccttggcttttgtgatttatttggcaagcttcccggctatgctggacaccttaacacctggcaccttcagtgaaatgattaccgccatgatgctgttattaaaacctctgaagcagctgactactgtcaacagtgattttcagcgcggtatggcagcagccaccaatgtctttatggttctggatgaaaaaccagagcaggacactggtactattgaactgaaacaggtcacaggcgctattgaaattaaagacttaagctttaactatccaggccatcaaaagcaggtgttaaagcagattaatatcaaagtggaacctggtcagactgtggctttagtcggccgctccggcagcggtaaaaccaccatttccagcttattgccgcgtttttatgaaatagagcagggcgaaattctgctggatggtatcaataccaaagactgtacgctggactcattacgctcacaaatggccgtggtatcacagcatgtggtgctgtttaacgacactatcgccaataacattgcttatggttaccgtggtgaattaagccctgaacgtttactggaagtggcagaaaaagctcatgtgatggaatttgtcaatcagatgccagccgggcttgatactgaaattggcgaaaacggtgtgactttatccggtggtcaacgtcagcgtattgctattgcccgggctttgttacgccaggctccagtgcttattctggatgaagca

SEQ ID NO: 274401 - DNA, 334 bp, Unknown
  Bacterial polypeptide expressing nucleotide sequence isolated from the Sargasso Sea
cgattttataaaaaaattacctaacggcttagaaacaaaagtaggtgagcgtggtatacgattatctggaggtcaacgacaacgtattggtatagcacgtgcattatataatgatcctcaggtcctagtttttgatgaagcaaccagttcactcgatattcaaacagaatcaagttttatgaatgtagttgattcttttaagggagataaaacaataattattgttactcatagaatatctactgttgaatattgtgatcaggtttttaatttaaataaaggagaactacaactaaaagttagctcaaattctcaatctattagtaatatctaa

SEQ ID NO: 274402 - DNA, 598 bp, Unknown
  Bacterial polypeptide expressing nucleotide sequence isolated from the Sargasso Sea
ataatagaaaatctcaatttaaaagttcatgaaaatgaaatcgtattaatttgcggcaatagcggttctgggaaaacaaccttgctcgaaataataagcggaataaccaatccacaaaaaggcaaaattacatggaagaacaaaattttatcttctaggcaaaggagatggttttgtggtgtagttttccaattcccagaaagatactttatagggacaacaattgggaaagaattaaaaataggccttaaatcttttagagaaaaaaatatagaaatagttttaaaaaaggttggtttagaagaattaaatctgacccaaccaccagaacaactaagtggcgggcagcaaaggagattggctgtagcagttcaactacttagaaacccctcaattcttttatttgatgaaccaactgctggattagaccggtcaatgagaaatgatgtgaagaatttaattcttgatttaaaaaataaaaatacaattattattgttactcatgaacctgatttatttgagggcattccttctaggatgttaattatggaaaaaggtaaaatcaaaaattttgtgaaagaaaattatgaaggatagg

SEQ ID NO: 274403 - DNA, 652 bp, Unknown
  Bacterial polypeptide expressing nucleotide sequence isolated from the Sargasso Sea
aaaaaaaatatttaatatatcaagcaataataaacttttagtatttgaaaatttaaattttaatatttctagagatagcataacttctataatagggccatcgggatgtggaaaatccactttgctaaatatattaggtctcttagattcttgttttgatggagaatatatttttgaaggatcttcaataaataaaattaatggaaaaaaattaaataaaatcagaaatcaaaatattggttttgtgcatcagttttttcatttaattccggaattgagtgtaatggagaatgtaatcttacctgctttagttcaaaaagataaaattgaagacataaataataacgcttataacttattaaaagtttttgaaatttatgataaaaaaaatatgaaaccaaataagttatcaggtggagaacaacaaagagtagccatagctaggtcactgataaataagccaaatttaattttagccgatgaaatgactggcaacttagatgaaaaaacttctgatgaaataattaatttttttttaaaatttgttaagaatcataatatatctctaatctacgttactcacaatcaaagatatgcagatatggctgaaattaaatatgaacttaaaagtaaaaatttgattttaaaatga

SEQ ID NO: 274404 - DNA, 469 bp, Unknown
  Bacterial polypeptide expressing nucleotide sequence isolated from the Sargasso Sea
cttgagtgattctgtttccaggatagaaaccaggggtgtcgtaaagcagtttggaggtttacggcaccccaaagtcctggctgtagatcgtgtttccttccaaatacatgagggcgaatttgttgctcttataggtccttcgggctgtggtaaaagtacaattcttaatatgattgcagggttgattccttttaatgaagggaatgttcttattgatggaaccgacatttattttggtgagaaactacctagaaatgttggctatgtatttcaaaaagatactgttttcccttggcggactgtacgtaaaaatattgggtatggccttgaactttcaggaatggataaagaggcaattaatgtatccgttgaggaaataattaagagatctgggcttgacggttttgaagatgcttttcccttaatgctttctggtggcatgcgccaaagagtagctttaatgcgtact

SEQ ID NO: 274405 - DNA, 222 bp, Unknown
  Bacterial polypeptide expressing nucleotide sequence isolated from the Sargasso Sea
atccaatagcaacagcacaaattgaagaattgattgatgagttaaaaaaagagcacacaataataattgtaactcattctatggctcaagcggcacgtgtatctcaaaatacaggtttttttcacttaggacaattgatagaacatggatctactgataaaatatttaagaatcctgataatacaaaaacccaggactatataaccgggaggtttggataat

SEQ ID NO: 274406 - DNA, 733 bp, Unknown
  Bacterial polypeptide expressing nucleotide sequence isolated from the Sargasso Sea
taaagatactgaaaatttattacttaataactttcatgaaaaaagactaactcatacagatgaaaagatagaattcaataataagattgaattcaaaaatgttgatttcaaatatgaaaattctaaagaattaattttaaagaatgtaaatttaataattaaaaaaaattctataactggtattgtgggacaaactggtgcaggtaaatcaagtttaataaatttaatagttggtttcttttccccttcatcaggatccgtaatgtcagatatgactgaaataaataataaaaatgtttttgattggcaaaaaaaaatatcaattgtacctcagagcattatgctattagatgattcaatagaaaacaatatagtttttaataatctaaaagatgaaaataaattagatatctgcattaaagctgcatgtttacaaggtttagtaaatgaatttaatcaaaagaaaaataacttaattggtgaaaatggaaaaagaatatcgggaggacaaagacaaagaattgggattgcaagagctctttatagagatgctaatatactaatattggatgagtcctttaatagtttagatgataaaactaaaattattattatggacaacttaaagaaattgaaaaaaacaattataattgttacccatttaaaagaagatcttatgatttgtgatacagttttatcgattgaaaatagaaaaatttcagaaataaattaa

SEQ ID NO: 274407 - DNA, 364 bp, Unknown
  Bacterial polypeptide expressing nucleotide sequence isolated from the Sargasso Sea
aatgaattcggaacagcccatcgtttccctgaaaaacgttcacaaatccttcggtgatctcgaggtgttgaagggaatcagtttcgatgtaaataagggcgaagtgatctgcatcatcgggccttccggttctggtaaatcgaccctgatccgctgcatcaacgctctcaatgacatcaattcgggttcgatcaaggttcacggaagggaggtccacgatcccaagctcgacaagcttgaactccggaaaaaagtaggcatggtttttcagcagttcaaccttttcccacacaagactgccctggaaaacgtgatgatggctccggttctggtactgaagccaaaacaaggaagatgttcgtaa

SEQ ID NO: 274408 - DNA, 790 bp, Unknown
  Bacterial polypeptide expressing nucleotide sequence isolated from the Sargasso Sea
aatggataagaaaggtctcagcgtaatgcagccagtgctagtagcaaagaggttatcaaaaaaatacggtaaagttgttgcacttgatagtgctgatttagagctttatccaggtgaagttttgggagtaattggagacaatggcgctggaaagtctacactaattaaggtgctatgtggtgctgttattcctgatagcggtgaaatattgcttgatggtaaaaatgttacttttacatcacctatagaagcaagaaaattaggtatcgaaactgtttatcagaaccttgcactttcacctgctttatcaataactgataatatgtttttaggtagagaaattagacaaaaaggctttatgggtagttttttaaaatttttagataaaaaagcaatggcagatgaagctagaaaacgactatctgaccttggtctattaaccatacaaaatataaatcaattagttgaaacattgtctggaggtcaacgacaaggtgttgcagttgcaagagcaacatcatttggaactaaagtcgttattatggatgagcctactgccgctctcggtgttaaagaaagtagaagagttttagagttaattggtgaggtgaggtctagaggaatacccatcatattaatttcacataatatgcctcatgtttttgaagtagctgatagaatacacattcatagacttggaacccgattatgtgtaattgaccctaagaaacatgaaatgtctgatgctgtcgcatatatgacgggtgctaagcaaccacctcaaaattaa

SEQ ID NO: 274409 - DNA, 1423 bp, Unknown
  Bacterial polypeptide expressing nucleotide sequence isolated from the Sargasso Sea
aatgacttttgaacagttaagtatttttttgatttttttaggcttatttttctttctgatatggggaaagatccgttatgatatcgtgtcttttaccgcactattagtagctataatacttggcattgtatctattgaagaagcttttgtaggcttttctcacccagcaacaattcttgtagccctagtactattagtatctgctggaatggtgaattcaggagtaatatacctaatcactaacaaaatttttagcaccccgagaactatgagttctcatatcacaatcatatcgtccattggagcaatactctcttcatttataaataatattgctgccttggcactactaatgccaatagaccttcaagttgcaaaaaaagcaaaaaggacggtaaaaaaaacccttatgccattatcatttgcaacaattcttggtggaatggtaacattagttggaactccaccaaacattattatatctgctattagacagaaaagtttgggtgaaccatttagtttttttgattttacgcctgtaggtataactgtctgcttagcgggattactctttatttctactgttggatggaagctaatagcggaaaaaataaatccacaatcagaaaaaaaagcaaatgaaggaaaagagttttatttttcagaattaatgatctcagaaaactcaacttacatcggcaaaccaatttctgaactaaaagaacttttcgaaaaatttgaagctacttttattaagactgatagtagagaaaaaattatcactgagggtgataaaataacagttcacacaagccctgctgatttagatgaaattaggataacattaggcttagtcatcgaagacgccaagagattgtttgacgcagaagaaaccgatgaactagaagttttagaagttttggtaacggaatcatcaagattgataaataaaacggcagaaagtgtaggtcttttttggagacagcaaacaatgattttgggaatctcaagaaaaggtaataatctaaaaagagaattaaagaaaacaaaaattagacagggagatatattattacttctcaccccgagagaatctcataaagaagtagttaactggctgggagttttaactctacaggatagagacttaatttttactcagcacgggaaagcttgggtttccctctcgtcttttctatttgccgttttgctttccagtacagggatattgtctttaactcttgcattgtcaattctggtttgtttttacatcttttacaatattttacctgcttcacaaatctatgaaaatatagcttggccaataatagttttgctagcttcaatgatacctcttggctatgcattggagagaacaggtggaacagaattaattgtgacactactaatgcaattttcaaca

SEQ ID NO: 274410 - DNA, 2063 bp, Unknown
  Bacterial polypeptide expressing nucleotide sequence isolated from the Sargasso Sea
caagtatcgtctcaagagcaaggatggcgtccccattgatggcacgattgatgaaacctaccagcgggtcgcccttgccctggctggccaggagtcggagccagacgtctggtatgagcccttcctgtgggcgctgcgcaacggcgccatcccggcgggacgcatcacgtccaatgcgggagccttcgagcacaagccggcgacctcgaccatcaactgcaccgtctccggtaccatcgaggattcgatggacgatatcctcggcaaggtgcacgaagcggggctgaccctgaaagccggttgcggcattggctatgatttttcaaccctgcgcccacgcggggcctttgtctccggtgccggggcctatacctcgggcccgctctccttcatggatatctacgacaaaatgtgtttcaccgtctcgtcagccggtggtcgtcgcggcgcccagatgggcaccatggatatccgtcaccccgatgtggtcgagtttattcaggccaagcgggaggatggccgtctgcgtcagttcaacctctccctgctcatcaccgaagagttcgtcaaggcggtaaaagaggatgccccctggcagcttatcttcccctacaccgccagggaggtggagcaggacggcatagcgctggacgatcctgctcaggtgttctgggccgactggccgaacagggaaggggtggtgttcaacgagctggggcaggtcgcctgcaaggtctacaagaccctgccggcacgcaagctgtggaacgtcatcatgacctccacctatgactatgcggagcccggtttcatcctgatcgacaaggtcaaccagatgaacaacaactggttctgcgaggagatccgcgccaccaacccctgcggtgagcagcctctgcccccctatggggcctgcctgctgggctcggtcaacctgacccggttcgtgcgcgaccccttcaccgaacaggccgccttcgactggtctgcctttcgcaaggtggtggccatcttcacccgcatgctggacaacgtggtggagatcaaccagctgccgcttgccaggcagcgtgaggagatcatcagcaaacgccgtcatggcatgggcttccttggcctcggctcggccctcaccatgctgcggataaaatacggttctgctgccgccgtcgcctttaccgagcaggtatctcaggagcttgccctgaccggctggcgcgagtccctggccttggcgaaggagaaaggcccggcccccatcatggagcaggagttcgaggtgaccggcaagctgctgcggctgcgcccagagatggcggctgacggtatcaagctcggtgacaaggtgaagggcaaggtgctgcacgcccgttacagccgctacatgcaacaggtggccgaggtggatcccgctctggttgccgagctggccgaggtgggggggcgtttcactcaccacagcagcattgcaccgaccggcaccatttcgctatcgctggccaacaacgccagcaacggcatcgaaccgagctttgcccatcactacagtcgcaacgtcatcaagccgggcaagaagagcaaggagagcgtggatgtctactcctatgagctgctggcctaccgcgagctggtcaatccggctgccatgccttatgccgaggatgaggcgacccggttgccggattacttcatcaccgccgacgacatcagcccggcccagcacgtagacattcaggcggcggcccagcgctggatcgactcctccatctccaagacggccaacgtgccgaccgactttccgttcgagcagttcaaggacatctacctctatgcgtcggattcggggctcaagggctgcaccactttccggttcaacccggcagctttccagggggtgctggtgaaggagcaggatctggagaacaccctgtacgagttcaccctggaggatggctcggtcgtcacggcgaaagggaacgaggagatcgaatacgatggcgagctgcacaccgctgccaacctctacgatgccttgaaagaaggctattacggtaaattctgag

SEQ ID NO: 274411 - DNA, 1474 bp, Unknown
  Bacterial polypeptide expressing nucleotide sequence isolated from the Sargasso Sea
gatgaaaatattctttcttttaattttctttttacaatgtagcaatccgccaactttatataatatttcaggatacaaaaaggcaattgatccaattacttcggttatccaatcttctggtttgcaaacaaatattggtattaaagtaataaatttaaaatctaatcaaactatatatgaatggaaccctaactcattatttaatcctggaagcaatgcaaaattatttacctgtatagccgcattagctttacttgatacaaataccacgttttctacatcagtatatcaagatacgaacgctatttatatagttggtggtggcgatcctcattttagtattgataaattagatacaatttcacaaataataagtgacacaattaaacttcacttaggtagagattattggtttttaaataatcgtgttcgtatgcggtcaatagatttagcaaaaagaatcgattatgtagtggtagacaattctatatatgataatatttattttggacccggatggatgtgggatgaaggatcatggtggcatgctagtcaagttagcgctatgtcattaaatgaaaattgtattgatttttatgttaaacctgggaaactaggaaaaccaattataataaatacgtatccaacaacaaattttataagtattcaaaatgagtcaaatacagttaatgatactatcaattttaaaacattaaaaattaaacgtgattgggaaagtcaaacaaataatttcattgtatcaggtaatgtgatggatacgtcttctatagatactttacaaagaaacatacatgaccctagtttatttacgggaacagttttttcagagatgcttattaataaaggcttagatattaaacatgttgttaaaggtgttgtcccaaataatgcaactaaaattactgaacatgaatccaagcctatctttcattctcttaatggattaatgaaaaaaagtgaaaaccttactgctgagttattggtaaaacatattggattaactgtttttgataccgttggttcatggaaaaatggtttgcttgcaattaaaacttttttacatgattcagtagggatagatacaaatacatttagtttaagtgatggttcaggactatcaagatataattacacaagtccaaatcattttatatctgctctttcatgggcatataataataaaaatattcgtaacaaatttttagatacatttcctagaggtggtcttgatggaacattagaaaatagattagaaaatattgattcaactactactgttttggcaaagactggttctctttcaggggtaagttgtttatcaggttacattatttcaaagacaaatagtcctcttgctttttccattttaataaatgggtttgttaattcatctttaccatatcgtaatcttcaagatgaaatagtttattcactatcaaagataaaactatga

SEQ ID NO: 274412 - DNA, 538 bp, Unknown
  Bacterial polypeptide expressing nucleotide sequence isolated from the Sargasso Sea
gatggagcaatttcacggcacgaccatcgtttcggtccggcgcggcgacaaggtcgcgctcggcggcgacggccaggtaaccctcggcaacatcgtcatgaagggtggcgcgcggaaagtgcggcggatctacaacaaccaggtattggtcggattcgcgggcggcaccgccgatgcgttctcgctgctcgaccgcttcgaggcgaagctcgagaagcaccagggcaacctgacccgcgcggccgtcgagctcgcgaaggactggcgcaccgaccggatgctgcgccgcctcgaggcgatgctgatcacggccgatgccaccaccacgctcgtgatcaccggcaacggcgacgtgctcgacccggaaggcggcatctgcgcgatcggctcgggcggtgcgtatgcgcaggccgcggcccgcgcgctggtagagaacaccgagctgtcgccgcgcgagatcgtcgagaagtcgctcgggatcgccggcgacatgtgcatctacacgaaccacaaccgcatcatcgaaacgatcgagtaa

SEQ ID NO: 274413 - DNA, 666 bp, Unknown
  Bacterial polypeptide expressing nucleotide sequence isolated from the Sargasso Sea
cgatttatccgggacaaacactggctattgttggtgaaaccggctccggcaaaagcacactggcaaaattgctggtaggtattgaaacaccagatagtggcgaaatactgctcgacggtaatgccgtcaccattagtgattataaaaaatacaaccacgtcattcgttacatctttcaggacccggcacgatcattaaatcctcaccataaagtaggacaaatgctggacgatgtattgcgctacagtacaaaaatggaccaagaacaacgccaggataaaattcaccaaaccttagagcaactgggtttaatggaagaacacgccgattattaccctcatatgttctcaggggggcaattacagcgtgtagcgctcgccagggcccttattatggaccctaagctgctgatactggatgaagctttaacagcgctggacccatcgttgcgggctcagattgttaatctgctgctggagttgcaaaagaacacaggcttgtcttatctgctgatcaccaaccacctgcgtttggtgcggcatatcagtgacagcatgctggtgttgcatcagggcaaagcgctggattatggtccaaccaatcaggtatttgataaccctcaacacgattacagcagaaaattaattaaaagcgctcagagctaac

SEQ ID NO: 274414 - DNA, 766 bp, Unknown
  Bacterial polypeptide expressing nucleotide sequence isolated from the Sargasso Sea
atgcagccagtgctagtagcaaagaaattgtcaaaaaaatacggtaaagttgttgcacttgatagtgctgatttagagctttatccaggtgaggttttgggagtaattggagacaatggtgctggaaaatctacactaattaaggtgttatgtggtgctgttatacctgatagtggtgaaatattgcttgatggaaataaagttacttttacatcgcctatagaagcaagaaaattaggtatcgaaactgtttatcagaaccttgcactttcacctgctttatcaatcactgataatatgtttttaggaagagaaattagacaaaaaggctttatgggaagttttttaaaatttttagataaaaaagcaatggcagatgaagctagaaaacgactgtctgatcttggtctattaaccatacaaaatataaatcaattagttgaaacattgtctggaggtcaacggcaaggtgttgcggttgcaagagcaacatcatttggaactaaagtcgttattatggatgagcctactgccgctctaggtgtcaaagaaagtagaagagttttagaattaatcggtgaggtgaggtctagaggaattcccatcatattaatttctcataacatgcctcatgtgtttgaagtagctgatagaatacatattcatagacttggaacccgattatgtgtaattgacccaaagaaacatgaaatgtctgatgcagtcgcatatatgacaggtgctaagcaaccacctcaagattagt

SEQ ID NO: 274415 - DNA, 294 bp, Unknown
  Bacterial polypeptide expressing nucleotide sequence isolated from the Sargasso Sea
aatgacaaaaaatagtgaatttgtaaaattcgataaagttgacaaaagttacgatgggaaagttttagttgttaaagatcttcaactagatatagctgaaggtgaatttataacaatgcttggtccatctggttcaggtaaaacaacatgtttaatgatgttggctggttttgaaacaccaactcatggtgaaatattattagatggaaatataatttcaaacattcctcctcataaaagaggtattggtatggttttccaaaactatgcatttattccacatatgacagttta

SEQ ID NO: 274416 - DNA, 583 bp, Unknown
  Bacterial polypeptide expressing nucleotide sequence isolated from the Sargasso Sea
atgaattattttgttcatccaaccgcaattatagatgacggtgctcaaattggcaccgacagtaaagtttggcattttgtgcatgtttccggaggagctaaaattggcaagaatgtatctctaggccagaacgtttacatcggaaacaaagtatcaattggagataattgcaaggttcaaaataatgtttcaatttatgacaacatcacattagaagacggggtattctgtgggcccagcatggttttcacaaacgtatataacccacgctctttagtggagaggaaagacgagtatcgagacacgatagtgatgagaggagcaactttgggcgctaattgtacaattgtatgcggtgttaaaattggccaattttcatttattggagcaggagcagttgttaataaggatgtaaaaccatacgcgttgatggttggtgtgcccagtaagcaaattggttggatgagcgagtatggcgaacaagttcctttgcctttgagtggaaaaggaagctataaatgcccacatactggaaaagagtatcatttaaatgataacgatctaatggtcaaagataaatgaa

SEQ ID NO: 274417 - DNA, 2197 bp, Unknown
  Bacterial polypeptide expressing nucleotide sequence isolated from the Sargasso Sea
atggtttccacatttgatgttgcccttgatagtaaatcgcaattggagcttgaatctgattttgataaagttctgaaccctcaaaatcttgataactggatgaagcatatgtcttcaaagccccactatgttggctccccttggagcaagcagaatgctgaatatgtcgcaaataaatttgaagaatggggctttgaatcagagattgaaactttcgaagtattggtaccatttcctaaaataaaaaaattaaaaatgatcgctcctgagcaagtagaattaaaattattcgaaccaggattaaaagaggatgcatcctcaaatataacagaaaatattttacccggttataatgctttttctgctgatggaaatgttactgctgaattagtgtttgttaactacggtattccaaaagattatgaagaattaaaacgaatgggaattgatgtaaaaggcaaaatcgttattgccaaatatggaggttcttggagagggataaagcctaaagtagcctatgagaatggcgctattggatgtataatgtattcagatccgaaaaacgatggatacgttgttggtgatgtctatcctacaggtccctatcgaatggaatatggtattcaaagtggatcagttgtcgatatgccgatgtaccctggagatgcgttgacaccaggctatggtgctaaaaaagatgtggagcgtttatcaatagaagatgctcttacgatcatgaaaattcccgttatgccgatttcatatgcagatgcattgccacttttaaaagcattaaaaggacccgtagtcccagatagctggaagggtggtctaccaattacgtatcacgttggcccaggcccaactaaagtaaatttacatcttgaatttgattggagtcttcgaaccgcataccatccaattggccgcttaaaaggttcagtataccctgatgaatggattatgcgaggcaaccaccatgatggatgggcttttggagcttcggatccaataagcggaatggtttcgctgatggaagaggctagagctataggcgagcttgttaaaacgggttggcgcccaaagcgttcattgatctatgctggttgggatgcagaggagccaggtctgcttgggtcaaccgaatgggttgaataccatagggatgaaattaaagaaaagatgattgtatatattaatacggatggtacgggtgttggctacttaagcatgggcggttcgcattcattagaaaaatttgttaatgaaataatccgtgaagttaatgacccggttcatgaagttagcttagaaagtagactgcgttcacgattacggcttagggaatacaatgcttcagattatagagatcagaaagaatcagatcgcgatgatttgagattatatccaatggggtcagggtctgactataccgcatttcttcatcacgctgggataccctcactaaatatggcttttggaggtgaaagtggtggtggttcttatcactcactatatgatacatatgatttttataaacgttttaacgatagcgattttaaatacggtattacgcttgcaaaagtaaatggacgcctggtactacgtttatctgaggcagatattctaccgtttagatttgtgaatatggttgataatatcggaaaatttatcgatgataataaacaattggctgatgaaattaaaaaacatactcaattaagaaataaattattggataaaaatgactttacaattgcaagtaacccaaaaaaaatgtacgcaccaccagatagacttaaagaggttccagactttgattttaagccccttgaggatgcctttgataggttaaccaatagcgcatggaattatgagaaagctttatcgaattataaaaaaggctcactttccgctgaaaaaaaatcagaattaaatgatctattgaaagatgttgagcaagcttttattagtgaaagaggtttgccgcgtagagattggtttaaaaatatgatctacgctcctggttactataccggttatggagtaaagactcttcctggagttcgcgaaggccttgaagagcgaaaatggaatgaagtggaggactatattcaagaagttgctaaagccttagatcgcgcagccgcaaaaattaactcagcagctaaactattaactaaaattcaacaatgag

SEQ ID NO: 274418 - DNA, 787 bp, Unknown
  Bacterial polypeptide expressing nucleotide sequence isolated from the Sargasso Sea
gatgatcgaagttcgtaacgtctggaaggaatacggcgatcaggtcgtgctcgaacggttgaacctgcgtgtcgaagaaggtgagttctgttcgatggtcggcgcatcgggctgcggcaagtccacgttcctgaggctgttgctcggtcaggagcgcgcgacgcgcggcgaaattctgctcgatggcgcacctttgccggctgaacccgatgagcatcgcggcgtggtgtttcagcgctattcggtattcgatcatctgagtgtggttcgcaatgtgatgctcggactcgaattgcgtcgcgcgaaattcacgggccgtctattcggtgcgcagcgacgcgccgcgcgcgatgaagccgtcgcgatgctcaaacgcgtcggccttggtgcggcgttggataaatttccgcagcagctatcgggcggcatgcaacaacgtctcgcgattgcccaggcgctgatgatgaagccacgcgtgttgcttctcgatgaaccattcggcgcgctcgatcccggcatccgcaaggacatgcacgacttgctgctgggcttgtggcgcgaatcgcggctgacgattttcatggtcacccatgacctgaaggaaggcttcacgctcggcagccgcgtactggtattcgacaaggtccgcgtcgaccctcaagcgccgggcgcctatggcgcgcgcattacctacaacattccgctcgaccacagccgcgattccgcgtcctccattcatatggctcaagccgtggtggaaggcgcaacgcgtgtcgaaacggtctga

SEQ ID NO: 274419 - DNA, 664 bp, Unknown
  Bacterial polypeptide expressing nucleotide sequence isolated from the Sargasso Sea
aatgataaaagttaaaaatttatcaaaatcatttaacaatcagttagtgttagataatatttcaattgaaataaaaaaaggagatttcatatcaattgttggtccttctggagctggtaaaactacatttttaaatattttaggaactattgatgagtacgataaaaatccaaaaacatccatattattcaataacatcgatataacaaatctcgatgatgataaactatcttcttttagaaataaagagattggttttatttttcaatttcaccaacttttacctgaattaactgctcaagaaaacattcttttaccatcaatgattggaaaaaggagtgaaaaagaatcacttgagaaattaatgaaactttcaagtattctagaaataaatcacattttaaataaaaagcctgaatttatctctggtggtgaaaaacaaagagttgcggttgctagagcactgataaattctcctagtatcttattagccgatgaaccaacaggaaatttagactcaaaaaatgcagaaaaaattcaaaaactttttaaaaaaattaataaagaacttaatgttacaatagttcttgtgacccataacaaagctttttccaaaattgctgataaatgcttggtcctttcagatggtaaatggtctaaataa

SEQ ID NO: 274420 - DNA, 538 bp, Unknown
  Bacterial polypeptide expressing nucleotide sequence isolated from the Sargasso Sea
tatggagcaatttcacggcacgacgatcgtttccgtgcgccgcggcgacaaggtcgcgctcggtggcgacggtcaggtcacactgggcaacatcgtcatgaaaggcggggcgaagaaagtccggcgcatctataacggcaaggtgatggtcggcttcgccggcggcacggccgacgcgttctcgctgctcgaccgctttgaagcgaagctggaaaaacatcagggcaatctgacccgcgccgccgtcgaactggccaaagactggcgcaccgaccgcatgctgcgccgcctcgaagcgatgctgatcgccgcggatgccaccaccaccctcgtcattaccggtaacggcgacgtgctcgatccggaaggcggcatctgcgcgatcggttcgggcggcgcttacgcgcaagccgccgcgaaggcgctcgtcgacaacaccgaactgtcgccgcgcgagatcgtggagaagtcgttggaaattgccggcgacatgtgcatctatacgaaccataaccgcgtcatcgagacgatcgagtaa

SEQ ID NO: 274421 - DNA, 1015 bp, Unknown
  Bacterial polypeptide expressing nucleotide sequence isolated from the Sargasso Sea
aatggaaatttttattagcttcataacagattatggtcttttcttagcaaaagcccttactatattaatttttttaatccttgtaataaatgctattgcgggaacaaaaaaaacaaagccaaaaggctttatccaagtaaaaagtctaaataataaatttgatgacatagaaagaaatgtaaaaaaagatttattagataaaaaatctttcaaactttttcttaaacaacaaaaatctaaaaaacaaaataacagtaaaaaattatttatccttgactttgttggtaacataaaagcaagtgaggttgagtcattgagggaggaaatcactgcaattattcttgcatcagaatcgagcaatgatgaagttttaatacgtcttgaaaatgcaggtggaactgttcatgaacatggtcttgctgcctcccaaattcttcgccttaagaaaaataaaataaaagttactatttctgttgataaagttgccgcaagtggtggctacatgatggcatgcacaggtaacaaaatattggctgcaccattttcaataatagggtctataggtgtaatagctcaaatacctaatcttaatagattattaaaagaaaaaggagtagattttgagcaacatacagctggtaaatataaaagaactgtgactatgtttggaaaaacaaccgatcaagatagaaagaaattaaaagaccaattggagaatattcacaccctttttaaaaattttatttctaaagaacggcctaaagttgatattgaaaatgttgcaaccggtgagtattggtttgggtcagatgcaataaagctgaaactagttgatgaaataattactagtgatgaatatattttattaaagaaaaatgactatgatttaattaatattaaatataattttccaaaaacatttggggaaaaaatttcaagcctttcttcaagagcatttaattcaatctatgataatatatcccaaaaaatatttgaaaaaaatatttttaaataa

SEQ ID NO: 274422 - DNA, 520 bp, Unknown
  Bacterial polypeptide expressing nucleotide sequence isolated from the Sargasso Sea
atgaccactattgtaagtgtacgccgcgacaacaaagttgtaattggtggcgacggccaagtttcattgggtaataccgtaatgaagggtaacgcccgtaaagttcgacgcctttataatggcaaagtaatcgcaggttttgccggcggtactgctgatgccttcaccctgttcgaacgttttgaaagcaaactagaaatgcatcaaggtaatctcaccaaagctgctgttgaaatggcgaaagattggcgtagtgaccgtgcactcagaaagttagaagcccttttagctgtagccgatgaaactgcctctttaattatcaccggtaacggcgacgtcgttcagccagaaaatgacttaattgccattggtagtggtggtaactttgcccaatcggccgcaaccgcgttattagaaaacaccgatttaagcgctcgtgaaatagtagaaaaaagcctaactattgcaggtgatatctgcgtatttactaacaacttccaaactattgaagaattataat

SEQ ID NO: 274423 - DNA, 206 bp, Unknown
  Bacterial polypeptide expressing nucleotide sequence isolated from the Sargasso Sea
gatgacttcaaattttttagaaattaataacctaaataaaaaatttggaaatattaatgctttaaagaatgtttctttaaatgtttctaaaggtgaggttatttgtattattggtcctagtggttgtggaaaaagcactttattgagagcaatcaattggctcactccacctgacagtggtgaagttaaattagaaaataatataa

SEQ ID NO: 274424 - DNA, 486 bp, Unknown
  Bacterial polypeptide expressing nucleotide sequence isolated from the Sargasso Sea
aatgagtaattttatagaaatcaaaaatttaaaaaaaacatttaatatatcaagtaataatgaattgttattatttgaaaatttaaatttcaacatttccaaaaacagcactacttctataataggaccatctggatgtggaaagtctacacttctaaatattattggtcttctagattctagtttttatggagaatatttttttgatggtgttttaataaataatattaataataaaaagttaaacgaaattaaaaatttaaaaattggatttgttcatcagttttttcatttaattcctgaattaagtgtaatggagaatataatattgccagctttgatcaaaaaagataaaatttcagacataaataatgatgctgaaaatttattaaaagtttttgaaatttttgataaaaaaaatatgaaacctaataagttatcaggtggtgaacaacaaagagtagctattgcaagatcacttataaa

SEQ ID NO: 274425 - DNA, 1723 bp, Unknown
  Bacterial polypeptide expressing nucleotide sequence isolated from the Sargasso Sea
catgaagcggccgttgttttcgatgttgcggccgttcgcggtgccgctcgtggcggcggtcgtgctgcaggcgctggccggtgtcgcctcgctcgtgccttggctcgcgctcggctggttcgccgacgcgtggcgcgcgacggcgcagctcgacgcgaccgcccgcggctggctcgtcgcggccgtggtggccggcgtgtgctggctgggcggccagacggtcgcgctgcatctgacgcaccgggtcgacgccgatctcgccgatcgcctgcgcaggcgcctcgccgatcatctgcaacgcttgccgctcggctggttcgcgcgggcgggcagcgatcgcatcgcgcgtcacgtcgaccaggatgtgcgtgcgctgcaccagctcgtcgcgcatgcgcctgccgatgtcacgcaactcatcgtcgtgccgtgcgcggcgctcgcgtgcctgctttacctgaatcccgcgctgcttgcgtttgcgctcgtgccgctcgtcgcgggcgccgcgctgtttcgctggatgcgttcggcgcggttcgcgccggccgtcgcgtcacgcaacgcggcgcttgaacagctgatgggcgactacgcgcaactcgcgcagaacccggcgctcgtgcggcagtatccgggcgccggcatcgaggcggccgcgctggcgtcgaccgggcgcttcgaacaggcgttttcggtgtgggtcggccgcgtcggcgggcccggtgcgtgcacgcaggtgctgctcggcacgccgttcctgctcgcgtgggtcgtgttcggcgcgatgtggctcacttcaggccgcttgcccgtcggtgagctgtgcgcgttcgcacttttgatatgggccgtagcggcgccggtgcgtgcgctcggtcacggtgccgacgcattgcgcgaagcacgcgctgctgccgaacgcctcgacgccttgctcgcgcagccggccttgcccgagccagccaatggcgccgcaaaggtgccgcgcgatgcgtcgatcgagatactgggcgcgagtgtcgacatcgacggcacgccgatcctccgcgatatcgatgcgatgatcgcggccggcacgaccaccgcgatcgtcgggccgtcgggcgcgggcaagagcacgctgctgatgctgctcgcgcgcttcatggatccggaccacggcacggtgcggctcggcggcgccgatcttcggctgctcgcgtcggatacgctgcgcgagcaggtggcgatggtgttccagcaggccgccgcgctcgacgtgtcgatcgccgcgaacattgcgctttaccggcccgatgccgatcgtgacgcgattcgcgcagccgcacgcgcggcctgtctcgacgaacgcatcgacacgctaccgggcggctacgactgcgtgtgcggtcgtgacgcgcggctgtccggcggcgaactgcagcggctggcgattgcacgtgcgctgctgtcgcccgcgccgctgctgctgctcgacgaaccggcctcggcgctcgatcctcacaccgggcttgcgttgcgcaatgcgctgcgcggcgacaggcgcacgcgagtgatcgtcagccatgatctcgacgcgatccggcatgcggaccagattctcgtgatggatcgcggccgcattgtcgagcgcggcacgcatgcggcgctgctggccgcgcgcgggctgtatgcgcggctatggcgcgaacgcggtgccgcaggcggggaggccgcatga

SEQ ID NO: 274426 - DNA, 625 bp, Unknown
  Bacterial polypeptide expressing nucleotide sequence isolated from the Sargasso Sea
tatgaataaaatatatagattaatattttttcttcaagttttccttcttggatgtactcctagagtaattaatgaaaatgaaataacaaaaaaaataaatagtttggatttgaatatttttgctaaaaccggagagaaaaaatactctataaaaagtccatattcaatttacgataatattaaaaataaattccaatttaaaaacacaactataaatattttttacgatggtaaaaccaagtatgttattaattcagatgagtcaacattatctaataaaaacaacctcgtagaattgataggcaatgtaagacttaaaacaattgatcaagacgatgattatttgtatgcagattactttatgtggaatatcgacgaagccaaatatctattgacaggtgatgtacgatttgaaaacaaaaatgtaatattaacttcagtaaaagcagtgttaggttcagataatgtaattgagttttttgatcctgttaaatatataattaaggatgataacaatgaaaatatatatgaaaccaactctgaaaatgcttactatgatatgaacaaagaatccctaagttttaaagcaaaagataaaagagttcgctcgagaatttatttttaa

SEQ ID NO: 274427 - DNA, 427 bp, Unknown
  Bacterial polypeptide expressing nucleotide sequence isolated from the Sargasso Sea
atgtctaaaaatcctgaattcgttaaattcgataaagtagataaaagttatgacggtaaagttcttgtcgtcaaagatcttcaattagatattgctgagggcgagtttataaccatgcttggtccatctggatcaggtaagacaacatgtttaatgatgttggctggatttgaaacaccaactcatggtgagatattattagacggaaatataatttcaaatattcctcctcataaaagaggaattggaatggtatttcaaaactatgcattattcccacatatgactgtttatgaaaacttagcttttcctttaagagtaagaaaagttgagaaagacgaaattgataaaaaagttgataaggctttgtcgatggtttcattaaacggatttgaaactagaatgccgagcccaactttcaggtggt

SEQ ID NO: 274428 - DNA, 325 bp, Unknown
  Bacterial polypeptide expressing nucleotide sequence isolated from the Sargasso Sea
tatgtattggctcgaaccatcgcaattgagcctgaaataattctcatggatgagccatgctcagctttagatccaatctctactttgaaaatagaagagacgatgcacgaacttaagaagaattacacaataataatcgttacccataatatgcagcaggcattaagagtcagtgatatgactgctttctttaatgcagttgaatacgaagatggtgatggagggaaagttggttatcttgcagaatttaattccactaagaaaatttttaactctccaaaagaaaaaactactcaggaatacatatcaggtaaatttggttgat

SEQ ID NO: 274429 - DNA, 152 bp, Unknown
  Bacterial polypeptide expressing nucleotide sequence isolated from the Sargasso Sea
aatgagtaaaatcaaagcggaaaatgtaaatgtttattacggaaccaaacaggcattatttgacgtctctatagaaatagcagaaaaagaagttacagctttaattggaccatctgggtgtggaaagtctactttcttaagaagcttgaaca

SEQ ID NO: 274430 - DNA, 838 bp, Unknown
  Bacterial polypeptide expressing nucleotide sequence isolated from the Sargasso Sea
gcattattaattataggcactcttggtttaggcttatatttattaggtaatgaccaaattggagcagggatagtagctgcttctctacctttgaccttgagaatttcagaaatgtcatggtggataatgtgggaggtaagctacttatttgaaaatataggtacaattgacgaaggtaggttaaccatatcacaaaaaccaaaggttattgatgctccagatgctaaggaattatcaataaagggaggagaaattaattttagcaaagttaaattcaattatggtaaacgtggtgggttatttgaggagttatcccttaaaataaataaaggagaaaaaattggtttagttggcaagtcaggtgcaggaaaaagctctatactaaatttattattaagattttatgatgtagattcaggaaagattttgattgatggtcaagatatttctttagttacacaggaatctttgcgttcacaaataggtgttgtgacacaagaaacggctcttttaaatcgatctatttatgagaatattgcttatggtgagccatctgccccaaaacaaaagatttatgaagctgcaaaaaaggcagaagcatttgaatttataaagagtttagaagataaagatggaagaaaaggtttttctgcatatgtgggagaaagaggtgttcgtctttcaggtggccaaaggcaaagaattgcaattgcaagagttttattaaaggatgcacctatacttatattagatgaggcaaccagtgctttagatagtgaaattgaagctgctatacaaaatcaattaaataatattttgcaggataaaactgccttag

SEQ ID NO: 274431 - DNA, 539 bp, Unknown
  Bacterial polypeptide expressing nucleotide sequence isolated from the Sargasso Sea
ttttccatggaagacccttcaagaaaatgttgcgtatggtccaattgttcaaaaaataatgcctaaaaatgaagctcttgataaagctagtagtttattagaagaggcaggcattggtgatatgatgaaaaaatatccaggagaagtttcatctggtatggctagaagagcagagattgttcgggctttaataaataatccgaaagtattgttactggatgaaccatatagagcaatggatgcattaacaaaatcaataatgcatgaatctttacttgaagtatatgataaaacaaatgttacaatattttttataacacatgatcttgaggaggcaatttttttgggtgataaagttgttgttatgacaacaaggccagctagaacaaaattaattcttgatgttgacattcccaggcctcgaaattatcaagtactttcttctgaaaattttcgcttattagtaaatgaagctaaagaagctgttcacgaagaagctataaaagcttttgaagcaggggaaagagagttagcataat

SEQ ID NO: 274432 - DNA, 583 bp, Unknown
  Bacterial polypeptide expressing nucleotide sequence isolated from the Sargasso Sea
atgattgaatttcgccacgtcagtaaaacctatggtcagcaaaaagccgttgatgaccttaacctgcatttaggggagggcagcttttcggtgttaatcggcacgtcaggttcgggaaagtccaccacgctaaagatgatcaatcggctggttgaacacgacagcgggcagatccgctttgccggagaagaaattcgtagcctgccggtgctggagctacgacggcgcatggggtacgcgattcagtctattggcttgtttccccactggaccgtcgcgcaaaacatcgccaccgtaccgcaactgcaaaagtggtcgcgctcacgtattgatgaccgaacagatgaactgatggcgctgctgggtcttgaggaaagtttgcgccaccgttatccgcatcagctttccggcggacagcagcagcgggtcggggttgcgcgtgcgttggcggcggatccgcaggtgctattgatggatgagccttttggcgcgctggacccggtcacccgcggtgcgctgcagcaggagatgaagcgtattcaccgtttgttggggcgtaccattgtgttagtgacgcatgata

SEQ ID NO: 274433 - DNA, 544 bp, Unknown
  Bacterial polypeptide expressing nucleotide sequence isolated from the Sargasso Sea
catgactaaatctgttcccagttcaattgattccatttcttacaaggaacatgaatctcatgttgaaattgtaaatctaagcaaagttttcccaatttctcgaccttctctttttaacaaaaaaactgagaactatgttgctcttgaaggtataaatctcgatattaaaaagaacacttttgtctctttgattggcccttcgggttgtggtaaatcaacgcttttgaatcttttagcaggattagatgatttcacgtctggtgaaattttcatcgaaggcaagccactggttggccctggtccagacagaggcataatttttcagaactacgcactgatgccctggcttaccgccgcaggcaacatcgaatatgccttagagacggcctgtccagaactaagtacctcacagaggcgtgaaaaagccagatactttttgaatatggttgggttagaacgctccatgaacaagtttccaaagcaaatttcaagtggtatgaagcagagagttgctattgcacgagctttgtctattaatccgtct

SEQ ID NO: 274434 - DNA, 751 bp, Unknown
  Bacterial polypeptide expressing nucleotide sequence isolated from the Sargasso Sea
tttgtataaggcatttaatgcatttgttgtagggcaacgttatctgcaggcatcgtatgaaaatttccatagtcttgtaaagatatctgagtttgtagacagtcaggaatctattaattatgtgaaacgctccaaagcaaggttagactatgaccttgtgtttgagtcagtgttttacaaatatgaaaacgctgagcattttttgttgagtgatgtgagttttgaattaaagcctaaaacgactactaaggtgattggtaaatccggctctggcaaaagcacgttgttacgattgatggcgggtttgatagaacctcaatcgggtaatataaaaaataaccttggtgtggtggggtatgtttcacagcacccatatgttttcgacgatacaatccggaacaatatctcactatggaatagtgatattactaatgagaaaattattgaagtattgaactccgtaggtttagaaagtttgggtgaattgaatttagatactatcattggggagacatcaggttttcaattatccggtggacaaattcaaaggttgtgtatagcgcgggaacttacaaaaaagattgatactcttatattggatgagccgacaagttcgcttgatctgtataacacaggaatggtaagtcggacacttgatgatctccattctactattaatatcataattattacacatgatgacgatattgatattaggtttgataatctgatcgcgttagacaaggactag

SEQ ID NO: 274435 - DNA, 628 bp, Unknown
  Bacterial polypeptide expressing nucleotide sequence isolated from the Sargasso Sea
atgcttgatttaaaagaaatatcctatcaacctcaaacgggtgaaaaaaaaataatagacaatcttaatttaaaagtttatgaaaatgaaatcatcttaatttacggcaatagtggttctggtaaaacaaccctgctcgaaataataagcgggttaacaaatccccaaaaaggaaaaattacttggaagaataaaattttatcatctagacaaagaagatggttttgtggagtagtattccaattccctgaaagatactttattggtacatctattggtaaagaattaaaaataggccataaatctttaagggaagaaaatatagaaatagttttaaataaggtcggtctgacaaaattaaacctaacccaaccaccagaacaacttagtggcggacaacaaagaagattagctgtagcggttcagcttcttagaaacccctcaattcttttacttgatgaaccaacggctggattagactggtcaatgagaaatgatgtgaagaatttaattcttgatctaaaaaataaaaatactattattattgttactcatgaacctgccttatttgagggaattgtgtctagaatgttaattctggaaaaagggaaaatcaaacacttctaaa

SEQ ID NO: 274436 - DNA, 382 bp, Unknown
  Bacterial polypeptide expressing nucleotide sequence isolated from the Sargasso Sea
atgcctaaaaatccagaatttgttaaatttgacaaagttgataaaagctatgatggtaaagttttagttgttaaagatcttcagctagatattgctgaaggtgaattcatcactatgcttgggccttctggatctggtaaaacaacctgtctgatgatgcttgcaggttttgaaactcctactaatggtgaaatccttttagatggaaatataatttctaacattccacctcacaaaagaggtattggaatggtctttcaaaattatgcactttttccacatatgacagtttatgaaaatttagctttccctttgagagtaagaaaaatagaaaaagatgaaattgataaaaaagttgataaagctttatcaatggtttctc

SEQ ID NO: 274437 - DNA, 325 bp, Unknown
  Bacterial polypeptide expressing nucleotide sequence isolated from the Sargasso Sea
tatgtctaataatccagaattcgttaaatttgataaagttgacaaaagctatgatggtaaagttctagttgtaaaagatcttcagttagatattgcggaaggtgaattcattactatgcttggtccctctggatccggtaaaacaacttgtctgatgatgcttgctggctttgaaacaccaacaaacggagagatcttgttagatggaaatataatttctaacattccacctcacaaaagaggaataggaatggtgtttcaaaattatgcactttttcctcatatgactgtttatgaaaatttagctttccctttaagagttaga

SEQ ID NO: 274438 - DNA, 731 bp, Unknown
  Bacterial polypeptide expressing nucleotide sequence isolated from the Sargasso Sea
agggggagattccgaggtagcggccttgtccggcatcgatctgaccgttgaggccggggagttcatatcgctgatcggcccctcgggctgtggcaaatcgactctcttacgtctgattggggacttactcgccccgactacgggagtggtgacggtcttcggcaaatcggcccacgaggctcgcctggatcaggactacggcatggtgtttcagcacgccggattattcgattggcgtcgggtgctagccaacatcgagttaccgctggaacttcgcgggtggtcaagagacgagaggtcggcccggtcggcagaaatgctgggactggtaaggctcgaggacttcggtgcgcattatccccgccagctcagcggcggcatgcaacagcgcgtttccattgcccgggctctctcgttccagccgaagttgttgctcatggacgagcctttcggggcacttgatgagatgacccgtgagcacatgcagcttgaactactccggatttggcgagaaacccagaccaccgtcgtattcgtcacccactcggtacctgagtcggccttcctttccaatcgagtagtggtcttgtcaccacggcccggccgcatccactcggtagtcgatgttgacctaggtgatcgcagtgacgatacgaggcaggacccggccttcttcgagaaggcgactgaaattcgcgaggcccttcgggccgtggagggcggcgggtgat

SEQ ID NO: 274439 - DNA, 814 bp, Unknown
  Bacterial polypeptide expressing nucleotide sequence isolated from the Sargasso Sea
atgatcactcccatgatgatgctgctcaagccgctgaaaagcctgacggacgtcaacaaccagttccagcgcgccatcaccgcttgccacagcctgttcggcttgctcgacaccgagccggagcaggataccggtacccgtaccctggagcgcgcgcgcggcgagatagagtttcgcaacgtcaccttcacctacccgaccaaggacaccccggcgctgcacaacgtcagcttcaaggtggaggcgggcaaatcggtggcgctggtggggcgttccggctctggcaagagcaccatcgccagcctgttgacccgcttctacgacatcgagcagggggagatcctgctggacggtgtcaatatccgcgattaccgcctgagcgagctgcgtaagcagtacgccctggtctcccagcatgtccacctgttcaacgacacggtggcgagcaacattgcctacgccgcggaagagaaatacagcctcgacgagatcaagcaggcggcccgcatcgcccacgccgacgagttcgtcagcaagatgagcaacggttatgacaccgtggtcggcgagaacggcgcgtcgctctccggcggtcagcgtcagcgtatcgccatcgcccgcgccctgctgcgcgatgcgccggttctgctgctggacgaggctacctcggcgctggataccgagtccgagcgccacatccaggcggccatcgacgagctgtgcaaggcgcgcacctcgctggtgatcgctcaccgcctctccaccatcgagaaggcggacgagatcctggtgatcgatgaaggccatatcgtcg

SEQ ID NO: 274440 - DNA, 631 bp, Unknown
  Bacterial polypeptide expressing nucleotide sequence isolated from the Sargasso Sea
ctgaaaggattgcataaaaaatttggaagtataacagcattaagagatgtttctttgaatgtttctaaaggggaagtcatatgtattattggtcctagtggctgtggcaaaagcacacttttgagaactattaattggctttcacctccagataagggggaagttattctacagggtgaaattgttggttcttcttcttcttcaaagttaactattgaacaatcaaaattgttaaataatctcagagctcgaatgggaatggtgtttcaacagttcaatgtttggcctcatttaaacgttttagaaaacgttgttagagctcaagtggttgtggcaaagagaaatcggaaagaagcagaatctaaagcactaaaaattcttgatgaagttggattgactgaaaaagttgatgagtggccagataatctttcgggaggacaaaaacaacgtttggctatagcaagatctcttgctatggaccctattttgatgttgctagatgaaccaacttcagctctggatccagaattagttgctgaggttttatcagttttaaagagattggttgataaaggaatgacaatgttagttgtcacacatgaattaggatttgcttctaaattggagatag

SEQ ID NO: 274441 - DNA, 297 bp, Unknown
  Bacterial polypeptide expressing nucleotide sequence isolated from the Sargasso Sea
tatgtctaaaaatccagaattcgttaaattcgataaagtagataaaagttatgacggaaaagttcttgtagtcaaagaccttcaattagatattgcagagggcgagtttataaccatgcttggtccatctggatcaggtaagacaacatgtttaatgatgttagctggatttgaaaccccaactcatggtgagatattattagatggaaatataatttcaaatattcctcctcataaaagaggaattggtatggtatttcaaaactatgcattgtttccacatatgacggtttatga

SEQ ID NO: 274442 - DNA, 477 bp, Unknown
  Bacterial polypeptide expressing nucleotide sequence isolated from the Sargasso Sea
tgggtttgcctctaaccatctatgaaaacgtcgcctttgcgccacgacgggctggactcaagaatcgcgcggaactggacgatttagtggagaaatgcctgacccaggcggccctatgggacgaggtcaaggacaggcttaattctctcggcaccaagctttcgggcgggcaacagcagcgccttacaatcgcccgcgcactatcccatcaacccgacattctttgcttggacgaattctccatagccatagatcccgtcaccaccatgaggattgaggcggtcctgcaggaactgaaatccgaactcaccgtaattttggtaaccaacctcgttcaacaggccagacgtctggccaatcgcaccgcctttatcttcaacagcaagctcatagagatagacgatacggagcgaatcttttcaggagaagctcggcaagaaaaaacaaatcagtacgtaagcggggtctttggatgag

SEQ ID NO: 274443 - DNA, 286 bp, Unknown
  Bacterial polypeptide expressing nucleotide sequence isolated from the Sargasso Sea
tatgggactcgaaaaaataagcacttccggcattgtactcaagggagtgcgtaagcgctttgaattagctaggggccaatctgtcgaagccgtcgggcatgtagatctcgacatcgcccggggtgaattcatcgcgctgattggaccatccggatgcggcaaaagcaccctactgagaatgatagcaggccttgaaaaacccagccatggggatattgctatagctggacagacgcctgaagaatgcatcaagcagcaaaaactagggatcgctatgcaggaacat

SEQ ID NO: 274444 - DNA, 673 bp, Unknown
  Bacterial polypeptide expressing nucleotide sequence isolated from the Sargasso Sea
gaagggatcagtttcgatgtaaaaaaaggcgaagtgatctgcatcatcgggccttccggttccggcaaatcgacactgatccgctgcatcaacgccctcaatgacatcaattcgggttcgatcaaggttcatggaagggaggtccacgatcccaagctcgacaagcttgaactccggaaaaaagtaggcatggtttttcagcagttcaaccttttcccccacaagactgccctggaaaacgtgatgatggctccggttctggtactcaagcaaaacaaggaagaggttcggaaacgtgcggaggatctgatccgcaaagtccgtctgcagggcaaggaagacagttacccgggtgaactctccggaggacagcagcaacgtgttgcgatcgcaaggtccctggcgatgaatcccgatgtgatgctttttgacgaggtcacctcggcccttgatcccgagacggtaaaagaggtcctggtcaccatcaaggaactggcccaggaagggatgacctgcatccttgttacccacgagatgggatttgccaaggaagttgcagaccacatctattttaccgacaacggggtgattgtagaacatggccccccttccacgttttttaacgaatccagcgatcctcgtaccagggagttcctcagtcaaatcctctaag

SEQ ID NO: 274445 - DNA, 175 bp, Unknown
  Bacterial polypeptide expressing nucleotide sequence isolated from the Sargasso Sea
gaacgagtactctatagttattgtaacgcattctatgcaacaggcagcaagagtttctataagaacagcttactttcatttaggcaaattaattgaggtaggtaaaacaaaagagatatttacaagacctcgacataatcaaacagaggcatatatttctgggaaaatcggttag

SEQ ID NO: 274446 - DNA, 538 bp, Unknown
  Bacterial polypeptide expressing nucleotide sequence isolated from the Sargasso Sea
tatgtctgaagcagttattaaatgtgagtctgtttataaaatttttggagaaaatgccaaaaaaatgcttcaagaagctaatggaaacgttgacgcaaaaacttttcaagaaaatggatgtatagtcggagttaacaatgcttctttcgaagtagcaaaaggagaaattttggttgtgatgggtttatcaggatcaggtaaatcaacattactcagatgtatttcaagattaacagatgctacaggtggaaaaatttttattgaaggtcaagatttattgcagctaaataacaaagatctcatagatcttagaagaaataaaatggggatggtttttcaaagcttcgcgttgttgccacataaaactgtagttgaaaatatagcatttccattacagattaagggaattaatactgacgatagtattagtaaggcaatggatatggttaagttagttggattagatggaagagaaaattattttccaaaaggactttcaggtggacaacagcaaagagtaggtattgcaagatcctta

SEQ ID NO: 274447 - DNA, 586 bp, Unknown
  Bacterial polypeptide expressing nucleotide sequence isolated from the Sargasso Sea
catgagcacggcgacaaccgagcacgcagtccacgccgacggcatctggaagatcttcaacgagggtcagcccaacgaggtgacagcgctgcaggacgtgcacctgaccgtcgagtccggagaattcatttcgctcatcggaccctccggctgcggcaagtccaccctgctgcgcgtcattgccgacctcaccgacgccaccaaaggcgacatgcgcgtcgccggacacactccccacgaggctcgggagcagcagctctacgggatggcgttccagcaggcagcactcttcgactggcggacggtgcaacgcaacgtggaactccccctggagttgcagggctgggacaaggccaagcgcaaagcccgcgccctggaactcctcgacatggtgcaactcgcggacttcgcggaacaccggccctgggaactgtccggcggcatgcagcagcgcgtagccatcgctcgttcgctggcagtcgacccgacgatccttctgatggacgagccgttcggcgccctagatgagatgacgcgcgaacgcatgcagaacgaactcttgcgcatccgcaagggaacgggcaag

SEQ ID NO: 274448 - DNA, 277 bp, Unknown
  Bacterial polypeptide expressing nucleotide sequence isolated from the Sargasso Sea
gctatttcagttaaacctgaagttattcttatggacgagttttgttctgctttagatcctattgctacagctcaaatagaagaactaattgatgagttaaaaaaagaccatactattataatagttactcattcaatggctcaagcagcaagagtatcccaaaacacaggcttttttcatttgggagaattgatagaacatggttctactgataaaatatttaagaatcctgaaaataaaagaactcaggattatattacagggaggtttggataat

SEQ ID NO: 274449 - DNA, 253 bp, Unknown
  Bacterial polypeptide expressing nucleotide sequence isolated from the Sargasso Sea
atgataaagattaaagcaaaagatgtggatgttttttacggaaaaaaacaggccctctataacataagtttagatattgaagaaaatcaagtaacagcattaattggtccatctggttgtggtaaatcaacttttcttagatgtcttaatagaatgaacgatgtaattgatatctgtaatgttaaaggagaaattctaattaatgactttaatataaatgataaaagttgtgatgtggtaagactcagagaaa

SEQ ID NO: 274450 - DNA, 382 bp, Unknown
  Bacterial polypeptide expressing nucleotide sequence isolated from the Sargasso Sea
tatgaatgatcctattttgtcaatttcagaactagaacgttatttttatcaaggtgataaaaaaatcaatattttgataaatgcagaattaaatttatatcctggaaagttaactgcattaattggaccatctggtgctggtaaaactactttgctaaatattgcaggattgttagaaaaaccaaattcaggaaatgtaaagatatgtaatcaagatacttttaaattatcagaaaaagaaagaacattaattagaagaaaacatattggttttgtgtttcaatcacatagattatttcaagaattttcagcgattgagaatataattattcctcaaatggttaagtggattagaatatgtgaagcaaaaaaaagagcatct

SEQ ID NO: 274451 - DNA, 268 bp, Unknown
  Bacterial polypeptide expressing nucleotide sequence isolated from the Sargasso Sea
gatgaccttcaccagccacatcgcggacgtgccgggcgatcaggtggcgatcagctgcgaagacgtcacgatcagctacggctcctttgaggccgtcaaaggggtgttcctcagcgttccccgcggccaggtcaccgcgttcatcggcccctccggctgcggcaagagcaccgtgttgcgggccctcaaccgcatgaacgacctgatccccagctgccgcctaacgggccgggtagtgtacgaggggcaggatctctacgccgccaac

SEQ ID NO: 274452 - DNA, 187 bp, Unknown
  Bacterial polypeptide expressing nucleotide sequence isolated from the Sargasso Sea
atgaacgaaattaaaataaaatcaaaaaatctaaatgtttattatggtgaaaaacaagctttgtttgatgtaaatttagatttaaacgaaaaagaagttactgctttaataggtccatcaggatgtggaaaatctacctttattagatgtataaacagaatgaacgatgtaattgatatttgtaaag

SEQ ID NO: 274453 - DNA, 682 bp, Unknown
  Bacterial polypeptide expressing nucleotide sequence isolated from the Sargasso Sea
cgaggtgttgaagggaatcagtttcgatgtaaaaaagggcgaagtgatctgcatcatcgggccttccggttccggtaaatcgactttgatccgctgcatcaacgccctcaacgacatcaattcgggttcgatcaaggttcatggaagggaggtccacgatcccaagctcgacaagcttgaactccggaaaaaagtaggcatggtttttcagcagttcaacctttttccgcacaagactgcactggaaaacttgatgatggctccggttctggtactcaagcaaaacaaggaagaggttcggaaacgttcagaggatctgatccgtaaagtccgcctgcagggcaaggaagacagttaccctggagaactctccggaggacagcagcaacgtgtagcgatcgcacggtccctggcgatgaatcccgatgtgatgctttttgacgaggtcacctcggcccttgatcccgagacggtgaaagaggtcctggtcaccatcaaggaactggcccaggaagggatgacctgcatcctcgttacacacgagatgggatttgccaaggaagtcgcagaccacatctattttaccgacaacggggtgattgtggaacatggccccccttccacgttttttaccgaatccagcgatcctcgtaccagggagttcctcagtcaaatcctctga

SEQ ID NO: 274454 - DNA, 612 bp, Unknown
  Bacterial polypeptide expressing nucleotide sequence isolated from the Sargasso Sea
attgggccgaaacgattcgggaaaaaccaatctgcttcgatttttggcgggtttatccagccctgctaaaggccgtttaaaactcaacgaaaaaaatataaccaatactggggctcaaaaccggtcagtggctttagtcgtacaacatttcgttaactaccccaattggaatgttaagcaaaatatcatctcgccaatgctcccaaaaggtctgtcaaaacaagagcaggataaaagagcaacaaacatcgctgagaaaatggggcttggagaactactcgataggatgcctaacgaactgagtggcgggcaacaacaacgactggccatcgcaagagcattagcaaaagaggcacaggtcttattgctagatgaaccttttgcaaatctcgattacaaactcagagaattaatcgcattcgagctgcaagaactacttgctgagcaaggcactatggttatctatgcgacatcaagtcctcgcgaagcctttgccatgggaaatgaaatcttattgcttgccaatcaccaaaaactgcaggcaggcccaattttagacctatatcaaaacccaatcagcaaagaagcggctgacctttttagcgagcccag

SEQ ID NO: 274455 - DNA, 268 bp, Unknown
  Bacterial polypeptide expressing nucleotide sequence isolated from the Sargasso Sea
atcaaaaatgtaaatatggatatctctaaaaataaaattacagcttttattggcccatctggttgtggaaagagtactttgataagaacatttaatagaatgaatgatcttatattgggtgcaaaagttaatggaacaataaattatcaaggtgttgatttatacgacaaaatggttgatccagtgcacgtgaggagaagattcggaatggtttttcctgtacctcatcctttcccaccgcctatcaaagaaaatattacctttgggc

SEQ ID NO: 274456 - DNA, 658 bp, Unknown
  Bacterial polypeptide expressing nucleotide sequence isolated from the Sargasso Sea
tcgatgtaaaaaaggtgaagtgatctgcatcatcggtccttccggttccggcaaatcgaccctgatccgctgcatcaacgccctcaacgacatcaattcgggttcgatcaaggttcatggaagggaggtccacgatcccaaggtcgacaagcttgaactccggaaaaaggtaggtatggtttttcagcagttcaaccttttcccgcacaagactgccctggaaaacgtgatgatggctccggttctggtactcaagcaaaacaaggaagaggttcggaaacgtgcagaggatctgatccgtaaagttcgcctgcagggcaaggaagacagttacccgggtgaactctccggaggacagcagcaacgtgttgcgatcgcacggtccctggcaatgaatcccgatgtgatgctttttgacgaggtcacctcggcccttgatcccgagacggtgaaagaggtcctggtcaccatcaaggaactggcccaggaagggatgacctgcatccttgttacccacgagatgggatttgccaaggaagttgcagaccacatctattttaccgacaacggggtgattgtggaacatggccctccttccacgttttttaccgaatccagcgatcctcgtaccagggagttcctcagtcaaatcctctga

SEQ ID NO: 274457 - DNA, 664 bp, Unknown
  Bacterial polypeptide expressing nucleotide sequence isolated from the Sargasso Sea
aatgattgaaataaagaatcttaataaatcttataacaatcaaattgttctaaataatctctcgatgaagattgataaaggtgacttcatctcaatagttggtccatcaggtgcaggaaagactacgcttttaaatattttaggtacaattgacaattttgataaaaatgacaaaacctcactactatttgaaaaaacagacttaaccaaactaaatgataaagaactgtcatcatttagaaataaaaagattggatttatatttcaatttcatcaattattacctgaattaacagcaaaagaaaatattcttcttccaagtatgattggaaaatttgattctagtaaatctcacgataatttaaataaactttcgagtatacttgacataaataaaatattagataaaaagcccgaatttctttcgggtggtgaaaagcaaagagttgctgtagcaagggcattaattaataatcctagtttattattagctgatgaaccaactggaaatttagactctgacaatgctaaaaaaattcaggaattgtttaaaaaaattaataaggaactgggtataaccattgttttagtaacacacaatgagaaattttcaaaaattgccagaaaatgtttggtattaaaggatggtaagtggtcaaaatag

SEQ ID NO: 274458 - DNA, 757 bp, Unknown
  Bacterial polypeptide expressing nucleotide sequence isolated from the Sargasso Sea
aatgggtaaaattgaagctaaaaacattgtaaaatatttccaacatgatggaaaacctctcaaagcaattggtggagttaatcttactgttaatgatggtgagtttgtatgtattgttggcccatctggatgtggaaaatctacttttcttagaatattggcaggtttggaaaaaccagatgatggagaaatattactcgatggaaaaaagttagttaacacaggtcctgacagaataatggtattccaagaaggtgcattatttccctggttgactgttgaagataatgttgaatatggtctgaaagttgcaggtattcctgaaaaggaacgtcatgatatatcaaaaagatatcttgacatgatgcaattatcacaatttgcaaattcatacacataccaattgtcaactggaatgaaacagcgtgttgccattgctcgtgctcttgtaatggatcctgatgtattactaatggatgaaccatttgctgcacttgattcacaaactagagacttactgttagttgaaatgcaaattatctggcagaagaccaaaaaaactatcatctttgtaacgcacaatgtgcctgaagcagctgtgcttggttctcgagtagcggtatttagtcatagaccttctgttgtaaaaaaatctcttgatattgactataaacgacctcgtgtagcagaagatgaaaacttggcacaatttgaaaaacaaattctctctgcattaagacatcagggaccaaaatag

SEQ ID NO: 274459 - DNA, 757 bp, Unknown
  Bacterial polypeptide expressing nucleotide sequence isolated from the Sargasso Sea
aatgggtaagatagaagctaaaaatattataaaatattttgaacatgatggaaaacctctcaaagctattggtggagtgaatcttactgttaatgatggagagtttgtatgtattgttggtccatcaggatgtggaaaatcaacttttcttagaatattagctggattagaaaaaccagacgatggtgaaatattacttgatggaaaaaaacttgtcaatactggacctgatagaattatggtgtttcaagaaggagcattgttcccttggttgactgtagaagataatgttgagtatggtctgaaggttgcaggtatacctgaaaaggagcgtcatgatatatcgaaaagatatcttgacatgatgcaattatctcaatttgctaattcatacacatatcaattatcaactggaatgaaacaacgtgttgctattgctcgtgctcttgtaatggatcctgatgtattattgatggatgagccatttgctgcacttgattctcaaactcgagacttgcttctagttgaaatgcaaatgatttggcagaaaacaaaaaagaccataatttttgttacgcacaatgtacctgaagcagctgtacttggttcacgagttgctgtgttcagtcatagaccttcagtagtaaagaaatcacttgatattgattacaaacgacctcgtgttgcagaagatgaaaacttgggacaattcgaaaaacaaattcttgccgcattgaggcaccaggggccaaaatag

SEQ ID NO: 274460 - DNA, 281 bp, Unknown
  Bacterial polypeptide expressing nucleotide sequence isolated from the Sargasso Sea
aatgaataatgtaaaaataaaatctaaaaatctaaatgtctattatggagaaaaacaagctttgtttgatgtgaatttagatttaaacgaaaaagaagttactgctttaattgggccatcaggatgtggaaaatctacctttattagatgtataaacagaatgaatgatgtaatcgatatttgtaaggtatctggaaacattgaaatagatggtgttgaaatcaacgataaaaatttagatgtagtatctttaagagaaagagtaggaatgttttcaaaaa

SEQ ID NO: 274461 - DNA, 733 bp, Unknown
  Bacterial polypeptide expressing nucleotide sequence isolated from the Sargasso Sea
tatgtttgataaccaaaaaaaatcaaaatcgttaactcctatagttgtatctaatttatctcttttattaggtaaaactaaaattttggataaaattaaatgtaaaattcataatgaatcaattgttgcagttttaggcccaaatggagctggaaagagtatgtttcttaaaactataaatggattaattgaagtcgattctcgagaaattaactttaattcaatagaaattaacgattacataagaaaagagatagcaatggtctttcaaaaacctacacttttaagaaggtctgttttcgagaatatgcaatttgttttagagagaaaaaacaagttatctaatattgaaattatgaaacttttacaaagagtaagtttagatactttcaaggacaaacctgctagattattgtcaggtggagaacaacaaagattatctcttgcaagggctttgttaattaatccgtccttattacttttagatgagcctactgctaatttagacccttatagtctaaatttaattgaagaaataattttagatgaaaacaaaaaagggaagaccataatcttaactacacatgatatgggccaagcaaaaagattagctaaggaaatacttttttttaataaaggtaaactccttgaacaaacaaaggctattaatttttttaaaaagcctaatacgaaagaagctcaaagctatataaatgggaaaattctcttatga

SEQ ID NO: 274462 - DNA, 235 bp, Unknown
  Bacterial polypeptide expressing nucleotide sequence isolated from the Sargasso Sea
ttgttctgcctagatcctattgctacggcaaaaattgaagaattaattgatgaactaaaaaaaacttacactattgtaattgtgacgcattcaatggcacaggcagttagagtttcgcagaaaacagggttttttcaccttggtaaattaatcgaagtaggcaaaacagagaaaatttttaaaaatcctgacaataaaatgacacaagactatattacaggtaggtttggataaa

SEQ ID NO: 274463 - DNA, 253 bp, Unknown
  Bacterial polypeptide expressing nucleotide sequence isolated from the Sargasso Sea
atgattaagattagtgcaaaaaatgttgatgttttttatggaaaaaaacaagccttgtttaatataaatttagacattgaggaaaatcaggtaacagcattaattggaccatcgggatgtggtaaatctacttttttaagatgcttaaatagaatgaatgatgtaatcgatatatgtaaggtttcaggagagatagttataaatgattttaatataaacgataaagggtgtgacgtagtaagattgccgagaa

SEQ ID NO: 274464 - DNA, 238 bp, Unknown
  Bacterial polypeptide expressing nucleotide sequence isolated from the Sargasso Sea
aatgagtaaaatcaaagcggaaaatgtaaatgtatattacggatccaaacaggcattatttgatgtctctatagatattgcagaaaaagaagttacagctctaattggaccatctgggtgtggaaagtctactttcttaagatgcttgaacaggatgaacgacgtcatagaaatttgtagagttgaaggcagtattaaaatggacaacctagaactgaattcaagaaagttagatgtt

SEQ ID NO: 274465 - DNA, 244 bp, Unknown
  Bacterial polypeptide expressing nucleotide sequence isolated from the Sargasso Sea
ggtcaacaacaacgagttgctattgcgagggctattatcaataaccctgcaattttgttagccgacgaacctactggagcactagactcaaaaaccactgaagatgtattagatctttttgacaaactgcatgaatctggaataactatagttttagttacgcatgaagatgaagttgcaaatcgggcaaaaaaaatagctaaatttaaggatggaagaatagttgaattaaaagttaattaaa

SEQ ID NO: 274466 - DNA, 394 bp, Unknown
  Bacterial polypeptide expressing nucleotide sequence isolated from the Sargasso Sea
ttccgtcgatgaatttggtggtcgctatccttcccagctttctggcgggcagcaacaaagagttggtgtagctcgtgcacttgcggcagcgccagaggtcatccttatggatgaaccttttggtgcacttgatccgataactcgagcggatttacaagaagaattcaaacggatacagcagcagcttaatctcaccgtaattatggttactcatgatatgaccgaggcgctgctgatggcagatcgcatagcagtgatgaaggatggtcaaatactccagattggttcacctaaagaattgcttaatcatccagaacacgactatgttaagagactaattgagatgccgcgaaggagagctagtcggcttgaagaattgatgcgtacgctatga

SEQ ID NO: 274467 - DNA, 933 bp, Unknown
  Bacterial polypeptide expressing nucleotide sequence isolated from the Sargasso Sea
ctatgctggacaccttaacccccggcacttttagcgaaattctggcgtctatgatgtttttgttgaaaccgctaaaacagctgacgacagtcaatagtgattttcagcgtggtatggcagcggcggctaatgtatttttagtgttggatgaaaaacctgaacaagacactggaagcatagagctgaagcaagtgacaggcactatcgaaattaaagatttaagttttaactaccctgggcatgaaaaacaggtgttaaaacagatcaatatcaaagtcgaaccaggccagaccgtggctttagtcggccgttccggcagcggtaaaaccactatttccagcttgttgccacgtttttacgaaatagaacagggcgaaattctgctggatggtatcaataccaaagactgcacactggattcactgcgctcgcaaatggctgtggtatcgcagcaagtggtactgtttaacgacactatcgccaacaacattgcttatggttaccgcggtgaattaagtcctgaacgtttattggaagtggcggaaaaagctcatgtgatggagtttgtcagccaaatgccgatgggacttgatactgaaattggcgaaaacggcgtgactttatccggtggtcaacgtcagcgtatcgccatagcacgtgctttattgcgccaggcgcctgtgcttattctggatgaagcgacttcagccctggatacagaatcagagcgtaaaattcagggcgctttggatgaattatttaaaggccgtaccagtattgttatagcgcaccgattatccaccattgaaaatgccgatcagattttagtgatggatcagggccagattgtagagcagggtactcatcagtccttgctggcacaaaatggctactatgctcagctgtataaaatgcaatttagcgaagtctgat

SEQ ID NO: 274468 - DNA, 724 bp, Unknown
  Bacterial polypeptide expressing nucleotide sequence isolated from the Sargasso Sea
aatgattgaaatagataatctgattaaatcatatggtcaattagatgttattaaaggcatcaacatgaatgttgagaagggggaagtgatcagcattattggagcaagtggttcaggaaaatcaacattactgtattgcatcaatgccttagaaaatatccaaggtggaagaatcattgttgatggaatcgatgctcatgccaaggaaaccgatgtcaacgctcttagaacaaaaattggtatggtctttcaacaatggaatgccttcccgcatttaaccactttagagaatgttgcactcgcacccaggattgtatctaagaaatcaaaaaaggatgccgagaaattagctaaggaacaattggatcatgtaggacttgctgacaaattcaatgtctatccaagaaaattatcaggggggcagcagcaacgccttgctattgcaagagctcttgccatggaacctgattatatgcttcttgatgaagtaacttcagcacttgaccctgaactggtcggggaagtattagacacacttcatcttttaagcaaagaaggtatgaccatgttagtagttacccatgaaataagctttgcaagagaagtgtctgatcgtgtggcattttttaaagatggtttgattgaagaaatcggacctcctgagcaggtcattcagaatccccaaagcccacatacccaacaatttttaagtaatgtccgttag

SEQ ID NO: 274469 - DNA, 267 bp, Unknown
  Bacterial polypeptide expressing nucleotide sequence isolated from the Sargasso Sea
aatgattaaaaacactaaaaagtcgcaaaagaaaaacattttatctcttgaggatgtttctattagttatggcacttttgaagcggtaaaaaatgtttttttaaattttaaagcaggagatataacttcactcattggcccttctggttgtggtaaatcaaccgttcttagagctttgaatagaatgaacgatttaatccctaattgttcgttaaaagggacagtcctctttgatggaactaatatctatgacaaaagaagtagata

SEQ ID NO: 274470 - DNA, 205 bp, Unknown
  Bacterial polypeptide expressing nucleotide sequence isolated from the Sargasso Sea
aatgagtaaaataaaagcagaaaatgtaaatgtatattacggatctaaacaggcattatttgatgtctctatagatatagcagaaaaagaggttacagctttaattggaccatctggatgtggaaagtctactttcttaagatgcttgaacagaatgaacgatgttatagatatttgtagagttgaaggtagtattaaaatggat

SEQ ID NO: 274471 - DNA, 742 bp, Unknown
  Bacterial polypeptide expressing nucleotide sequence isolated from the Sargasso Sea
aatgaatccggaacagcccatcgtttccctgaaagacgttcacaaatccttcggtgatctcgaggtgttgaagggaatcagtttcgatgtaaaaaaaggcgaagtgatctgcatcatcgggccttccggttccggcaaatcgaccctgatccgctgcatcaacgctctcaacgacatcaattcgggttcgatcaaggttcacggaagggaggtccacgatcccaagctcgacaagcttgaactccggaaaaaagtaggcatggtttttcagcagttcaaccttttcccgcacaagactgccctggaaaacgtgatgatggctcccgttctggtactcaagcaaagcaaggaagaggtgcggaaacgagcagaggatctgatccataaagtccgtctgcagggcaaggaagacagttacccgggagaactctccggaggacagcagcagcgtgttgcgatcgcacggtccctggcgatgaatcccgatgtaatgctttttgacgaggtcacctcggctcttgatcccgagacggtgaaagaggtcctggtcaccatcaaggaactggcccaggaagggatgacctgcatcctcgttacccacgagatgggatttgccaaggaagtcgcagaccacatttattttaccgacaacggtgtgattgtggaacatggccccccttccacgttttttaccgaatccagcgatcctcgtaccagggaattcctcagtcaaatcctctga

SEQ ID NO: 274472 - DNA, 949 bp, Unknown
  Bacterial polypeptide expressing nucleotide sequence isolated from the Sargasso Sea
gttggcgcccatccatcgaccgaattccgcagaggccatcatgcagaacccgcaagccgttcccgattacctgatgcagtccgacgcggtgcgcgagcgcttcgagcgcctgaaaacacgcgacgtgatactcgacgtgcgtcatgtcggcaagcgtttcgcgacaccgcagggcgagtgcaccgcactcgacgacatcagtttccgtacctaccggcgcgagttcgtgtgcgtgattggtccgtccggctgcggcaagtcgaccctgatccgcatcctggccgggctcgacgcgcagacgagcggtgaggtgctgctcgacggcaagcccgtggaggggccgggcgccgatcgcggcatggtgttccagggctatacgctgtttccatggctcaccgtgaagaagaacgtgatgttcggcctgcggatgaacggcagcagcagcggccaagccgagcgtgaagcgctgcagtggctcgacctggtcgggctgacgcgtttcgcggatgtctatccgcaccagttgtcgggcgggatgaagcagcgcgtggcgattgcccgcgcgctcgcgaaccgtccacgcatcctgctgatggacgagccgttcggcgcgctcgacgcgcagactcgggcgcggatgcagacgcacctgctcgacatctggcgcaacatcgacgtgacgatcctgttcatcacgcacgatctcgacgaggcgatctttctggcggaccgcattctcgtgctgaaggcgaacccgggggcggtgcaggaactgatcgaggtgcccgtgccaaggccgcgcgactattcgcaggtcaatacgcccgagttcgtcgcgacgaaggcgcggctcgaggcgctgatccatccgaaggaggcagtggccatcgacgacggcgtgcggccgcacatgatccgcatgacggatgtgtcggacaacgtcgagtaa

SEQ ID NO: 274473 - DNA, 195 bp, Unknown
  Bacterial polypeptide expressing nucleotide sequence isolated from the Sargasso Sea
aattaattgatgaattaaaaaaaacttatacgattgtaatagtgacacactcaatggctcaggcagtgcgtgtttctcaaaaaacaggcttttttcacttaggaaagttaatagaagttggaaaaactgagaaaatttttaaaaatcctgacaataaaatgacacaagactatattacaggtagatttggataaa

SEQ ID NO: 274474 - DNA, 649 bp, Unknown
  Bacterial polypeptide expressing nucleotide sequence isolated from the Sargasso Sea
atgagtaaaataaaagcagaaaatgtaaatgtatattacggacctaaacaggcattatttgatgtctctataaatatagcagaaaaagaggttacagctttaattggaccatctggatgtggaaagtctactttcttaagatgcttgaacagaatgaacgatgttatagatatttgtagagttgaaggtagtattaaaatggacgacctagaactcaactcaagaaaattagatgttgtgagacttagggaaaacgttggtatggtttttcaaaagcccaatccgttccctaaaacaatttatgaaaatgtagcttatgggcctactattcacggtattgcacagagcaaagaagaaatggatcaaatagttgaaacaagtctgaaaaaagctgccctgtggaacgaagttaaagatagacttgatgaaatcggaactggtttatcaggaggtcaacagcaacgactatgtattgcaagaactatatctgtaagcccagaagtgattcttatggatgaaccatgttcagcgcttgacccaatagcaacagctcaaattgaagaacttatagatgatcttaaaaaagaggtcacaattgtaatagttacccactcaatgtcacaagcagctagggtatctcaaaaaacag

SEQ ID NO: 274475 - DNA, 754 bp, Unknown
  Bacterial polypeptide expressing nucleotide sequence isolated from the Sargasso Sea
gataaagattaaagcaaaagatgttgatgttttttatggaaaaaaacaagcgctctttaatataagtttagatattgaggaaaatcaagtaacggcattaattggtccatctggttgtggtaaatcaactttcctaagatgtcttaatagaatgaatgatgtaattgatatctgtagtgttaaaggagaaattttaattaatgattttaatatcaatgataaaagttgtgatgtcgtaagactaagagaaaaaattggtatggtttttcaaaaacccaatcctttcccaaaaactttatatgaaaatgtatcttacggtccgacaattcatggtatgtctcaatcaaaacaagaaatggatgaaattgttgaaactagtttgaaaaaggctgcactatgggaagaggtaaaagataggttgcatgaacctggaactggattatctggaggacaacagcaaagactttgtattgctagagcgatttctgtaagacctgaagttatattaatggatgaaccttgttcagcattagatccaatagcaacagcacaaattgaagaattgattgatgagttaaaaaaagagcacacaataataattgtaactcattctatggctcaagcagcacgtgtttctcaaaatacaggtttttttcatttaggacaattgattgaacatggatctactgataaaatatttaagaatcctgataataaaaaaacgcaagattatataacagggaggttcggataa

SEQ ID NO: 274476 - DNA, 532 bp, Unknown
  Bacterial polypeptide expressing nucleotide sequence isolated from the Sargasso Sea
aaagttagatgttgtgagacttagggagaacgttggtatggtttttcaaaaacccaatccattccctaaaacaatttatgaaaatgtagcttatggtcctactattcacggtattgcacagagcaaagaagaaatggatcaaatagttgaaacaagtttgaaaaaagctgccttgtggaacgaagttaaagatagacttgatgaaatcggaactggtttatcaggaggtcaacagcaacgactatgtattgctagagctatatctgtaagtccagaagtgattcttatggacgaaccatgttcagcgcttgacccaatagcaacagctcaaattgaagaacttatagatgatcttaaaaaagaggtcacaattgtgatagttacccactcaatgtcacaagcagctagggtatctcaaaaaacaggtttctttcatttgggaaaacttatagaatttggaccaacagataaaatatttaaaaatcctgataatcagcaaactcaggattatattacaggaaggtttggttaa

SEQ ID NO: 274477 - DNA, 715 bp, Unknown
  Bacterial polypeptide expressing nucleotide sequence isolated from the Sargasso Sea
aaaaaacaagcactctttaatataagtttagatatcgaggaaaatcaagtaacggcattaattggtccatctggttgtggtaaatcaactttcctaagatgtcttaatcgaatgaatgatgtaattgatatctgtaatgttaaaggagaaattttaattaatgactttaatatcaatgataaaagttgtgatgtagtaagactaagagaaaaaattggtatggtttttcaaaaacctaatcctttcccaaaaactttatatgaaaatgtatcttacggtccaacaattcatggtatggctcaatcaaaacaagaaatggatgaaattgttgaaactagtttgaaaaaggctgcactatgggaagaagtaaaagatagattacatgaacctggaactggattatctggaggacaacagcaaagactttgtattgctagagcgatttctgtaagaccagaagttatattaatggatgagccttgttcagcattagatcctatagcaacagcgcaaattgaagaattgattgacgagttaaaaaaagagcacacaataataattgtaactcattctatggctcaagcagcacgtgtttctcaaaatacaggtttttttcatttaggacaattgattgaacatggatctactgataaaatatttaagaatcctgataataaaaaaacgcaagattatataacagggaggtttggataat

SEQ ID NO: 274478 - DNA, 763 bp, Unknown
  Bacterial polypeptide expressing nucleotide sequence isolated from the Sargasso Sea
aatgaccaacattaaaataaaatcaaaaaacttgaatgtttattatggtgataaacaagcattgtttgatgtgaatttagatttgaatgaaaaagaggtaactgcattaattggtccatcaggatgtggtaaatcaactttcataagatgcattaatagaatgaatgatgttattgatatttgtaaagttactggaaatattgaaatggatggtatgaatattaatgataaagatttagacgttgtctcattgagagaaagagttggaatggtttttcaaaagccaaatccttttccaaaaagtatatatgataatatttcgtatggtcctaaaatacatggaaaaggtgaaaccaaaagcgaattagatcaaattgttgaaaacagtttaaaaaaatctgctttatgggaagaagttaaagatagacttgatgaaccaggcacaagtttatctggaggacagcaacaaagactttgtatagcgagagctatatctgttaatcctgaagtgatcttaatggatgaaccatgttcagcattagacccaattgctactgcaaaaattgaagaattaattgatgaattaaaaaaaacttatacgattgtaatagtgacacactcaatggctcaggctgtacgtgtttcacaaaaaacagggttttttcacctaggaaagttaattgaagttggaaaaactgagaaaatttttaaaaatcctgacaataaaatgacacaagactatattacaggtagatttggataa

SEQ ID NO: 274479 - DNA, 413 bp, Unknown
  Bacterial polypeptide expressing nucleotide sequence isolated from the Sargasso Sea
aatgaaaaagattaaagcaaaagatgttgatgttttttacggaaaaaaacaagcgctctttaatataagtttagatattgaggaaaatcaagtaacagcattaattggtccatctggttgtggtaaatcaactttcctaagatgtcttaatagaatgaatgatgtaattgatatctgtagtgttaaaggagaaattttaattaatgactttaatatcaatgataaaagttgtgatgtagtaagactaagagaaaaaattggtatggtttttcaaaaacctaatccttttccaaaaactttatatgaaaatgtatcttacggtccaacaattcatggtatagcccaatcaaaacaagaaatggatgaaattgttgaaactagcttaaaaaaagctgcactatgggaagaggtaa

SEQ ID NO: 274480 - DNA, 642 bp, Unknown
  Bacterial polypeptide expressing nucleotide sequence isolated from the Sargasso Sea
tttgattgaaaatttggctgtatcatacagtggaaaaacagcaatcaaagacattaacatgaaaattccagacaaggcagttactgcattaatcggcccatcaggatgtggaaagaccacacttctacgaaccattaacagaatgcatgatttaacaaaaggtgcagaagttacaggcaaaatcatcattgatggagaaaatgtgtacgattcctacatcaatccaattttacaaagaagaaaaattggaatggtgttccagaaaccaaatccatttccaacaatgtcaatttgggacaatgttgcagcaggattgaagctcaacggtgtaaaagacaagagcatcctaaacgagattatagaagattcattaaagatggcatatctatgggacgaggtgaaagatgaattgaaaaaacctgcagttgcattatcaggaggacaacagcaaagactgtgtattgcaagagcgcttgctatacaaccagaggtattacttatggatgagccagcatctgcactagacccaattgctacacagaaaattgaacaaacaattatcgaattaaagaaacattatacaataattattgtaacacataacatgcaacaagcacttagggtttcagatagaacaggctt

SEQ ID NO: 274481 - DNA, 454 bp, Unknown
  Bacterial polypeptide expressing nucleotide sequence isolated from the Sargasso Sea
ttgattgaaaacttagctgttgcgtacaatggaaaaaaggcaatcaagaatatcaatatgaaaattccagataaagcagttacagcattaattggtccatcaggatgtggaaaaactacacttttacgaacgattaacagaatgcacgatttaacaaaaggtgcagaagttacaggtaaaattatcattgatggagaaaatgtttacgattcctacatcaatccaattttacaaagaagaaaaattggaatggtgttccagaaaccaaatccatttccaacaatgtcaatttgggacaatgttgcagcaggattgaagctcaacggtgtaaaagacaagagcatcctaaacgagattatagaagattcattaaagatggcatatctatgggacgaggtgaaagatgaattgaaaaaacctgcagttgcattatcaggaggacaacagcaaagac

SEQ ID NO: 274482 - DNA, 820 bp, Unknown
  Bacterial polypeptide expressing nucleotide sequence isolated from the Sargasso Sea
aatggttgaaaaaactataaaaaacaaatccattaaagcaaatagctcatctaaaaaatcaaactataccgatgataatttaaataaaaatatatcttttgaaaaacctcttcttgaagcaaaaaatgtgttcgtccattatggaaaaacacttgcagtcaaaaatgttagtattcaggttccttccaataaggttgtttcattgatcggtccttctgggtgcggtaaaagcacacttataagatgcttcaacagaatgaatgacaccataagaattgcaaaaatcgaaggagaaataaaatacaaagaagaaaatatttacaatctagatcctgctgaagttagatataggataggaatggtttttcaaaaacctaatccttttcctaaatccatatatgaaaatgtagcttttgggcccaaggttaatggaattaaagataatctcgatgaattagttgaagcatctttgaaaaaagcagacctttggaaagaagtaaaagataggcttaaagaaaatgcatatggtttatcaggtggtcagcaacaaagactttgtattgcaagatctttagcggtaagcccagaagtaattttaatggatgaaccatgttcagcgcttgatcctatatctacagatagaattgaagaattaattaaagaactctcaaaaacaatgacaattcttatcgttacacataatatgcagcaggcaatcagggtatctgattatgctgcctgcatgatggctggtgaagaaagaataggtgagcttattgagtatggagaggttgaccaaattttttggaaatccaattga

SEQ ID NO: 274483 - DNA, 360 bp, Unknown
  Bacterial polypeptide expressing nucleotide sequence isolated from the Sargasso Sea
tatgggacgaggttaaagataatcttcatcggaaaggaacttttttatctggaggtcaacaacaacgactatgcattgctcgagctcttgcattgaaacctaaaatattacttttagatgaacctacatctgcacttgaccctaaatcaacatcaaatatagaggaccttattatagaattaaaatctacggttacaattgttatggttacacataatattggacaggcatcacgggtctctgactatactgcatttttatatttaggaaaattaattgaatatggggataccggaaaattatttactgcacccgataataagctaactgaagaatatctaacacgtaagtttggatgat

SEQ ID NO: 274484 - DNA, 625 bp, Unknown
  Bacterial polypeptide expressing nucleotide sequence isolated from the Sargasso Sea
aatgaacgacttaattgagacagcgaaagttaccggagaagtcaaatttcgtggaattaatctttatgactcacaagtagatccagtagcggttcggcgtcgcattggaatggtatttcaaaaaccaaacccgttcccgaaaaccatttacgacaatgtggcgtttggtccaagagttggagggatgaaaaaagaattagacgaggttgttgaacaatcacttcaaaaagcagccctatgggatgaggtaaaagatcgattaaaagattcagcccttggattatctggtgggcagcaacaaagactttgtatcgctcgagctttagcggttgggcctgaagtcttactcatggatgagccctgttctgcgttagatccaatagctacaacacggatagaagacctgatgcaggaacttaaagaagaatattcaatagtgattgtcacccacaacatgcaacaagctgcccgtgtgagtagtagaacggctttcttttcaactgagcccggagcagataacactcgtcccactggcgtgatgatcgaatgtgattcaaccgaaaagattttttctaccccagaagaccaacgcacagaaaactacgtaacaggaagatttgggtaa

SEQ ID NO: 274485 - DNA, 520 bp, Unknown
  Bacterial polypeptide expressing nucleotide sequence isolated from the Sargasso Sea
aatgagtaaaattatagcagaaaatgtaaatgtatattacggatctaaacaggcattatttgatgtctctatagatattgcagaaaaagaggttacagctttaattggaccatctggatgtggaaagtctactttcttaagatgcttgaacagaatgaacgatgttatagatatttgtagagttgaaggtagtattaaaatggatgacctagaactcaactcaagaaaattagatgttgtgagacttagggaaaacgttggtatggtttttcaaaaacccaatccgttccctaaaacaatttatgaaaatgtagcttatggacctactattcacggtattgcacagagcaaagaagaaatggatcaaatagttgaaacaagtctgaaaaaagctgccctgtggaacgaagttaaagatagacttgatgaaatcggaactggtttatcaggaggtcaacagcaacgactatgtattgcaagagctatatctgtaagcccagaagtgattcttatggatgaa

SEQ ID NO: 274486 - DNA, 565 bp, Unknown
  Bacterial polypeptide expressing nucleotide sequence isolated from the Sargasso Sea
aatgataaagattaaagcaaaagatgttgatgttttttacggaaaaaaacaagcactctttaatataagtttagatattgaggaaaatcaagtaacggcattaattggtccatctggttgtggtaaatcaactttcctaagatgtcttaatagaatgaatgatgtaattgatatctgtagtgttaaaggagaaattttaattaatgactttaatatcaatgataaaagctgtgatgtagtaagactaagagaaaaaattggtatggtttttcaaaaacctaatcctttcccaaaaactttatatgaaaatgtatcttacggtccaacaattcatggtatagctcaatcaaaacaagaaatggatgaaattgttgaaactagcttaaaaaaagctgcactatgggaagaggtaaaagataggttgcatgaacctggaactggattatctggagggcaacaacaaagactttgtattgctagagcaatttctgtaagacctgaagttatattaatggatgagccttgttcagcattagatcctatagcaacagcacaaattgaagaa

SEQ ID NO: 274487 - DNA, 340 bp, Unknown
  Bacterial polypeptide expressing nucleotide sequence isolated from the Sargasso Sea
atgataaagattaaagcaaaagatgttgatgttttttacggaaaaaaacaagcactctttaatataagtttagatattgaggaaaatcaagtcacggcattaattggtccatctggttgtggtaaatcaactttcctaagatgtcttaatagaatgaatgatgtaattgatatctgcagtgttaaaggagaaattttaattaatgactttaatatcaatgataaaggttgtgatgtagtaagactaagagaaaaaattggtatggtttttcaaaaacctaatcctttcccaaaactttatatgaaaatgtatcttacggtccaacaattcatggtatagc

SEQ ID NO: 274488 - DNA, 814 bp, Unknown
  Bacterial polypeptide expressing nucleotide sequence isolated from the Sargasso Sea
atgaccactagagacagaatagaggatattgaaaccattggaaaaccaaatgttgagaatcctttcatttcagcaaaaaatgtaaatgttcattatggcgataatcatgctattaaggatgtcagtcttcaaattgccaagaatcaggtgattgcactgataggtccctccggttgtggaaagtcaacctttattaggtgcattaaccgcatgaatgacaccattgatatagcaaaaattactggaaaaatatcattagatggggaggacatctatagtgaaaaacttgaccccgttattcttagagcaagagttggaatggttttccaaaaacccaatcctttccccaaaagtatttatgataatgtcgcatacggaccaagaatccatggtcttgcaaaagatcgaaatgaattagatgaaatagttattaatagcctccaaaaagcagggctctatgaggaagtcagcgatcgattggatgagtcgggtctaagcctatcagggggacaacaacagcgactgtgtatagccagaacaatcgcagttaaccccgaagttatcctaatggatgaaccttgctcagcactcgatccaattgctacagcaagaattgaaaatttaatagatgagctatcagaaaaattttcaattgtcattgtgacgcattccatgcagcaagctgcgagggtttcgcagagagttgcatactttcatttagggagattggttgaagtcgatgatacagagaaagtatttactaacccatcacacattcttactcaggattatatcactggtcgaattggctaac

SEQ ID NO: 274489 - DNA, 499 bp, Unknown
  Bacterial polypeptide expressing nucleotide sequence isolated from the Sargasso Sea
aggtatttataaattaaatggtattcctgttgagaatttatctgatgatgagctcgcggaaatacgtaaccaaaaattaggcttcgtttttcaacaatttcatcttctttcagacgcaactgcacttgaaaacgtaactttgcccatgatttatgctggtattgagcctgagcaaagattagagcgaggtaagaatgccttaaaaaaagttggtctttcagaaaggatgaataatcgcccaaaccaattatcagggggtcaacaacaacgagttgctattgcgagggctattatcaataaccctgcaattttgttagccgacgaacctactggagcactagactcaaaaaccactgaagatgtattagatctttttgacaaactgcatgaatctggaattactatagttttagttacgcatgaagatgaagttgcaaatcgggcaaaaaaaatagctaaatttaaggatggaagaatagttgaattaaaagttaattaa

SEQ ID NO: 274490 - DNA, 278 bp, Unknown
  Bacterial polypeptide expressing nucleotide sequence isolated from the Sargasso Sea
aatggaccaagccgaggagacggcaaataaaatgtcgacccgcaatcttgatgtctattacggggataaacaggcgttatttgatatcaatgtagatattccagagcgttcagttaccgcgctgattgggccttcgggttgtggtaagtcgaccttcatacgatgccttaacaggatgaatgacacgatagatgggtgcagggttgaaggcgatatttatattgataagtcagacatctacgaccggggtctagatgtagtcgaattaagggcgcgca

SEQ ID NO: 274491 - DNA, 763 bp, Unknown
  Bacterial polypeptide expressing nucleotide sequence isolated from the Sargasso Sea
atgaataatattaaaataaaatcaaaaaatttaaatgtttattatggtgataaacaagcgttgtttgacgttaatttagatttgaatgaaaaagaggtaacagcattaattggtccatcaggatgtggtaaatcaacttttataagatgcattaatagaatgaatgatgttattgatatttgtaaagttaccggaaatattgaaatggatggtatgaatattaatgataaagatctggatgttgtctcattgagagaaagagttggaatggtttttcaaaagccaaatccttttccaaaaagtatatatgataatatttcgtatggtcctaaaattcatggaaaaggtgaaacgaaaagtgaattagatcaaattgttgaaaacagtctaaaaaaatctgctttatgggaggaagttaaagatagactagatgaaccaggcacaagtttatctggaggacagcaacaaagactttgtatagcgagagctatatctgttaatcctgaagtgatcttaatggatgaaccatgttcagcattagacccaattgctactgcaaaaattgaagaattaattgatgaattaaaaaaaacttatacgattgtaatagtgacacactctatggctcaggcagtgcgtgtctcacaaaaaacagggttttttcacctcggaaagttgattgaagttggaaaaactgagaaaatttttaaaaatcctgacaataaaatgacacaagattatattacaggtagatttggataaa

SEQ ID NO: 274492 - DNA, 564 bp, Unknown
  Bacterial polypeptide expressing nucleotide sequence isolated from the Sargasso Sea
ttttaattaatgactttaatatcaatgataaaagttgtgatgtagtaagactaagagaaaaaattggtatggtttttcaaaaacctaatccttttccaaaaactttatatgaaaatgtatcttacggtccaacaattcatggtatggctcaatcaaaacaagaaatggatgaaattgttgaaactagtttgaaaaaggctgcactatgggaagaagtaaaagatagattacatgaacctggaactggattatctggaggacaacagcaaagactttgtattgctagagcgatttctgtaagaccagaagttatattaatggatgagccttgttcagcattagatcctatagcaacagcgcaaattgaagaattgattgacgagttaaaaaaagagcacacaataataattgtaactcattctatggctcaagcagcacgtgtttctcaaaatacaggtttttttcatttaggacaattgattgaacatggatctactgataaaatatttaagaatcctgataataaaaaaacgcaagattatataacagggaggtttggataat

SEQ ID NO: 274493 - DNA, 457 bp, Unknown
  Bacterial polypeptide expressing nucleotide sequence isolated from the Sargasso Sea
atgataaagattaaagcaaaagatgttgatgttttttatggaaaaaaacaagcgctctttaatataagtttagatattgaggaaaatcaagtaacggcattaattggtccatctggttgtggtaaatcaactttcctaagatgtcttaatagaatgaatgatgtaattgatatctgtagtgttaaaggagaaattttaattaatgattttaatatcaatgataaaagttgtgatgtcgtaagactaagagaaaaaattggtatggtttttcaaaaacccaatcctttcccaaaaactttatatgaaaatgtatcttacggtccaacaattcatggtatggctcaatcaaaacaagaaatggatgaaattgttgaaactagtttgaaaaaggctgcactatgggaagaggtaaaagataggttgcatgaacctggaactggattatctggaggacaac

SEQ ID NO: 274494 - DNA, 283 bp, Unknown
  Bacterial polypeptide expressing nucleotide sequence isolated from the Sargasso Sea
gctagagcgatttctgtaagaccagaagttatattaatggatgagccttgttcagcattagatccaatagcaacagcacaaattgaagaattgattgatgagttaaaaaaagagcacacaataataattgtaactcattctatggctcaagcggcacgtgtatctcaaaatacaggtttttttcacttaggacaattgatagaacatggatctactgataaaatatttaagaatcctgataatacaaaaacccaggactatataaccgggaggtttggataat

SEQ ID NO: 274495 - DNA, 510 bp, Unknown
  Bacterial polypeptide expressing nucleotide sequence isolated from the Sargasso Sea
cggaaaaaggttggaatgtatttcaaaagccaaatccgttcccaaaaacatggtacgaaaatattgcgtatggcccaaccatccacgggatggcgacaacaaaacatgaaatggatgagatagttgagaaaagtctcaggagggccgcactatgggatgaggttaaagaccgccttcatgaaattgcgactggtctatcaggtgggcagcagcaaaggttgtgcatagcgcgggcaatctcgatcgaacccgaagtcattcttatggatgagccatgttcagcattagatcctattgcgaccgcaaaaatcgaggaattaatggatgaactgcgacaaaactttacaatagttattgtgacacactccatgcagcaagcagcgcgggtgtcacagcgcacggcattttttcatcttggcaatctggtggaatcaggcgagacggatcagattttcacgacgccatccaatcagaagaccgaggattacattaccggccgctttggatgag

SEQ ID NO: 274496 - DNA, 631 bp, Unknown
  Bacterial polypeptide expressing nucleotide sequence isolated from the Sargasso Sea
aatgataaagattaaagcaaaagatgtggatgttttttacggaaaaaaacaggccctctataacataagtttagatattgaagaaaatcaagtaacagcattaattggtccatctggttgtggtaaatcaacttttcttagatgtcttaatagaatgaacgatgtaattgatatctgtaatgttaaaggagaaattctaattaatgactttaatataaatgataaaagttgtgatgtggtaagactcagagaaaaaattggaatggtttttcaaaaacctaatcctttcccaaaaactttatatgaaaacgtatcctatggaccgacaatccatggtatggctcaatcaaaacaagaaatggatgagattgttgaaactagtttaaaaaaggctgcattatgggaagaggtaaaagatagattgcatgagcctggaactggattatctggaggacagcaacaaagactttgtatcgcaagagcaatttctgtaagacctgaagttatattaatggatgagccttgttcagcattagatccaatagcaactgcacaaattgaggaattaattgatgagttaaaaaacggagcatacaataataattgttactcattctatggctcaagctgc

SEQ ID NO: 274497 - DNA, 430 bp, Unknown
  Bacterial polypeptide expressing nucleotide sequence isolated from the Sargasso Sea
atgagcaaagtaaaagtatcttcaaaaaatgttaatgtgcattacggaaccaaacaagcactccattcagtatcattagatattaacgagaatgaagttactgctttaattggtccttctggatgtggaaaatctacttttttgagatgtatcaacagaatgaatgatttgattgatatttgcaaagtggatggctcaattacagttgataatgaagaaattatttctgatgaagttgatgtggtaagtttgagatcaaaaattggaatggtatttcaaaaaccaaatccattccctaaatctattttcgataatgttgcatatggcccaactattcacggcatagacgaaagcaaatcagatttagaggaaatagttcattcatcattaaaaagggctgggcttttaaaagaagtacaagatcgcttgc

SEQ ID NO: 274498 - DNA, 679 bp, Unknown
  Bacterial polypeptide expressing nucleotide sequence isolated from the Sargasso Sea
ttattggtcctcaggatgtggtaaatcaaccgtcattagggcaatcaaccgaatgaacgatttaatagaaggttgcaaattatcaggcagtgttatttttgaaggtatagatatatatgcagaggatatagatccagttgaagttagaaggagaattggaatggtttttcaacaacccaatccttttcctaaaagtatttacgaaaatattgcctttggtgcaagagttaatggatttaaaggtaatatggatcaattagtagaagaatctcttataaaggcagctgtttgggatgagtgcaaggataaattaaacgaaagcggatattcattatctggtggtcaacaacaaagattatgcatagcaaggacaattgctattgaacctgatgtaatcttaatggatgagccatgttcagcacttgatccattatctacattaaaaattgaagagacaattcatgaattaaagaagaattttacaataattattgttacgcataatatgcaacaagccaatagagtcagtgattacacagcctttttcaacacagagagaaaagataaggatttaggtgggaaaattggatttttagttgaatttgataaaacaaaaaacatgttcaattcaccaaagcaaaaatcaactcaagactatatctcaggaaaatttggataa

SEQ ID NO: 274499 - DNA, 544 bp, Unknown
  Bacterial polypeptide expressing nucleotide sequence isolated from the Sargasso Sea
atgattaaaactaataaaaaaactccaaaaaatatcattttatcccttgagaatgtttctattagctatggaacttatgaagcagtaaagaatgttttttgtaattttaaaaaaggaaatataacttctcttattggcccttcaggttgcggaaaatcaacggttcttagatctttaaataggatgaatgatcttattcctaattgctcgttaaaagggactgtactctttgatggaactaatatttacgataaaagagtagatccagttgaagtaagaagaagaattggtatggtttttcaacaacctaatccttttcctaaatctatttacgaaaatattgcatttggggcaagaattaatggctttacgggagatatggatgaattagtggaaagttctcttagaaaggctgctttatgggacgaatgtaaggataaattaaatgatagtggttactctttatctggtggacaacaacagagattatgtattgctcgaacgattgcaattgaacctgaaataattctaatggatgagccat

SEQ ID NO: 274500 - DNA, 604 bp, Unknown
  Bacterial polypeptide expressing nucleotide sequence isolated from the Sargasso Sea
aatgataaagattaaagcaaaaaatgtagatgttttttatggaaaaaaacaagctctctataatataggtttagatattgaagaaaaccaagtaactgcattaattggtccatctggttgtggtaaatcaacttttcttagatgtcttaatagaatgaatgatgtaattgacatctgcagggttaaaggagaaattttaattaacgactttaacataaatgataaaagttgcgatgtagtgagactcagagaaaaaattggtatggtttttcaaaaacctaatcctttcccaaaaactgtatacgaaaatatatcttacggtccaacaattcacggtatggctcaatcaaaacaagaaatggatgaaattgttgaaactagtttaaaaaaggctgcgctatgggaagaagtaaaagacagattgtatgaacccggaaccggattatctggaggacaacagcaaagactgtgtattgctagagctatttctgtaagaccagaagttatattaatggatgagccttgttcagcattagatccaatagcaacagcacaaattgaagaattgattgatgagttaaaaaaggagcatacaataataatt

SEQ ID NO: 274501 - DNA, 526 bp, Unknown
  Bacterial polypeptide expressing nucleotide sequence isolated from the Sargasso Sea
gatgtagtatctttaagagaaagagtaggtatggtttttcaaaaaccaaacccattcccaaaaagtatatatgataatatttcttatggtccaaaaattcatggaaaaggtgaaactaaaagtgaattagatgaaattgtggaaaatagtttaaagaaagctgcattgtgggaagaagttaaagatagacttgatgagccaggtacaggtctatcaggtggtcaacagcaacgtctttgtattgcaagagcaatttctgtaaatcctgaggttatattgatggatgaaccttgttcagctttagacccgatagcaacagcaaaaattgaggaattaatagatgagcttaaaaaaacctatactatagtaattgtaactcattcaatggcacaggcagttagagtttcacagaaaacagggttttttcatcttggtaaactaattgaagtaggcaaaacagagaaaatttttaaaaatcctgacaataaaatgacacaagactatattacaggtagatttggataaa

SEQ ID NO: 274502 - DNA, 367 bp, Unknown
  Bacterial polypeptide expressing nucleotide sequence isolated from the Sargasso Sea
cgtaactttgcctatgatttatgctggtattgagcctgagcaaagattggagcgaggtaaagatgccttaaaaaaagttggtctttcagaaagaatgaataatcgcccaaaccaattatctggaggccaacaacaacgagttgctattgccagggctattatcaataatccagcaattttgttggcagacgaacctactggagcgctagattcgaaaaccactgaagatgttttagatctttttgacaaactgcatgaatctggaataaccatagttttagttacgcatgaagatgaagttgcaaatcgcgcaaaaaaaatagctaaatttaaggatggaagaatagttgaattaaaagttaattaa

SEQ ID NO: 274503 - DNA, 409 bp, Unknown
  Bacterial polypeptide expressing nucleotide sequence isolated from the Sargasso Sea
aatgaacgaaattaaaataaaatcaaaaaatttaaatgtctactatggtgaaaaacaagctttatttgacgtgaatttggatttaaacgaaaaagaagtcacagctttaattggtccatctggatgtgggaaatctactttcatcagatgtattaaccggatgaacgatgtaatcgatatttgcaaagtgtctggaaacattgaaatagacggtgttgaaatcaatgacaaaaatttagatgtagtatctttaagagaaagggtaggaatggtttttcaaaaaccaaacccattcccaaaaagtatatatgataatatttcttatggtccaaaaattcatggaaaaggtgaaactaaaagtgaattagatgaaattgtggaaaatagtttaaagaaagctgcattgtgg

SEQ ID NO: 274504 - DNA, 274 bp, Unknown
  Bacterial polypeptide expressing nucleotide sequence isolated from the Sargasso Sea
atttctgtaagacctgaagttatattaatggatgaaccttgttcagcattagatccaatagcaacagcacaaattgaagaattgattgatgagttaaaaaaagagcacacaataataattgtaactcattctatggctcaagcagcacgtgtttctcaaaatacaggtttttttcatttaggacaattgattgaacatggatctactgataaaatatttaagaatcctgataataaaaaaacgcaagattatataacagggaggttcggataat

SEQ ID NO: 274505 - DNA, 424 bp, Unknown
  Bacterial polypeptide expressing nucleotide sequence isolated from the Sargasso Sea
atgagtaatattaaaataaaatcaaaaaatttagatgttttttatggtgataaacaagcattgtttgatgtcaatttagatttaaatgaaaaagaagtcactgcattaattggaccatctggttgcgggaagtctacttttataagatgtataaatagaatgaatgatgttatcgatatttgtaaggttacaggaaatatcgaaatggatggtatggacattaatgataaaaatttagatgtggttgcattaagagaaaaagttggaatggtttttcaaaaacccaatccatttccaaaaagtatatatgataatatttcttatggtccaaaaattcatggaaaaggtgaaacgaaaagtgaattagatcaaattgtcgaaaatagtctaaaaaaatctgctttatgggaggaagttaaagata

SEQ ID NO: 274506 - DNA, 182 bp, Unknown
  Bacterial polypeptide expressing nucleotide sequence isolated from the Sargasso Sea
tatgaacaatgtaaaagtgtctaccaaaaatgtgaatgtgcattacggcactaagcaagcgcttcaccgagtaacacttgatatcaatgaaaaggaagttacagcactgattggaccttctggttgtggtaaatctacttttctaagatgtataaatagaatgaatgatttaattgatattt

SEQ ID NO: 274507 - DNA, 640 bp, Unknown
  Bacterial polypeptide expressing nucleotide sequence isolated from the Sargasso Sea
ctgcggaaaatcaacatttctaagatgtctaattagaatgaatgatgtgatagatatttgcaaagttcaaggtgagtttcatctgaatggaattgatatttatggtccagaaattcaagtcgaaaatcttcgcaagcaggttggtatggtatttcagaaacccaatccttttccaaaaactatatatgaaaatgttgcttatggaccaaagattcatggtcttgcatctacaaaatcagagcttgatgatatcgtcaaggatactctaaaccgtgccggcttatatactgaagtaaaggatagattggacgacatagcgaccggtctatcgggtggccagcaacaaagattgtgtattgcaagagcgattgcaataaagccagagataatacttatggatgaaccgtgctctgcattggatccaattgcaactgccgttattgaagagctgataaacgaattaaaagaaaactacactattgtcattgttacacactcgatgcagcaagctgcaagaatatcagataaaaccgcatattttcatttgggtgaaatgattgaatttggcataacttcaaatatttttacaaaccctaatcatgaaatgactgaagcttatatttctggtagaataggatag

SEQ ID NO: 274508 - DNA, 588 bp, Unknown
  Bacterial polypeptide expressing nucleotide sequence isolated from the Sargasso Sea
tatgacagaaaaaattaaaataaaaagtaaaaatgttaatgtttactatggccagaagaaagcacttgataaaatcaatcttgaaattcctacaaataaggtcacagccttaataggtccaagtggttgtggaaaatctacttttcttagatgtataaatcgtatgaatgatacgattgatatttgtaggatagaaggaaaaattattgttgatgaagaagatatatattccacagaagtcgacccggttttactgagggcaaagataggaatggtgttccaaaaacctaatccattccctaagtcaatttttgataatgttgcctacggaccaaaaattcatggaattgttaatagcgatgatgaattagaggagctagttatatatagcttaaaaaaagctggtttgtttgaagaggtaaaagataggctaaatgattcaggaacctctttatcgggaggacaacagcaaagactatgcatagccagagccattgcaattagtccacaaatcattctaatggatgaaccttgctcagcactagatccaatagccactgctgtaattgaagaactttatgatgagtt

SEQ ID NO: 274509 - DNA, 553 bp, Unknown
  Bacterial polypeptide expressing nucleotide sequence isolated from the Sargasso Sea
gattttaatatcaatgataaaagttgtgatgtcgtaagactaagagaaaaaattggtatggtttttcaaaaacccaatcctttcccaaaaactttatatgaaaatgtatcttacggtccaacaattcatggtatggctcaatcaaaacaagaaatggatgaaattgttgaaactagtttgaaaaaggctgcactatgggaagaggtaaaagataggttgcatgaacctggaactggattatctggaggacaacagcaaagactttgtattgctagagcgatttctgtaagacctgaagttatattaatggatgaaccttgttcagcattagatccaatagcaacagcacaaattgaagaattgattgatgagttaaaaaaagagcacacaataataattgtaactcattctatggctcaagcagcacgtgtttctcaaaatacaggtttttttcatttaggacaattgattgaacatggatctactgataaaatatttaagaatcctgataataaaaaaacgcaagattatataacagggaggtttggataat

SEQ ID NO: 274510 - DNA, 305 bp, Unknown
  Bacterial polypeptide expressing nucleotide sequence isolated from the Sargasso Sea
acagcaacaaagactttgtatagcgagagctatatctgttaatcctgaagtgatcttaatggatgaaccatgttcagcattagacccaattgctactgcaaaaattgaagaattaattgatgaattaaaaaaaacttatacgattgtaatagtgacacactcaatggctcaggctgtacgtgtttcacaaaaaactgggttttttcacctaggaaagttaattgaagttggaaaaactgagaaaatttttaaaaatcctgacaataaaatgacacaagactatattacaggtagatttggataaa

SEQ ID NO: 274511 - DNA, 442 bp, Unknown
  Bacterial polypeptide expressing nucleotide sequence isolated from the Sargasso Sea
acaccggagacatggatgagcttgtggagcgttccctccgccaggcggcgggtttgggatgagtgcaaagacaagctgaatgaaagcgggtattcgctctccggcggacagcagcagcgcctctgcatcgcgcgcacgatcgcgattcagccagaggtcatcctcatggatgagccctgctcagcccttgatcccatctcaacgctgaagatcgaggagacgatgcatgagctcaagaagagcttcaccatcgtgatcgtcacccacaacatgcagcaggccgttcgcgtcagcgacatgaccgccttctacaacgcagaggccgttgaaggaggaaccggaaaggtgggttacctcgtggaattcaacgagaccgacaagatcttcaacgccccccaacagcaggccacccaggactacgtctccggtcgtttcggctgat

SEQ ID NO: 274512 - DNA, 872 bp, Unknown
  Bacterial polypeptide expressing nucleotide sequence isolated from the Sargasso Sea
agatattgcagaaggagagtttattactatgcttggtccatctggctcaggtaagacaacatgtttaatgatgttagctggatttgaaacaccaactcatggtgaaatattattagatggaaatataatttcgaatattcctccgcataaaagaggaattggaatggtgtttcaaaattatgcattatttccacatatgacagtttacgaaaatttagcttttccattaagagtaagaaaagttgaaaaagatgaaatagataaaaaagttgataaagcattatcaatggtttcattaaatggatttgaaaccagaatgccagctcagctttcaggtggtcagcaacaaagagttgctgttgcaagagctttagtatttgacccagcagttgttttgatggatgaacctttaggtgcattagataaaaatttgagagaaagtatgcaatatgaaattaaacatattcatgaaagcatcggtgttacagtagtatatgtaactcatgatcaaagtgaagcattaactatgtcaaatagaattgctgtatttaatgatggaaaagttcaacaactttcaaatcctgctgagctttatgaaaaacctgtaaattcatttgttgcagagtttattggtgaaaataatacttttaatggagaaatagtagatattgataaagataaatgtaaagttaaattagctaattcagaaatattagctaatcctatatcagtaaagtctaaaggtgaaaaaactactgtttcattgagacctgaaagagcattgataaatccaagtgaaaaaatggataatatgtttactggtaagattgaagaggtaatttatcacggagatcatacaagggttagattaa

SEQ ID NO: 274513 - DNA, 666 bp, Unknown
  Bacterial polypeptide expressing nucleotide sequence isolated from the Sargasso Sea
cctcactaattggtccctcaggctgtggtaaatccacttttcttaggtgcttgaacaggatgaatgacgttattgactcatgtaaagttcaaggtgaattcctattaaacggagttacagatatttatggagatagcattcaagttgaaacgcttagagaaaagatcggaatggtttttcaaaaaccaaacccttttccaaaatcaatttttgaaaatgtcgcctatggacctaaaattcatgggctggcatcaacccaaagtgagttgaacgatatagtaatggagtccttaaatcgagcaggtttatatgaagaagtaaaagatagaatggatgacatagccacaggtttgtctggaggacagcaacaaagactttgtatcgctcgagccattgccattaggcctgaaatcattttgatggatgaaccatgctcagctttagacccaattgcaactgctagaatagaagaattaatcaatgaattgaaagaaaactatactattattattgttacacactctatgtcacaagcttctcgtatctctcaaagaactgcattttttcacttaggcaagttaattgaacatggtgatacaagtaaaatttttacaaaaccagataaagaacaaacaaacgattatataacaggaaggtttggataga

SEQ ID NO: 274514 - DNA, 450 bp, Unknown
  Bacterial polypeptide expressing nucleotide sequence isolated from the Sargasso Sea
aatgagtaaaataaaagcggaaaatgtaaatgtttattacggatccaaacaggcattatttgacgtctctatagatatagcagaaaaagaagttacagctttaattggaccatctgggtgtggaaagtctactttcttaagatgcttgaacaggatgaacgacgtcatagaaatttgtagagttgaaggcagtattaaaatggacaacctagaactgaattcaagaaagttagatgttgtgagacttagggagaacgttggtatggtttttcaaaaacccaatccattccctaaaacaatttatgaaaatgtagcttatggtcctactattcacggtattgcacagagcaaagaagaaatggatcaaatagttgaaacaagtttgaaaaaagctgccttgtggaacgaagttaaagatagacttgatgaaatcggaactggtttatcagg

SEQ ID NO: 274515 - DNA, 823 bp, Unknown
  Bacterial polypeptide expressing nucleotide sequence isolated from the Sargasso Sea
atgaccacctcacaactacaaactgaacagcatcaggtctcggacgacaccgcgatctcaatccagaacgtcaccatcagctacggcagctacgaagccgtgaagaacgtttactgcgatgttccacgcggaaaagtcaccgccttcatcggtccatccggctgtggtaagtcgacggtgctgcgtgctctcaaccgcatgaacgatctgatcgagggatgttccctcaagggtcgtgttttgtttgacggtgtcgatctttacggtgccagtgttgaccctgttgaagtgcgccgtcggatcgggatggtgttccagcagcccaaccctttccccaagagcatctacgagaacattgccttcggtgcccggatcaacggtttcaccggtgacatggatgaactggtcgaacggtccctgcgccaggccgccgtctgggacgaatgcaaggacaagctgaatgaaagtggttattccctctcgggtggtcaacagcagcgcctctgcattgcacgcacgattgccatccagccggaagtgattctgatggatgaaccttgttcggctctggacccgatctccacattgaagatcgaggaaacgatgcacgaactcaagaagagcttcaccatcgtgatcgtgacccacaacatgcagcaggccgttcgcgtcagcgacatgacagcgttctacaacgcagaggcagttgaaggcggcagcggcaaggtgggctacctggtggaattcaacgagaccgagaagatcttcaactcccctcaacagcaggccactcaggactacgtctccggccgtttcggttgat

SEQ ID NO: 274516 - DNA, 811 bp, Unknown
  Bacterial polypeptide expressing nucleotide sequence isolated from the Sargasso Sea
atgtcaaaaaatccagaatttgttaaatttgataaagttgacaaaagctatgatggtaaagttctagttgtaaaagatcttcagttagacattgcggaaggtgagttcattactatgcttggtccctctggatctggcaaaacaacatgtttgatgatgcttgctggctttgaaactccaacaaacggagagattttgttagatggaaatataatttctaacattccacctcacaaaagaggaataggaatggtgtttcaaaattatgcactttttcctcatatgactgtttatgaaaatttagctttccccttaagagttagaaaaatggaaaaagatgaaattgataagaaagttgaaaaagctttatcaatggtttcactaaatgggtttgaaacaagaatgccaggacaactttcaggaggacaacaacaaagggtagctgtagctagagctttagttttcgatcccgcagtagttttgatggacgaacctttaggtgcactggataaaaatttaagggagagtatgcagtatgaaattaaacatattcatgaaagcattggagtaactgtagtttacgttactcatgatcaaagtgaagctcttacaatgtcgaatagaattgcagtgtttaatgatggaaaagttcaacagctatcaaatccttcagagctttacgaaaaaccagtaaattcatttgtcgcagagtttattggtgaaaataatacctttaatggtgaagtatcagatatttcaggagatgaatgtaaagttaagctatctaatggagaaataatagccagcgcta

SEQ ID NO: 274517 - DNA, 443 bp, Unknown
  Bacterial polypeptide expressing nucleotide sequence isolated from the Sargasso Sea
ttacggtccaacaattcatggtatggctcaatcaaaacaagaaatggatgaaattgttgaaactagtttaaaaaaggctgcactatgggaagaggtaaaagatagattgcatgaacctggaactggattatctggaggacaacaacaaagactttgtattgctagagcgatttctgtaagaccagaagttatattaatggatgagccttgttcagcattagatcctatagcaacagcgcaaattgaagaattgattgatgagttaaaaaaagagcacacaataataattgtaactcattctatggctcaagcagcacgcgtttctcaaaatacaggtttttttcatttaggacaattgattgaacatggatctactgataaaatatttaagaatcctgataataaaaaaacgcaagattatataacagggaggtttggataat

SEQ ID NO: 274518 - DNA, 757 bp, Unknown
  Bacterial polypeptide expressing nucleotide sequence isolated from the Sargasso Sea
atgataaagattaaagcaaaagatgttgatgttttttatggaaaaaaacaagcgctctataatataagtttagatattgaggaaaatcaagtaactgcattaattggtccctctggttgtggcaaatcaactttcctaagatgtcttaatagaatgaatgatgtaattgatatctgtagtgttaaaggagaaattttaattaatgactttaatatcaatgataaaggttgtgatgtagtaagactaagagaaaaaattggtatggtttttcaaaaacctaatcctttcccaaaaactttatatgaaaatgtatcttacggtccaacaattcatggtatagctcaatcaaaacaagaaatggatgaaattgttgaaactagcttaaaaaaggctgcactttgggaagaggtaaaagataggttgcatgaacctggaactggattatctggagggcaacagcaaagactttgtattgctagagcaatttctgtaagacctgaagttatattaatggatgagccttgttcagcattagatcctatagcaacagcacaaattgaagaattgattgatgaattaaaaaaagagcacacaataataattgtaactcattctatggctcaagcggcacgtgtatctcaaaatacaggtttttttcacttaggacaattgatagaacatggatctactgataaaatatttaagaatcctgataataaaaaaacccaggactatataaccgggaggtttggataat

SEQ ID NO: 274519 - DNA, 379 bp, Unknown
  Bacterial polypeptide expressing nucleotide sequence isolated from the Sargasso Sea
aatggctgaggccctatcacccgacaaggacaaagaagtggctttcatcggacctccaaaggtcatcacaaaggatgtcaatgtattctatggtgagaacccagcccttaacagcatttccatctcggtatctggcaacgaggttaccgcctgtattggcccgtcgggatgcggtaaatcgacctttttgcgatgcctcaaccgcatgaatgatactatagaagggtgcagggtcaccggcgacatactgatcgacggtaataatattaaccactcctcggtagatgtggtccaactccgaacacgtgttggcatggtattccaaaagcccaacccatttccaaaatcaatttatgaaaatgttgcttatgggcctcga

SEQ ID NO: 274520 - DNA, 533 bp, Unknown
  Bacterial polypeptide expressing nucleotide sequence isolated from the Sargasso Sea
aatggaagaaaatagtgagataaaaatcgatgcacaaaatgtaaatgttttttatgcagacaaacaagccattgataatgtttctttaaaagtagaaaaatctaaaattactgctttaatcggcccttcaggatgtggaaaatctacttttcttagatgtattaatagaatgaatgatgtcattccatcatgtcgcgttgagggtaaaatattagttgatgaaatagatgtaaacaatcctgaattagaccctgtcttccttagagcaagagttgggatggttttccaaaaaccaaatccatttccaaaatctattttcgataatattgcctatggaccaaggattcatggtttgactaatagtaagagtgaattagatgatattgtgaaagagagtttggtaagagcaggactatggacggaggtttcagacagattatttgatcaaggtactggtttatcaggaggacagcaacaaagactttgtatcgctagagcgatagcagttaacccagaagttattctaatggatg

SEQ ID NO: 274521 - DNA, 752 bp, Unknown
  Bacterial polypeptide expressing nucleotide sequence isolated from the Sargasso Sea
aatgataaagattaaagcaaaagatgttgatgttttttacggaaaaaaacaagcactctttaatataagtttagatattgaggaaaatcaagtcacggcattaattggtccatctggttgtggtaaatcaactttcctaagatgtcttaatagaatgaatgatgtaattgatatctgcagtgttaaaggagaaattttaattaatgactttaatatcaatgataaaggttgtgatgtagtaagactaagagaaaaaattggtatggtttttcaaaaacctaatcctttcccaaaaactttatatgaaaatgtatcttacggtccaacaattcatggtatagctcaatcaaaacaagaaatggatgaaattgttgaaactagcttaaaaaaagctgcactatgggaagaggtaaaagataggttgcatgaacctggaactggattatctggagggcaacagcaaagactttgtattgctagagcgatttctgtaagacctgaagttatattaatggatgagccttgttcagcattagatccaatagcaacagcacaaattgaagaattgattgatgagttaaaaaaagagcacacaataataattgtaactcattctatggctcaagcagcacgtgtttctcaaaatacaggtttttttcatttaggacaattgattgaacatggatctactgataaaatatttaagaatcctgataataaaaaaacgcaagattatataacaagggaggttt

SEQ ID NO: 274522 - DNA, 807 bp, Unknown
  Bacterial polypeptide expressing nucleotide sequence isolated from the Sargasso Sea
actgaaacctgatggtacccaaggaccaaatggacctaacaatttttctgctacaccatcggtcaaggtcgatgtagaacagcgatcaggtgaagtaagctctctgagcgaacaggaagcatgtattcaagtagaaaatatgaatttctattatggcgacgtaaaggcgctaaacaatattaatatgactattccagagcgaaaggtcacagcttttataggtccttctggctgtggtaaatctacgcttataagaatatttaacagaatgaatgatctaattgatgggacaaggctagagggatccgtacgcttaaatggcaccgaaatttatgatccggatttaaatgttgcggatctaagaagaagggtgggtatggttttccaaaagccgaacccttttccaaaatccatttatgaaaatgtggcttatggtctccgtattcaagggataaataatcgggtcactctcaatgctactgtggagaaagccttaaaaggtgcagccttgtgggaagaggtaaaagatagattacatgagaatgctttgagcctatcgggtggccaacaacagcgactagtaatcgctcgggctatcgctatagagcctgaagttttattattagatgagcccgcgtccgcgcttgatccgatttcaactcttaagatagaagaacttatttacgagttgaaatcgaaatatacgattgttattgtcacccataacatgcaacaagcggctagggtttctgattatactgctttcatgtatctcggggatctgatcgaatatgatgatacgaaaaa

SEQ ID NO: 274523 - DNA, 361 bp, Unknown
  Bacterial polypeptide expressing nucleotide sequence isolated from the Sargasso Sea
ttaccgatgatttatgcaggtattgagcctgagcaaagactagagcgaggcaagaatgccttaaaaaaagttgggctttctgaaagaatgaataatcgtccaaaccaattatcaggaggtcaacaacaaagagtggctattgctagagctatcattaataacccggccatattattagctgacgaacccactggagcactagattcaaaaacaactgaagatgtacttgatctttttgacaacctgcatgaatctggaataacaatagttttagttactcacgaagatgaagttgcaaatcgtgcaaaaaaaatagccaaatttaaggacgggaaaatagttgaattaaaggttaaataaa

SEQ ID NO: 274524 - DNA, 759 bp, Unknown
  Bacterial polypeptide expressing nucleotide sequence isolated from the Sargasso Sea
aaaatccaaaaataatagcaaaaaacgtaaacgtatattataatgaaaaaaaagctatatctaatatatcaattgatattgcatcaaaagaggttgtttcattaattggtgcatctggttgcggaaaatctacttttttaagatgttttaacagaatgaacgacacaattgaaggttgcagggttgaaggtacgatagaaattgataatgaaaatatttataatagcaatttagatgttgtatcattaagggcaaaagtaggaatagtttttcaaaaaccaaatccatttccaaaatcaatttttgataatgttgcctatggtcctaaaattcatggtttagcatcaaacaaatcggatttaaataatattgttgaatactcattaaagagttctggtttgtgggatgaagttaaggatagacttgattcacctggaacagggttgtcaggaggacaacaacaaagattgtgtattgcaagagctattgcagtcagtccagaaatcattttgatggatgaaccatgttcagcattagatcctatagctactgcaaaaatagaaaatttaattgatcagctgggtagaaagtactcaattgttattgttacgcattcaatgcaacaagcagcaagagtttctcaaagaacagcgtatttccatcttggtaaattaatagaagttggtgctactaaggatatatttacaaatccaacagataaaaaaactgaagcttatatttcaggtagaataggttagg

SEQ ID NO: 274525 - DNA, 751 bp, Unknown
  Bacterial polypeptide expressing nucleotide sequence isolated from the Sargasso Sea
atgataaagattaaagcaaaagatgttgatgttttttacggaaaaaaacaagcactctttaatataagtttagatattgaggaaaatcaagtcacggcattaattggtccatctggttgtggtaaatcaactttcctaagatgtcttaatagaatgaatgatgtaattgatatctgcagtgttaaaggagaaattttaattaatgactttaatatcaatgataaaggttgtgatgtagtaagactaagagaaaaaattggtatggtttttcaaaaacctaatcctttcccaaaaactttatatgaaaatgtatcttacggtccaacaattcatggtatagctcaatcaaaacaagaaatggatgaaattgttgaaactagtttgaaaaaggctgcactatgggaggaggtaaaagataggttgcatgaacctggaactggattatctggagggcaacagcaaagactttgtattgctagagcaatttctgtaagacctgaagttatattaatggatgagccttgttcagcattagatcctatagcaacagcacaaattgaagaattgattgatgagttaaaaaaagagcacacaataataattgtaactcattctatggctcaagcggcgcgtgtatctcaaaatacaggtttttttcacttaggacaattgatagaacatggatctactgataaaatatttaagaatcctgataataaaaaaacccaggactatataaccgggaggtttg

SEQ ID NO: 274526 - DNA, 469 bp, Unknown
  Bacterial polypeptide expressing nucleotide sequence isolated from the Sargasso Sea
tgcattcggagcaagggtaaatggttttagaggtgacatggatcaattagtagaagaatctcttaccaaggcagctgtatgggatgaatgcaaggataaattaaacgagagtggttattctttatctggaggacaacaacaacgattatgtatcgcaaggacaatagcaatcgaacctgatgtgattttaatggacgagccatgttcagcacttgatccgttatctacattaaaaattgaagagacaatacatgaattaaagaagaattttacaatcattattgtcactcataatatgcaacaagctaatagagtgagtgattttacagccttttttaatacagaaaaaaaaggaaaagatctcggaggaaaagtgggattcttagttgaatttagtaaaacaaaaagtatgtttaattcaccaaagcaaaaatcaactcaagactatatctctggaaaatttggttaa

SEQ ID NO: 274527 - DNA, 733 bp, Unknown
  Bacterial polypeptide expressing nucleotide sequence isolated from the Sargasso Sea
ttagtggtttcctatgctaaagtgcaagcgcttaaaggcgtctcgttgaatatatatccaaacgaggttacggccctgataggcccgtcgggttgcgggaagtcaacctttatcagaagtctgaatagaatgaatgacactattagtgtttgcaatattgagggccaagtatttcttgatggagaaaatatttatgacccagctagggacgtagtgcagcttcgaacgcaagtaggcatggtgttccagaagcccaacccgtttccaaaatctatattcgaaaacgttgcttatgggccaaaaattcatggcctagccgctgatgacgaggagttgcgtgggatcgtcctggggagcctcgagcgggcaggccttctagacgaagttaaagacagactaaatgtgcctggaacaagcttatctggcgggcaacagcaaaggctatgtattgcgcgagcgatagcggtgcgccccgatataattttgatggatgagccatgctctgccctcgatccaatagcgaccaaacgaattgaggaactgataactgaattaaaagcggaatacactattgtgatcgtaacccattctatgcagcaagcccgccgtttatcggacaaaattgcatacttccacttaggctcgatcgttgagcatggggaaacagcggaagtatttgaaaacccaattgacgagagaaccgctgattacgttttaggtcggattggttgat

SEQ ID NO: 274528 - DNA, 463 bp, Unknown
  Bacterial polypeptide expressing nucleotide sequence isolated from the Sargasso Sea
aatgagtaaaatcaaagcggaaaatgtaaatgtatattacggatccaaacaggcattatttgatgtctctatagatattgcagaaaaagaagttacagctctaattggaccatctgggtgtggaaagtctactttcttaagatgcttgaacaggatgaacgacgtcatagaaatttgtagagttgaaggcagtattaaaatggacaacctagaactgaattcaagaaagttagatgttgtgagacttagggagaacgttggtatggtttttcaaaaacccaatccattccctaaaacaatttatgaaaatgtagcttatggtcctactattcacggtattgcacagagcaaagaagaaatggatcaaatagttgaaacaagtttgaaaaaagctgccttgtggaacgaagttaaagatagacttgatgaaatcggaactggtttatcaggaggtcaacagcaa

SEQ ID NO: 274529 - DNA, 703 bp, Unknown
  Bacterial polypeptide expressing nucleotide sequence isolated from the Sargasso Sea
aatgcgtgcgcttaccggcatcaaactcgacggcgtttcattcgccttcggcactcataccgtactgaatcaaatagacctgcatatcgatgctggcagcatcgtggcgctgctggggccatctggctgcggcaaaagtaccctgttgcgtctgttggcgggtctcagcgtcccggcagcaggcgagatacgctttggcgatcgtctggtggcgaaacccggctgggggatggcgccggagcagcgcgacatcggcatggtttttcaggactacgccctgtggccgcatatgacggcggcgcagaatatcgcctttcctctgcgtatgcgcggcgtagcgcgcgctgcacgacaacagcgggtgaatgacgcgctggcgatggttggcctcaacggctttgccgataggaagccctccggcctttccggcggtcagcagcagcgcgtcgcgttggctcgcgccattgttgccgaaccgcgcgtgctgttgtttgacgaaccgctctccaacctcgatagcgaattgcgcgaatcgctgtgcgttgagatgagccgtctgctgcgtcagctggggatcaccgcggtgtatgtgactcacgaccgccgcgaagccgagctgttggccgaccgaattgttcatttatctgccggcactgttgccgccgttcgcaccatcacttcatcctccggggaactcgcatga

SEQ ID NO: 274530 - DNA, 658 bp, Unknown
  Bacterial polypeptide expressing nucleotide sequence isolated from the Sargasso Sea
attaattggtcctctggttgtggtaaatcaactttcctaagatgtcttaatagaatgaatgatgtaattgatatctgtagtgttaaaggagaaattttaattaatgactttaatatcaatgataaaagttgtgatgtagtaagactaagagaaaaaattggtatggtttttcaaaaacctaatccttttccaaaaactttatatgaaaatgtatcttacggtccaacaattcatggtatagcccaatcaaaacaagaaatggatgaaattgttgaaactagcttaaaaaaagctgcactatgggaagaggtaaaagataggttgcatgaacctggaactggattatctggagggcaacagcaaagactttgtattgctagagcaatttctgtaagacctgaagttatattaatggatgagccttgttcagcattagatcctatagcaacagcacaaattgaagaattgattgatgaattaaaaaaagagcacacaataataattgtaactcattctatggctcaagcggcacgtgtatctcaaaatacaggtttttttcacttaggacaattgatagaacatggatctactgataaaatatttaagaatcctgataataaaaaaacccaggactatataaccgggaggtttggataat

SEQ ID NO: 274531 - DNA, 529 bp, Unknown
  Bacterial polypeptide expressing nucleotide sequence isolated from the Sargasso Sea
tattattggatgtttagatagaccatctaaaggtatttataaattaaatggtattcctgttgagaatttatctgatgatgagctcgcggaaatacgtaaccaaaaattaggcttcgtttttcaacaatttcatcttctttcagacgcaactgcacttgaaaacgtaactttgcccatgatttatgctggtattgagcctgagcaaagattagagcgaggtaagaatgccttaaaaaaagttggtctttcagaaaggatgaataatcgcccaaaccaattatcagggggtcaacaacaacgagttgctattgcgagggctattatcaataaccctgcaattttgttagccgacgaacctactggagcactagactcaaaaaccactgaagatgtattagatctttttgacaaactgcatgaatctggaataactatagttttagttacgcatgaagatgaagttgcaaatcgggcaaaaaaaatagctaaatttaaggatggaagaatagttgaattaaaagttaattaa

SEQ ID NO: 274532 - DNA, 538 bp, Unknown
  Bacterial polypeptide expressing nucleotide sequence isolated from the Sargasso Sea
atgtctaaaaatccagagtttgttaaattcgataaagtagataaaagttatgacggtaaggttcttgtcgtcaaagatctacaattagatattgcagaaggtgagttcataacaatgcttggtccatctggttcaggtaagacaacttgtttaatgatgttggctggttttgaaacgccaactcacggtgaaatattattagatggaaatataatttcgaatattcctcctcataaaagagggatcggaatggttttccaaaactatgcattgtttccacatatgacagtttatgaaaatttagcttttccattaagagtaagaaaagttgaaaaagatgaaatagataaaaaagttgataaagcattatcgatggtttcattaagtggttttgaaactagaatgcctgctcaactttctggtggtcagcaacaaagggtagcagttgcaagagccctagtatttgatccagcagtcgtattaatggatgaacctctaggagcattagataaaaatttaagagaaagcatgcaatatg

SEQ ID NO: 274533 - DNA, 531 bp, Unknown
  Bacterial polypeptide expressing nucleotide sequence isolated from the Sargasso Sea
agaagaatcggaatgtttttcagcaacctaatccttttccaaaatctatctacgaaaatattgcattcggagcaagaatcaatggctttacgggagatatggatgaattagtggaaagttccttgagaaaagctgctgtatggagtgaatgtaaggataaattaaatgatagtggttactctttatctggtggacaacaacagagattatgtattgctcgaaccatcgcaattgagcctgaaataattctcatggatgagccatgctcagctttagatccaatctctactttgaaaatagaagagacgatgcacgaacttaagaagaattacacaataataatcgttactcataatatgcaacaggcattaagagtcagtgatatgactgcattttttaatgcaattgagtatgaagatggtgatggaggaaaggttggttacctcgcagaatttgattcgacaaagaaaatttttaactctccaaaagaaaaaaccactcaggaatacatatcaggtaaatttggctgat

SEQ ID NO: 274534 - DNA, 705 bp, Unknown
  Bacterial polypeptide expressing nucleotide sequence isolated from the Sargasso Sea
aatggtagaaaataacaatactaagatttcagcgaaagacgttgatgttttttattctgaaaagcaggcattaaataagatctcaatggacattaaagaaaaagaagtaacagctttaataggtccatctggttgtggtaaatcaacatttcttagatgtatcaatcgaatgaatgatctcattgaaatttgtaaagtaactggatcaattaaagttgataatgaagagattataagttcctctactgatgtggtaagcctcagatccaaaattggaatggtttttcagaaaccaaatccttttcctaaatcaatatttgataatgtagcttatggacctagtattcacggattagcagatacaaaatctgacctagaaaatatagttataacatcattaaaaaaagctggtttatataatgaagttaaagatagattaaacgaaccaggaacaagtttatcagggggtcaacaacaaagattatgtattgcaagagcaattgctgttaatcctgaaataatcctaatggatgaaccttgctctgctttagatccaatagcaactgctattatagaagaattaattgatgaattaagattaaactatacaattattattgtgactcattctatgcaaacagcagcaagagtttctcagaaaacatgtttctttcatttaggagaattaatagaatcgggggagac

SEQ ID NO: 274535 - DNA, 235 bp, Unknown
  Bacterial polypeptide expressing nucleotide sequence isolated from the Sargasso Sea
aatgaacgccactgctaccgccagcaagaacgcgctggagctgcgtaacctgagctttttctacggcaagttccagggcctgcgcaacgtaagcctggacatcgccgagcacaaggtcaccgccttcatcggcccctccggctgcggcaagtccacgctgctgcgcacactcaaccgcatgtacagcctgtaccccggccagcgcgccgagggttccatcagcttctatgggcca

SEQ ID NO: 274536 - DNA, 481 bp, Unknown
  Bacterial polypeptide expressing nucleotide sequence isolated from the Sargasso Sea
atggcaagtaacaaggaatacaaagttttgattgagaatttaggtgtatcatacagtggaaaaacagcaatcaaagacattaacatgaaaattccagacaaggcagtaacagcattaattggtccatcaggatgtggaaaaacaacattgcttagaaccattaacagaatgcatgatttaacaaaaggtgcagaagttacaggcaaaatcatcattgatggagaaaatgtgtacgattcctacatcaatccaattttacaaagaagaaaaattggaatggtgttccaaaaaccaaatccatttccaacaatgtcaatttgggacaatgtagcagcaggactaaagcttaacggcgtaaaagacaagggtattttgaatgaaattatagaagattcactaaaaatggcatatctttgggacgaggtgaaagatgaattgaaaaaaccaggcagttgcatgtcaggaggacagcaacagagac

SEQ ID NO: 274537 - DNA, 682 bp, Unknown
  Bacterial polypeptide expressing nucleotide sequence isolated from the Sargasso Sea
atggataatattaaagaagattttaagaatttagatttaacggttggtgatgtattttcaaaagatgctaggctgaaggctagaaatgttaatgttttttacggaagtaacaaagccattgataatgttactattgatatagggaataaggaggtcatatctcttattggtccctctggttgtggtaaatctacatttcttcgttgttttaatagaatgaatgacacaatagatagttgtcgtattgagggtaaaattacacttgatgatgaaaatatctataatgaaaaaattgatgttgttcctttaagagctcgtatcggcatggtttttcagaaacctaatccttttcctaaatcaatatatgataacgttgcttatggccctcgaatacatgggctatcagaaaataaagaacatttagataatattgtagaagagtctctaaaaagagcaggattatgggaagaagtcaatgataggctattaagtcctggaacagggctttcaggcgggcaacaacaacgactatgtattgctagagctattgctgtaagtccagaagtcattttgatggatgaaccatgctctgctcttgatccaattgcaacagctaaaattgaagaactaatacacgaacttggtaatgagtactctatagttattgttactcattctatgc

SEQ ID NO: 274538 - DNA, 418 bp, Unknown
  Bacterial polypeptide expressing nucleotide sequence isolated from the Sargasso Sea
ttcgtttttcacaaatttcatcttctttcagatgcaacagcacttgaaaacgtaattttaccgatgatttatgcgggtattgatcttgagcaaagaatagagcgcggtaagaatgccttaaaaaaagttggcctttctgaaagaatcaataatcggcctaaccagttatcaggaggtcaacaacaacgagtggctatagctagagctatcattaataatccttcaatattattggcagacgaacccactggagcactagattcaaaaacaactaaagatgtactagatctctttgacaaactgcatgaatctggaataactatagttttagttacgcatgaagatgaagttgcaaatcgcgcaaaaaaaatagccaaatttaaggatggaagaatagttgaattaaaagttaattgaa

SEQ ID NO: 274539 - DNA, 203 bp, Unknown
  Bacterial polypeptide expressing nucleotide sequence isolated from the Sargasso Sea
tatgaacaatataaaagtgtctaccaaaaatgtgaatgtgcattacggcactaagcaagcgcttcaccgagtaacacttgatatcaatgaaaaggaagttacagcactgattggaccttctggttgtggtaaatctacttttctaagatgtataaatagaatgaatgatttaattgatatttgtaaagtagatggatctatta

SEQ ID NO: 274540 - DNA, 601 bp, Unknown
  Bacterial polypeptide expressing nucleotide sequence isolated from the Sargasso Sea
gcgtgttgagggtcaagtccgctatcacggtgttgatctctatcagagtgaagttgatgcggttgaggttcggcgacgaataggaatggtgttccaaaagccaaatccttttccgaaatccatttacgacaacattgcgtttggcccgcgaatcgctggcgcaaagaaatctgaacttgatgacattgttgagcgctcgctccagagagccgccttgtgggacgaagtgcgcgaccgtctctctgatcctgcctacggcttgtctggaggacagcaacaacggctttgcatagcgcgagccattgcagtggaaccagatgtcgttttgatggatgagccctgctcggctctcgacccgatagctactgcaagaatcgaagaactaattgctgaactaaagacggactatacgatcgtcattgttactcacaacatgcaacaggcagcacgaataagtgatcgaacggctttcttctcggtccaagtgactgatgctggtcggcgaaccggtgagcttgtcgaacttggtgccaccgaacatatctttaccaacccggatgatccccgcacagaggcttatatcaccggtcgtgtcggctaa

SEQ ID NO: 274541 - DNA, 267 bp, Unknown
  Bacterial polypeptide expressing nucleotide sequence isolated from the Sargasso Sea
ccgcgccggaggtcctgctgatggatgagccgtgctccgcgctcgaccccatcgccacggcgcagatcgaggagctgatagacgagcttcgccaggatttcgcggtggtcatcgtcacgcactcgatgcagcaggcggcgcgggtcagccagaaaacggcgttcttccacctgggcgttatcgcggaacatggcgacaccaaccagattttcaccaatccggtggacaaacgcacgcaggattacattactggccgtttcggctgat

SEQ ID NO: 274542 - DNA, 454 bp, Unknown
  Bacterial polypeptide expressing nucleotide sequence isolated from the Sargasso Sea
atgtctgacccaataataaaaattcaaaatatgaataaatggtttggcgattttcaagttttaaaaaatataaatcttgaggttgaggcaaataaaaaaattgttgtatgtggtccctctggatcgggaaaatcaacactaattagatgtattaatagattagaagaacaccaagatggagatataattgttgatggaaatgaactatcagaaaaaacaaaagatattgaaaaaattagagctgaagttggaatggtttttcaacaatttaatttatttccacacttatcaattttagacaattgtactcttgcacctatctgggttaagaaaatgccaaaaaaagaagctcaagaacttgcattagatcaacttaaaaaagtacaaatagatgatcaagccaacaagttccctggacaactctctggaggtcaacaacagcgtttgcgatagc

SEQ ID NO: 274543 - DNA, 633 bp, Unknown
  Bacterial polypeptide expressing nucleotide sequence isolated from the Sargasso Sea
tatgagtattattgaaaatcacgaaacggtcggctctcctctcagcgaaggtgcgaaacttcgcgctcgcgacgtctgtgtgttttacggtgagaagcaggccatttacaacgtcagtctggatattcgccagaatgaagtgatcgccttaatcggcccttcaggttgtggtaaatcaacctttctgcgctgcctcaaccgcatgaatgacaccatcgacatctgtaatgtcacgggtgaaatcctgctggatggcgataacatctacgatccacgcgtcgatgtggtgccactccgcgcgacggtaggcatggttttccagaagcctaaccctttccctaagtcgatttacgacaacatcgcttatggcccgcgtattcatggtctcgcatcgtcacgtgttgaactggacgaaatcgttgaaaaaagtctgcagcgtgcgggcctctggaatgaagtgaaagatcgtctgcatgcaccgggcaccggtctttctggcggtcagcagcagcgtctttgcattgcgcgtaccattgcggttgatcctgaagtgattctgatggatgagccgtgttctgcactggacccgattgcaactgctaaaattgaagaactgatcgacgagctgcgtga

SEQ ID NO: 274544 - DNA, 737 bp, Unknown
  Bacterial polypeptide expressing nucleotide sequence isolated from the Sargasso Sea
aacgcactcaacttatgggtttggcgataagcacgtgttaaaagacatcaccatgcggatcccgaaaaacaaggtcacagcgttaattggtcaaagcgggtgcggtaaatccacactgataaactgctttaaccggctaaacgacctgtatgacggttgtcagtataagggtgaagtgattattgatggtaaaaacattaatagtaaaaaaaccaacgtgtcacggctaagagccaaagtgggtatggtattccagcgcccaaatccatttcctatgagtatttacgaaaacgtatgctacggattgaagcttcaaggggtgcgtgaaagacggaatttagacgatgcggtagaaagtgcgttaaagcaggccgcattgtgggatgaagtgaaagaccgattgtttgagcctgccatgaccttatcgggcggtcagcagcagcggttagtgattgcgcgggctttatccttaaaaccagaagtgttgttgcttgatgagccaacctcagccctcgatccgctgacgacgcttttcattgaagaactgatggagtcgcttaaaaagcaatgtacgatagttattgttactcacaatatgcagcaggccgcgcgcgtaagcgactacacggcttttttccatcaaggtaagctcgtggagtatgccgatagcgatacgctgttcaccatgcctgagaaaaaacaaacagaagattacattacggggcgatatggctaac

SEQ ID NO: 274545 - DNA, 301 bp, Unknown
  Bacterial polypeptide expressing nucleotide sequence isolated from the Sargasso Sea
cagcaacgactatgtattgctagagctatatctgtaagtccagaagtgattcttatggacgaaccatgttcagcgcttgacccaatagcaacagctcaaattgaagaacttatagatgatcttaaaaaagaggtcacaattgtgatagttacccactcaatgtcacaagcagctagggtatctcaaaaaacaggtttctttcatttgggaaaacttatagaattcggaccaacagataaaatatttaaaaatcctgataatcagcaaactcaggattatattacaggaaggtttggttaat

SEQ ID NO: 274546 - DNA, 298 bp, Unknown
  Bacterial polypeptide expressing nucleotide sequence isolated from the Sargasso Sea
agcccgtgctctagctgtaaatcctgaagttttacttatggatgaacctgcttctgcattggatcccataggaacattagcaattgaagaattgatacgtgagttagcaggaagcgttacaattgttattgtaactcataatatgcaacaagcagctcgtgtgtctgatgaaacagcatttttaatggtaaatgataatcgcgctggatatttagttgaacatgattatacagataaaatattcaccaacccatccgaagaacgaacagaggcttatataactggcagatttagttaa

SEQ ID NO: 274547 - DNA, 832 bp, Unknown
  Bacterial polypeptide expressing nucleotide sequence isolated from the Sargasso Sea
ttattaggaccttctggctgcggaaaatcaacaacattgcgttgtattgcaggtcttgaaaaagccgatggaggcgaaattgccatagacgacatgattgtcgtttcgtccgacggtaacggttatgtgcctgctcatcagcgtccaataggaatggtgtttcagtcatacgcaatttggcctcatatgaatgtattcgataatgtcgcctttcctatatcgagaggtaaagggaaactacctaaatcccaagtgagagagcgtgtcctagaggcactcagtttagtgcgcctcgatggactagagaatcgccctgcacctcaattatcaggaggccagcagcaacgcctcgccttagcacgcgctcttgttcgacagcctaaggctctgttactagatgagcctttatccaatttagatgcaaaacttcgtgatgagatgcgagttgaattaaaaaccttgacggaacgattgaatattacgactatctttgtcacacatgatcagcttgaagcattaactctttcagatcaaattgctgtgatgcgtgatggcgaaatcgttcagcttggtagccctaaagaaatatactctactcccgtttcaagatttacagcagagtttatcggtacaacaaatttactcgaaggcactttagtaagtagcagcagaggtgttgcaaaagtgagcacaccacaaggtgagatcctctgcactgcggttgattcgcttaatgttaatgacaaagtttcgcttgctattcgccctgcaaatatcatcgtgaaggctacaaaaaatgcgaaagataatgcaatccaagggaaaatagaaa

SEQ ID NO: 274548 - DNA, 297 bp, Unknown
  Bacterial polypeptide expressing nucleotide sequence isolated from the Sargasso Sea
aaacgagtagggctgagaataggatgaccaatcttcctaatcaattatcaggtggacaacaacaacgagttgccatagcaagggcaataatcaatcaaccatccctgttattagcagacgaaccaactggtgctcttgattccaaaaccactgaagatgttttaaatctgtttgaccaacttcatagtcaaggaatcacaattgtcttagttactcatgaagacaatgttgctcaaagagcaaaaaaaatagcacggtttagagatggcaaagtaatagagattactgataattagc

SEQ ID NO: 274549 - DNA, 727 bp, Unknown
  Bacterial polypeptide expressing nucleotide sequence isolated from the Sargasso Sea
aatgagtaaaattatagcagaaaatgtaaatgtatattacggatctaaacaggcattatttgatgtctctatagatattgcagaaaaagaggttacagctttaattggaccatctggatgtggaaagtctactttcttaagatgcttgaacagaatgaacgatgttatagatatttgtagagttgaaggtagtattaaaatggatgacctagaactcaactcaagaaaattagatgttgtgagacttagggaaaacgttggtatggtttttcaaaaacccaatccgttccctaaaacaatttatgaaaatgtagcttatggacctactattcacggtattgcacagagcaaagaagaaatggatcaaatagttgaaacaagtctgaaaaaagctgccctgtggaacgaagttaaagatagacttgatgaaatcggaactggtttatcaggaggtcaacagcaacgactatgtattgcaagagctatatctgtaagcccagaagtgattcttatggatgaaccatgttcagcgcttgacccaatagcaacagctcaaattgaagaacttatagatgatcttaaaaaagaggttacaattgtaatagttacccactcaatgtcacaagcagctagggtatctcaaaaaacaggtttctttcatttgggaaaacttatagaatttggatcaacagaaaaaatatttaaaaatcctgacaaacaacaaact

SEQ ID NO: 274550 - DNA, 562 bp, Unknown
  Bacterial polypeptide expressing nucleotide sequence isolated from the Sargasso Sea
atgaccgttgctatccgcgccaccgatctggtgaagagctacacccctggggtgagggctctggaccgggtgagtctggaggtcaacaacggcgaggtgctggtggtgatgggaccgtccggttcgggcaaaagcaccctgattcgcaccttcaacggactcgagatgctggatggtggatccctggatgttctgggggtgcgtctggattcagcccatgctgagcctcaggtgcgggcgatccgacgtcgggtgggcatggtgtttcagcagttcaatctgtttccccatctctcgatcctcgagaacatcgcgctcgccccggtgaaggtgcagaagcggccaaaggaggaggtggagcgacgggccttggagttgctggagcaaatgggcatccaggagcaggcacagaaatacccggcacagctcagtggcggccagcagcaacgggtggcgatcgcgcgggctctcgccctcgatcctgaggtgatgctgtttgatgagcccaccagtgctctggatccggagcgggtgaaggaagtgctcgatgcgatgcgtcagc

SEQ ID NO: 274551 - DNA, 475 bp, Unknown
  Bacterial polypeptide expressing nucleotide sequence isolated from the Sargasso Sea
aatgaacgaaattaaaataaaatcaaaaaatctaaatgtttattatggtgaaaaacaagctttgtttgatgtaaatttagatttaaacgaaaaagaagttactgctttaattggtccatcaggatgtggaaaatctacctttattagatgtataaacagaatgaatgatgtaatcgatatttgtaaagtatctggaaacattgaaatagatggtgttgaaatcaacgataaaaatttagatgtagtatctttaagagaaagagtaggaatggtttttcaaaaaccaaatccatttccaaaaagcatatatgataatatttcctatggtccaaaaattcatggaaaaggcgaaactaaaagtgaattagatgaaattgtagaaaatagccttaagaaagcagctttatgggaagaagttaaagatagactcgatgaacctggaactggtctttctggtggtcacaacaacgtcttt

SEQ ID NO: 274552 - DNA, 409 bp, Unknown
  Bacterial polypeptide expressing nucleotide sequence isolated from the Sargasso Sea
atgaacaatgtaaaagtgtctaccaaaaatgtgaatgtgcattacggcactaagcaagcacttcatcgagtaacacttgatatcaatgaaaaggaagttacagcactgattggaccttctggttgtggtaaatctacttttctaagatgtataaatagaatgaatgatttaattgatatttgtaaagtagatggatctattacagttgataatgaagaaattatttcagatgaggttgatgttgtaagtcttcgatccaaaattggtatggtttttcaaaaaccaaatccttttccaaaatctatttttgataatgtagcttacggaccaactattcatggaatcgtcgacaccaaaacagatctagaagagatagttcattcatctttaaaaagagcaggactgtaaa

SEQ ID NO: 274553 - DNA, 688 bp, Unknown
  Bacterial polypeptide expressing nucleotide sequence isolated from the Sargasso Sea
atggttcaaaaatccgtcggacccatcgagctcgagtctcaagacgtctctgtgtggttcggtcagcgcaaggtgctcgagggcgtgaacatagcctttcccaagaacacggtgaccgcccttatcgggccatcaggatgcggaaagtccacctacattcgaaccctcaatcgacttcatgaactgatccccggcgctgctctagccggatccgtcctttacgagggcaaggacatatacgacacggatatcgatcccgttcacattcgcctccagatcggaatggttttccagaagccgaaccccttccccagcatgacgattcgcggaaatgtcctctcaggcttgaagttgtcgggcctgaagcgtgattatcttgacgacatcgtcgaagagaccttaacctccgcagggctctggaacgaggtcaaagatcgccttgactctgctgcaggggagctgtcaggtggtcagcaacaacgactcgtcatcgctcgcgccctcgccgtgcagccgcacgtcctccttatggacgagccgtgctcggcgctcgatccaacatcgacgttgaagattgaagaaaccatcagagagttgtccaaagacatcaccatcgtcatcgtcacccacaacatgcagcaagctgtgcgggtatccgactacacggcgttcttcctcgcggcggaga

SEQ ID NO: 274554 - DNA, 316 bp, Unknown
  Bacterial polypeptide expressing nucleotide sequence isolated from the Sargasso Sea
attatctggaggacaacagcaaagactttgtattgctagagcgatttctgtaagacctgaagttatattaatggatgaaccttgttcagcattagatccaatagcaacagcacaaattgaagaattgattgatgagttaaaaaaagagcacacaataataattgtaactcattctatggctcaagcagcacgtgtttctcaaaatacaggtttttttcatttaggtcaattgattgaacatggatctactgataaaatatttaagaatcctgataataaaaaaacgcaagattatataacagggaggtttggataa

SEQ ID NO: 274555 - DNA, 622 bp, Unknown
  Bacterial polypeptide expressing nucleotide sequence isolated from the Sargasso Sea
tatgaatagtaaaaaaaatgatttaaaatctcttgaattgacagtaggcgatgtcttttcaaaaaatgccaggttaaaagctagaaacgttaatgttttttatggggaaaacaaagccattgataatgtcacaatagatattggcaacaaagaagtcatttcatttattggcccttctggttgtggaaaatcaacatttctgcgttgttttaacagaatgaacgacaccattgattcatgtgttattcaaggtgaaataacaattgatgaagaaaatatttatgacaaaaaaattgatgttgtaccattaagagctcgtattgggatggtatttcagaaacctaatccatttccaaaatctatttacgacaatgtcgcttatgggcccagaatacacggtttgtctgaaaataaagaacatttagataatattgttgaagaatctcttaaaagagctggattatggcaggaagtaagtgataggttgtcaagtccaggtacaggtctttcagggggtcaacagcaaaggctttgtattgcacgagcaattgcggtaagtccagaggttattttaatggatgaaccatgttctgctcttgaccccattgctactgcaaaaata

SEQ ID NO: 274556 - DNA, 316 bp, Unknown
  Bacterial polypeptide expressing nucleotide sequence isolated from the Sargasso Sea
atgtccggcggtcagcagcagcgcctgtgtattgcccgggccattgccgtcagccccgaagtgatcctgatggacgagccctgttcagccctggacccgatcgctaccgccaaggtggaagagctgatcgcggaaatgtccgagagctacaccattgtgatcgtaacccactcgatgcagcaggccgcccgggtatccaaccgcacggcgtacttccatctgggccacctggtggaagtgaacgaaaccgacaaagtatttacttcgccggaccacgaactgaccgaatcctacatcaccggtcgttttggttaat

SEQ ID NO: 274557 - DNA, 283 bp, Unknown
  Bacterial polypeptide expressing nucleotide sequence isolated from the Sargasso Sea
atgataaagattaaagcaaaagatgttgatgttttttacggaaaaaaacaagcactctttaatataagtttagatattgaggaaaatcaagtaacggcattaattggtccatctggttgtggtaaatcaactttcctaagatgtcttaatagaatgaatgatgtaattgatatctgtagtgttaaaggagaaattttaattaatgactttaatatcaatgataaaagctgtgatgtagtaagactaagaaaaaaaattggtatggtttttcaaaaacctaatc

SEQ ID NO: 274558 - DNA, 658 bp, Unknown
  Bacterial polypeptide expressing nucleotide sequence isolated from the Sargasso Sea
ttaattggtccatctggttgtggtaaatcaactttcctaagatgtcttaatagaatgaatgatgtaattgatatctgtagtgttaaaggagaaattttaattaatgattttaatatcaatgataaaagttgtgatgtcgtaagactaagagaaaaaattggtatggtttttcaaaaacccaatcctttcccaaaaactttatatgaaaatgtatcttacggtccaacaattcatggtatggctcaatcaaaacaagaaatggatgaaattgttgaaactagtttgaaaaaggctgcactatgggaagaggtaaaagataggttgcatgaacctggaactggattatctggaggacaacagcaaagactttgtattgctagagcgatttctgtaagacctgaagttatattaatggatgaaccttgttcagcattagatccaatagcaacagcacaaattgaagaattgattgatgagttaaaaaaagagcacacaataataattgtaactcattctatggctcaagcagcacgtgtttctcaaaatacaggtttttttcatttaggacaattgattgaacatggatctactgataaaatatttaagaatcctgataataaaaaaacgcaagattatataacagggaggttcggataat

SEQ ID NO: 274559 - DNA, 720 bp, Unknown
  Bacterial polypeptide expressing nucleotide sequence isolated from the Sargasso Sea
aatgataaagattaaagcaaaagatgttgatgttttttatggaaaaaaacaagcactctttaatataagtttagatattgaggaaaatcaagtgacggcattaattggtccctctggttgtggtaaatcaactttcctaagatgtcttaatagaatgaatgatgtaattgatatctgtagtgttaaaggagaaattttaattaatgactttaatattaatgataaaagttgtgatgtagtaagattaagagaaaaaattggtatggtttttcaaaaacctaatcctttcccaaaaactttatatgaaaatgtatcttacggtccaacaattcatggtatggctcaatcaaaacaagaaatggatgaaattgttgaaactagtttaaaaaaggctgcactatgggaagaggtaaaagatagattgcatgaacctggaactggattatctggaggacaacaacaaagactttgtattgctagagcgatttctgtaagaccagaagttatattaatggatgagccttgttcagcattagatcctatagcaacagcgcaaattgaagaattgattgatgagttaaaaaaagagcacacaataataattgtaactcattctatggctcaagcagcacgcgtttctcagaatacaggtttttttcatttaggacaattgattgaacatggatctactgataaaatatttaagaatcctgataataa

SEQ ID NO: 274560 - DNA, 643 bp, Unknown
  Bacterial polypeptide expressing nucleotide sequence isolated from the Sargasso Sea
atgaaaaataaatttgagacagaaaatgttgttgtgcattatggaactaaaattgccatagataatatctcattaaatattgaagctaacaatatcacctcacttatcggtccttctggttgtgggaaatctacgtttcttcgatgtcttaatcgaatgaatgatacgatcgatggatgtgctgtctcaggaaagcttttgcttgataatgaagatatctatggcgagaatatagatcctgttgatatcagagcaaaagtggggatggtttttcaaaaaccaaatccctttccaaagtcgatttttgaaaatatagcgtatggaccaaagatacatgggctagcaaaaagtaaggctgacctgaatgatattgttttgcagagtttagagcgggcagggttaattgatgaggttcacgaccgactgcatgactcagcaactggactttctggaggacaacagcaaaggatttgtatagctcgagccatagccgtcaatccggaggtaatcttaatggatgaaccttgttccgcactggatcctatagcaactgctgtaattgaagaacttctggatcaattaagcaaggatttcacaattgttatagttactcattcaatggcgcaggcagctcgagttcaac

SEQ ID NO: 274561 - DNA, 709 bp, Unknown
  Bacterial polypeptide expressing nucleotide sequence isolated from the Sargasso Sea
atgagtgaagaagagatgattattgagacaaagggagtgaaggtgaacttcggtgacttttgggcactgaagggcattgacatcagcattaggaaaggagagattgtcgtaatcctagggccgtcgggctcaggtaaatcgacatatatccggaccttgaatagacttcagccacacagtggcggtacagtggtaatagatggaatcacaattgatgatgagaccactgtggctgacatgaagtatgtcagggcagaagtcggctttgttttccagcagttcaacctcttccctcacctgaccataatggagaacatcaccctcgctccaatgaaggtcaagggtatgccaaagagacaggcagaagacaaggcaatggaacttctagagaaggtcggaattcctgagcaggcctacaagtatccgagcggactttctggtggccagcaacagagagtagccattgcgcgtgctctagccatggatccgaagattatgctattcgacgagcctacttcggctctcgatcctgagatgatcaaggaagttctcgatgtaatgatcgatcttgcaaaggaagatgtaacgatgattgtggtgacacacgagatgggcttcgccaaggaggttgcagatagatgcatactattcgatgagggagaaggggtagagcagaatactcccgaggagttcttcactaatcccaagc

SEQ ID NO: 274562 - DNA, 433 bp, Unknown
  Bacterial polypeptide expressing nucleotide sequence isolated from the Sargasso Sea
atgggagtcagaacaaactgccttaacctttggtacggtgactttcaggctttgcaagacatcaattttgaggcaacgagaggcatcattaccggcttaataggtccttcgggttgcggtaaatcgacccttctgcgttgcttcaatcgcatgaacgaacgatacggcaacgtcaccacgacaggcgaaatcttgattcatggtcaaaacatttatgatggggaagtatccttggtcgaactacgaaaagccgttggcatggtcttccagcgaccgaatccattacctatgtcggtgagggacaacgtgctgtttgggctcgatctccatcttgagccagaacaattgaaaaaaacggatctcgagcaagttgtggagcaagctcttagggaagttttcctgtgggaagatctcaaggatcagctggatgcaa

SEQ ID NO: 274563 - DNA, 784 bp, Unknown
  Bacterial polypeptide expressing nucleotide sequence isolated from the Sargasso Sea
atgacaatcgaacaaaaccataagggcgcaattagcatcagaaatgtaaccaaaatttatgatccagagggcgtcaacgtaatggcagtggacgattgttcattggagattgctgctggcgaggtatgcatgattgtcgggccctcaggttgcggaaaaaccactttactgaatgcaattgcagggtttcattcggtcactgagggggaaatttatttagatggagaattgttatgtgggcctgagaaaccgctagcggaacaaggggctgatcggatcgttgtgtttcagcatggggccctattcccatggaagacactagcagaaaatgtcgcttatggaccaattgtccagggtgttatggcaaaaaaagaagcgctcgagaaagctgaagatatgcttgcagaagcgggtattggagatatgggacataaatatcccggagaagtctcctcaggaatggctcggcgtgctgaaattgttagagctttaattaataatcccaaggttctattgcttgatgagccctatcgagcaatggatgcactgacaaaatctattatgcatgaagctttgctagaggtatatgatcgaaccaaagttacaatattttttataacgcatgatttagaggaagcaatttttcttggtgatagggtagtagttatgaccacccgcccggctaaaacaaagactattttagatgtaaaaatccctcgtccgcgggattatcaagtattgtcctctgaggagtttcgggtgctaatgaatgaggccaaaggag

SEQ ID NO: 274564 - DNA, 336 bp, Unknown
  Bacterial polypeptide expressing nucleotide sequence isolated from the Sargasso Sea
gatgataaagataaattcaaaaaatgtagatgttttctatggaaaaaaacaagctctattcaatataaacttagatattgaagaaaatcaggttacagcactaattgggccttcaggttgtggtaaatctacttttttaagatgtttaaatcgaatgaatgacgttattgatatatgtcgagtaaaaggtcagattataatcaatgattttgatattaatgataagagttgtgatgtagttagattaagagaaaaaattggtatggtttttcaaaaaccaaatccttttcctaaaactatttatgaaaatatttcttatggtccaacaattcatgg

SEQ ID NO: 274565 - DNA, 493 bp, Unknown
  Bacterial polypeptide expressing nucleotide sequence isolated from the Sargasso Sea
aatgagcaaaggaatagaaatcagaaacctaaatttatcttatggtaactctaaggctttaaatgatatttccttagatattaaagagaaacaagttactgcatttatagggccttcagggtgcggaaaatcaactttattaaggtgcattaacagactaaacgatttaattgattctgttaaaatgaatggagaaattaagatagatggaattgatattaactcccctggatatgatgtaacgacattaagacgaaatgttggaatggtttttcaaaaatccaatccttttccaatgagtatttatgaaaatattgcttatggactcaaaattggtggagaaaaaaataaaggtaagattgaccatgtcgttgaagaaagtttgaaacaggcagctttatgggaagaagttaaaatagacttaatgattctgcttttggactctccggtggacaacaacaaagactatgtattgctcgagctattgcaatag

SEQ ID NO: 274566 - DNA, 626 bp, Unknown
  Bacterial polypeptide expressing nucleotide sequence isolated from the Sargasso Sea
ttttttaagatgcttgaatagaatgaatgatgtaattgacatatgcaaagttcaaggagagatagttataaatgattttaatataaacgataaagggtgtgacgtagtaagattgcgagaaaaaattggaatggtttttcaaaaaccaaatccatttccaaaaacattatacgaaaatatttcttatggtcctacaatccatggtatggctcaatcaaaacaagaaatggatgaaatagttgagacaagtttaaaaaaagctgcgctctgggaagaagtaaaagatagacttcatgaacctggaacaggtttgtcaggtggccagcaacaacggttatgtatagcaagagctatttcggtacaaccagaggtaatcttaatggacgagccttgctcagcattagacccaattgcaacagcccaaattgaggagttaattgatgaattaaagaaagaacatacaataattatagtcactcactctatggctcaagcagcaagagtatctcaaaatactggtttctttcacttaggagaattgatagaacatggatcaacagataagatatttaagaatccagaaaataataaaacgcaagattatattacagggaggttcggataat

SEQ ID NO: 274567 - DNA, 892 bp, Unknown
  Bacterial polypeptide expressing nucleotide sequence isolated from the Sargasso Sea
aatgtcttggtggattatgtgggaagtaagctatttatttgaaaatatcggcaccatagatgaaggtaggcttacaatatcgcaaaaaccaaaggttattgatgccaataatgccaaagaattgtctataaatggtggtgaaataaattttgataaagttaaatttaactatggtaaacctggtggcttatttgaggaattgtcacttaaaattagtgatggagaaaaagttggtttagttggaaaatcgggagcaggaaaaagttccattttaaatttattgttaaggttttatgatgtagattcaggaaaaattctaattgatagtcaggatatctctcaagtaacacaagaatctctacgatcacaaattggagttgtaactcaagagactgctcttcttaatcgctcaatttatgaaaatattgcttatggaaacccttctgcctcaaggaatgaaatatacgaagcagcaaaaaaagcagaggcttatgaatttatctgtgatttagaagataaagatggaagaaaagggttttctgcattcgttggagagagaggtgtgcggctatcaggtgggcaaaggcaaagagtagcaatagctagagttttattaaaaaatgcaccaattcttattctagatgaagcaacaagcgcattagatagtgaaatagaagctgcaatccaaaaccagttaaataatatattacgtgataaaacagctctagtcattgctcatagattatctactatcaataagcttgataggttgatagttatggagcatggtaaagtagttgaaatgggaactcataaaagtctgattaagaagggaggtcattattcaaaactttggtctctacaatcaggtggatttttgcccactttatag

SEQ ID NO: 274568 - DNA, 701 bp, Unknown
  Bacterial polypeptide expressing nucleotide sequence isolated from the Sargasso Sea
cttgaacgtctcaactgcgcaaatagccgctccgtttgttacccaatcgcctgtggtcatggactgcaagctggacaggattttctacggcaacttcatggcagtgcgtgacagccatgtgccgatcgagaaaaacaagatcaccggtttcatcggcccgtccggctgcggcaaaagtacggtactgcgcagcctcaaccgcatgaacgacctggtgaagggctttcgtttcgaaggccacgtgcatttcctggggcaggacgtgtatggcaagggtgtagacccggtggtggtgcgccgttacatcggtatggtgttccagcagccgaacccgttttccatgagcatcttcgacaacgtcgccttcggcctgcgcttgaaccgctacaaaggcgacctgggcgaccgcgtcaagcacgccctgcaaggcgcggcgctgtgggatgaagtcaaggacaagctcaaggtcagcggcctgtcgctttccggtggccagcagcaacggctgtgtattgcccgtgcgattgccaccgagccggaagtgctgttgctcgatgagccttgctcggcactcgacccgattgcgactcgccgggtagaggaactgatggtggaactgaagaaggattacaccatcgccctggtcacccacaacatgcagcaggcgatccgcgtggcggacaccacggcgtttttctcgg

SEQ ID NO: 274569 - DNA, 688 bp, Unknown
  Bacterial polypeptide expressing nucleotide sequence isolated from the Sargasso Sea
atgtctaagaaagttgcaagtttagaaaatatatctaaaacatatgggaaagaggatttaactgtcaaagccttagacagcataaatttagaaatttataaaggtgattatttagctgtaatgggagcaagtggctcaggtaaaagtacagctatgaatattattggatgtttagatagaccatctgaaggtatttataaattaaatggtattcctgttgagaatttatctgatgatgagctcgcggaaatacgcaaccaaaaattaggctttgtttttcaacaatttcatcttctttcagacgcaactgcgcttgaaaacgtaactttgccgatgatttatgctggtattgatcctgaacaaagatttgagcgaggtaagaatgccttaaaaaaagttggcctttcagaaagaatgaataatcgtccaaatcaattatctggaggtcaacaacaacgagttgctatcgcgagggctattataaataaccccgcaattttgctggcagacgaacctactggtgcactagattcaaaaactactgaagatgtattagatctttttgacaaactgcacgaatctggaataactatagttttagttacccatgaagatgaagttgcaaatcgcgcaaaaaaaatagccaaatttaaggatggaagaatagttgaattaaaagttaattaaa

SEQ ID NO: 274570 - DNA, 700 bp, Unknown
  Bacterial polypeptide expressing nucleotide sequence isolated from the Sargasso Sea
ttttgatgtctcaatggatatgtatgagaaagaagttacagcattaattggaccttctggctgtggtaaatccacattccttagatgtatcaatagaatgaatgatgtcattgatatttgttcagtgaaaggtaatgtttctattgatggacatgatatatatgacaaatctatcagagtagaaagtttaagggaaagtgttggaatggtatttcaaaaaccaaacccatttccaaagtctatttatgaaaatattgcatatggaccaagaattcatggaatagcaaattccaaaacagatctagatgaaatagtagaaactagtttacaaaaagcagctttattcgatgaagtaaaagatcgattgcatcaaccaggcaccggattatccggaggtcaacaacaaagactgtgtatagcaagagctatctctgttaatcctgaaattattctaatggatgaaccgtgttctgcccttgatcccattgcaactgcaaaaattgaagatttaatgtctgaattaaaagaagaatttacaattattatcgttacacattctatgcaacaagccgctcgagtttcaaaaaatactgggttttttcatctaggaaaactaattgaagtagattcaactgatactattttctcaaacccaggaaatcaaaaaacacaagattacataacaggaaggtttggatga

SEQ ID NO: 274571 - DNA, 592 bp, Unknown
  Bacterial polypeptide expressing nucleotide sequence isolated from the Sargasso Sea
atgactattgaaactgaaacagaagatactgacaacgtaaacatttttgaagtatcggatgtgaatgtttactacggtgattttcgtgctattcgagatgtgagcatagatatagaagctaatgaaatcactgctttcatcggtccatcaggctgtggaaagacaaccatgcttcggagttttaataggatgaacgacctcatccctactgcccgagtcacaggcgaattaaaatacagaggcgtttctctttatgataaaagagttgatcctgttgaagtccgcagaagaattggaatggtttttcaaaaaccaaatccatttcctaaatccgtctatgacaatgttgcctatgggccaagaattgctggcaacgtttccaaaggtgcagaaatggacgacctcgttgaatcttctcttaggaaggctgctctgtgggatgaggtaaaggatcgccttaaaagttcggctttagggatgtcaggtggccagcagcaacgtctgtgtatcgctcgggccatagctacaaaccccgatgttgttcttatggatgaaccctgttcagctttggaccctactgctacaggaagga

SEQ ID NO: 274572 - DNA, 724 bp, Unknown
  Bacterial polypeptide expressing nucleotide sequence isolated from the Sargasso Sea
gtaaaaaatgtttttttaaattttaaagcaggagatataacttcactcattggcccttctggttgtggtaaatcaaccgttcttagagctttgaatagaatgaacgatttaatccctaattgttcgttaaaagggacagtcctctttgatggaactaatatctatgacaaaagagtagatccagttgaagttagaagaagaatcggaatggtttttcaacaacctaatccttttccaaaatctatctacgaaaatattgcattcggagcaagaatcaatggctttacgggagatatggatgaattagtggaaagttccttgagaaaagctgctgtatggagtgaatgtaaggataaattaaatgatagtggttactctttatctggtggacaacaacagagattatgtattgctcgaaccatcgcaattgagcctgaaataattctcatggatgagccatgttcagcattagatccaatttccactctgaaaattgaggagacaatgcatgaacttaagaagaattacacaataataatcgttacacataatatgcaacaggcattaagagtcagtgatatgactgcattttttaatgcaattgagtatgaagatggtgatggaggaaaggttggttatcttgcagaatttaattcgacaaagaaaatttttaactctccaaaagaaaaaaccactcaggaatacatatcaggtaaatttggct

SEQ ID NO: 274573 - DNA, 757 bp, Unknown
  Bacterial polypeptide expressing nucleotide sequence isolated from the Sargasso Sea
atgataaagattaaagcaaaagatgttgatgttttttacggaaaaaaacaagcactctttaatataagtttagatattgaggaaaatcaagtaacggcattaattggtccatctggttgtggtaaatcaactttcctaagatgtcttaatagaatgaatgatgtaattgatatctgtagtgttaaaggagaaattttaattaatgactttaatatcaatgataaaagctgtgatgtagtaagactaagagaaaaaattggtatggtttttcaaaaacctaatcctttcccaaaaactttatatgaaaatgtatcttacggtccaacaattcatggtatagctcaatcaaaacaagaaatggatgaaattgttgaaactagcttaaaaaaagctgcactatgggaagaggtaaaagataggttgcatgaacctggaactggattatctggagggcaacaacaaagactttgtattgctagagcaatttctgtaagacctgaagttatattaatggatgagccttgttcagcattagatcctatagcaacagcacaaattgaagaattgattgatgaattaaaaaaagagcacacaataataattgtaactcattctatggctcaagcggcacgtgtatctcaaaatacaggtttttttcatttaggacaattgatagaacatggatctactgataaaatatttaagaatcctgataataaaaaaacccaggactatataaccgggaggtttggataat

SEQ ID NO: 274574 - DNA, 294 bp, Unknown
  Bacterial polypeptide expressing nucleotide sequence isolated from the Sargasso Sea
gactatgtattgctagagctatatctgtaagtccagaagtgattcttatggacgaaccatgttcagcgcttgacccaatagcaacagctcaaattgaagaacttatagatgatcttaaaaaagaggtcacaattgtgatagttacccactcaatgtcacaagcagctagggtatctcaaaaaacaggtttctttcatttgggaaaacttatagaatttggaccaacagataaaatatttaaaaatcctgataatcagcaaactcaggattatattacaggaaggtttggttaat

SEQ ID NO: 274575 - DNA, 661 bp, Unknown
  Bacterial polypeptide expressing nucleotide sequence isolated from the Sargasso Sea
tatgaaaaataaatttgagacggaaaatgttaatgtgcattatggaactaaaattgccatagataatatctcattaaatattgaagcaaacaatattacctcacttatcggtccttctggttgtgggaaatctacgtttcttcgatgtcttaatagaatgaatgatacgatcgatggatgtgctgtctcgggaaagcttttgcttgataatgaagatatctatggcgagaatatagaccctgttgatatcagggcaaaagtaggtatggtttttcaaaaaccaaacccctttccaaaatcgatttttgaaaatattgcctatggaccaaaaatacatggactagcaaaaagtaaggctgagctgtatgatattgttttgcagagtttagagcgggcagggttaattgatgaggttcgagaccgactgcatgactcagcaaccggactttctggaggacaacagcaaaggatttgcatagcgcgagctatagctgtcaatccggatgtaatcttaatggatgaaccttgttctgcgcttgatcccatagcgactgccgtgattgaagaacttctagatcagttaagtaaagattttacaatcgttatagttacccattcaatggctcaagcagctcgagtttcatcgaagacggcatttttc

SEQ ID NO: 274576 - DNA, 418 bp, Unknown
  Bacterial polypeptide expressing nucleotide sequence isolated from the Sargasso Sea
atgataaccgatgaatatatattaagttctgataacctgaatgtttattatggtaattttcaggctcttgctaatgtctcaattaaaataaaaccaaacattgtaacagcattaatcggtccatctggttgtggtaaaagtacctttcttcgatgttttaatcgtatgaatgatcttatacctatattctcattagatggttctatcaaatataaatctcaggagttgtatgatgatactactgacgctacaaatattagatcacagataggaatggtttttcaaaaacctaatccatttcctaaaagtatatacaacaatgttgcttttggtttgaaaattaatgggtatacagggaattatgatgaagcaattgaaaactcattacgaagagacagcgttgtgggaagaagttaaa

SEQ ID NO: 274577 - DNA, 355 bp, Unknown
  Bacterial polypeptide expressing nucleotide sequence isolated from the Sargasso Sea
ctgattgaggtaaaagataattttggcttcaactacggtagtacacaggtgttatttgacctgaacctgcggatccccaaccgcaaagtcaccgccttaatcgggccgtctggttgtggtaagagtacgcttttgcgctgcttcaatcgtatgaatgacctgatcgatggtatcagccacacgggtgacatcaccattggaggtcagagcatcttcgatcccgcactggagattatcagcctccgtaaaaaagtggggatggttttccagaaatataatccatttccgaagaccatctatgagaatgtggtttttagccttagtgtatccggtcggaacaacaaggctctactcg

SEQ ID NO: 274578 - DNA, 289 bp, Unknown
  Bacterial polypeptide expressing nucleotide sequence isolated from the Sargasso Sea
gtgcatcgcccgcgccatcgccgtgcagcctgaggttatcctcttggatgagccgtgttccgccctcgatccgatcgccacggcccgaatcgaggaactgatagacaaactgcgccggaacttcaccatcgtcatcgtgacgcattccatgcaacaggcggcccgcgtatcgcagcggacggccttctttcacctcggcgacctcgtggaattcggcgataccgaacagatcttcaccgcgcccagcgacgaacgtacccagtcctacatcaccggacgaatcggctag

SEQ ID NO: 274579 - DNA, 558 bp, Unknown
  Bacterial polypeptide expressing nucleotide sequence isolated from the Sargasso Sea
aaagagtagatccagttgaagttagaagaagaatcggaatggtttttcaacaacctaatccttttccaaaatctatctacgaaaatattgcattcggagcaagaatcaatggctttactggtgacatggatcaattagtggaaagttccttgagaaaagctgctgtatggagtgaatgtaaggataaattaaatgatagtggttactctttatctggtggacaacaacagagattatgtattgctcgaaccatcgcaattgagcctgaaataattctcatggatgagccatgctcagctttagatccaatctctactttgaaaatagaagagacgatgcacgaacttaagaagaattacacaataataatcgttacccataatatgcagcaggcattaagagttagtgatatgactgctttctttaatgcagttgaatacgaagatggtgatggagggaaagtcggctatcttgccgaatttgattctactaagaaaatttttaactctccaaaagaaaaaactactcaggaatatatatcaggtaaatttggttaat

SEQ ID NO: 274580 - DNA, 857 bp, Unknown
  Bacterial polypeptide expressing nucleotide sequence isolated from the Sargasso Sea
gtttataacaatgcttggtccatctggttcaggcaaaacaacatgcttaatgatgttagccggatttgaaacacctacacatggggaaattttattagatggaaacataatttcgaatattcctccacataaaagaggtataggaatggttttccaaaactatgcattgttcccacatatgactgtttatgaaaatttagcttttcctttgagagtaagaaaagttgaaaaagatgaaattgataaaaaagttgataaagcattgtcgatggtttctttaaatggttttgaaaccagaatgccagctcaactttcaggtggtcaacaacaaagggttgctgttgcaagagctttagtatttgatccagcagtcgtattaatggatgaacctctaggagcattagataaaaatttaagagaaagcatgcaatatgaaatcaaacacattcatgaaagtattggtgtaacagttgtatatgtaactcatgatcaaagtgaggcattaactatgtcaaataggattgcagtatttaatgatggaaaggttcaacaactttcaaatccagctgaactttatgagaaaccagtaaactcttttgtcgctgagttcataggtgagaacaatactttcaatggtgaagttattgatatcgacaaagacaaatgcaaagttaaattagctaactcagagatactagcaaacccaatatctgttaagtcaaaaggagaaaaaacaacagtatcattgagacctgaaagggcattaattaatccaactgacaagatggataatatgtttaccggaaagattgaggaagtaatctatcatggtgatcatacaagagttagattaaatc

SEQ ID NO: 274581 - DNA, 662 bp, Unknown
  Bacterial polypeptide expressing nucleotide sequence isolated from the Sargasso Sea
agcattaattggtccatctggttgtggtaaatcaactttcctaagatgtcttaataggatgaatgatgtaattgatatctgcagtgttaaaggagaaattttaattaatgactttaatatcaatgataaaagttgtgatgttgtaagactaagagaaaaaattggtatggtttttcaaaaacctaatcctttcccaaaaactttatatgaaaatgtatcttacggtccaacaattcatggtatggctcaatcaaaacaagaaatggatgaaattgttgaaactagtttgaaaaaggctgcactatgggaagaagtaaaagatagattgcatgaacctggaactggattatctggaggacaacagcaaagactttgtattgctagagcgatttctgtaagaccagaagttatattaatggatgagccttgttcagcattagatccaatagcaacagcacaaattgaagaattgattgatgagttaaaaaaagagcacacaataataattgtaactcattctatggctcaagcggcacgtgtatctcaaaatacaggtttttttcacttaggacaattgatagaacatggatctactgataaaatatttaagaatcctgataatacaaaaacccaggactatataaccgggaggtttggataat

SEQ ID NO: 274582 - DNA, 733 bp, Unknown
  Bacterial polypeptide expressing nucleotide sequence isolated from the Sargasso Sea
atggcgaatgcgaccccgggtaaactttcagttcgtaacctgaacttctactacggaaaattccatgccctgaaaaatatcaacctggatatcaccaaaaaccaggttacggcgtttatcggcccgtcaggctgcggtaaatcgaccctgctgcggacattcaacaagatgttcgagctctacccggagcagcgtgcggaaggcgaaatcctgctggatggcgataatattctgaccaatactcaggatatcgctctgctgcgtgccaaagtcggtatggttttccagaagccgacgccgttcccgatgtcgatttatgacaatatcgcctttggcgttcgcctgtttgaaaagctgtcgcgtgccgatatggacgagcgcgtgcagtgggccttgaccaaagccgcattatggaacgaaaccaaagataaactgcatcagagcggatattctctctccggcggtcagcagcagcgtctgtgcatcgcgcgcggtatcgcgattcgtccggaagtgctgttactggatgaaccgtgttcagcgctggacccgatctccaccgggcgcattgaagagctgatcaccgaactgaaacaggactacaccgtcgttatcgttacccacaacatgcagcaggctgcgcgttgttcagaccatacggcatttatgtatcttggcgagctgattgaattcagtaacacggacgatctgtttaccaagcccgcgaagaaac

SEQ ID NO: 274583 - DNA, 466 bp, Unknown
  Bacterial polypeptide expressing nucleotide sequence isolated from the Sargasso Sea
aaaaagtatatatgataatatttcgtatggtcctaaaatacatggaaaaggtgaaaccaaaagcgaattagatcaaattgttgaaaacagtttaaaaaaatctgctttatgggaagaagttaaagatagacttgatgaaccaggcacaagtttatctggaggacagcaacaaagactttgtatagcgagagctatatctgttaatcctgaagtgatcttaatggatgaaccatgttcagcattagacccaattgctactgcaaaaattgaagaattaattgatgaattaaaaaaaacttatacgattgtaatagtgacacactcaatggctcaggctgtacgtgtttcacaaaaaacagggttttttcacctaggaaagttaattgaagttggaaaaactgagaaaatttttaaaaatcctgacaataaaatgacacaagactatattacaggtagatttggataa

SEQ ID NO: 274584 - DNA, 916 bp, Unknown
  Bacterial polypeptide expressing nucleotide sequence isolated from the Sargasso Sea
gtttctagttgtaaaagatcttcagttagatattgcggaaggtgagttcattactatgcttggtccctctggatccggcaaaacaacttgtctgatgatgcttgctggctttgaaactccaacaaacggagagatcttgttagatggaaatataatttctaatattccacctcacaaaagaggaataggaatggtttttcaaaattatgcactttttcctcatatgactgtttatgaaaatctagctttccctttaagagttagaaaaatggaaaaagatgaaattgataagaaagttgacaaagctttatcaatggtttcactaaatgggtttgaaacaagaatgccaggacaactttcaggaggacaacaacaaagggtagctgtagctagagctttagtttttgatcctgcagtagttttgatggacgaacctttaggtgcactggataaaaatttaagggagagtatgcagtatgaaattaaacatattcatgaaagcattggagtaactgtagtttacgttactcatgatcaaagtgaagctcttacaatgtcgaatagaattgcagtgtttaatgatggaaaagttcaacagctatcaaatccttcagagctttacgaaaaaccagtaaattcatttgtcgcagagtttattggtgaaaataatacctttaatggtgaggtatcagatatttcaggagatgaatgtaaagttaagctatctaatggagaaataatagccagcgctatttcagtaaaatctaaaggtgaaaaaacaacagtatctttgagacctgagagagctttaatcgaaccaagtgaaaaaatggacaatatgtttagtggcaagatagaagaggtaatttatcatggtgatcatactagagttcgaattaatttattaggaaaccca

SEQ ID NO: 274585 - DNA, 787 bp, Unknown
  Bacterial polypeptide expressing nucleotide sequence isolated from the Sargasso Sea
tatgtctaataatccagaattcgttaaatttgataaagttgacaaaagctatgatggtaaagttctagttgtaaaagatcttcagttagatattgcggaaggtgagtttattactatgcttggtccctctggatccggtaaaacaacttgtctgatgatgcttgctggctttgaaacaccaacaaacggagagatcttgttagatggaaatataatttctaacattccacctcacaaaagaggaataggaatggtgtttcaaaattatgcactttttcctcatatgactgtttatgaaaatttagctttccctttaagagttagaaaaatggaaaaagatgaaattgataagaaagttgacaaagctttatcaatggtttcacttaatgggtttgaaacaagaatgccaggacaactttcaggaggacaacaacaaagggtagcagtagctagagctttagttttcgatcctgcagtggttttgatggacgaacctttaggtgcactggataaaaatttaagagagagtatgcaatatgaaattaaacatattcatgaaagcattggagtaactgtagtttacgttactcatgatcaaagtgaagctcttacaatgtcgaatagaattgcagtgtttaatgatggaaaagttcaacagctatcaaatccttcagagctttacgaaaaaccagtaaattcatttgtcgcagagtttattggtgaaaataatacctttaatggtgaagtatcagatatttcaggagatgaatgtaaagttaagctatct

SEQ ID NO: 274586 - DNA, 654 bp, Unknown
  Bacterial polypeptide expressing nucleotide sequence isolated from the Sargasso Sea
tagggccatctggatgcggaaagtcaacttttcttcgatgcctaaataggatgaatgatcttattgatatctgtacagtttcaggaaagataataatgggaggagaagatattaatcagagaaatttggatgttgttagattgagagaaaaagttgggatggtatttcaaaagccaaacccttttcccaaaaccctttacgaaaacattgcttatggaccgacaatacacggtatcgcctcaagcaagcaggaaatggatgccatagtagaaaacagtctcaaaaaggccgcgctttgggacgaagttaaagatagattgaacgagattggtaccgggttgtccggaggccaacagcaaaggctctgtatagctagggcaatatctattaatccagacgttattcttatggatgaaccgtgttctgctttagatcctattgcaacggcaaaaatagaagaattaatagatgaattgagagagaacttcacgattgtcattgttacccactccatgcaacaggccgctcgagtctcccaaaaaacggctttctttcatctggggaatctggttgaggagggggagacggatcagatctttaaaaatccccaacatgagaaaacacaggactatgtcatggggcggattggataag

SEQ ID NO: 274587 - DNA, 262 bp, Unknown
  Bacterial polypeptide expressing nucleotide sequence isolated from the Sargasso Sea
gatgcgatcgcaagaccatgccgaagcccgagatttggggcaggaaaaagctgccaaagtctttgaaatcaatgggctacatgcctactacggggatttctgcgctcttcgagatgttcaacttgatgtacatcaatcagaagtcactgctttcatcggcccgtcggggtgcggaaagtcaactttccttagatgctttaaccgaatgaacgatcttattgaaggcgctcgcgttgacggagagatgcgttatcacggactc

SEQ ID NO: 274588 - DNA, 705 bp, Unknown
  Bacterial polypeptide expressing nucleotide sequence isolated from the Sargasso Sea
cctgtactacggccagaagcaggcgctgttcgacgtcaagatggatatccccaagcagcgcgtgaccgccttcatcggcccgtccggctgcggcaagtcgaccctgctgcgcactttcaaccgcatgaatgacctggtcgacggttgccgcgtggaaggtgagatcaacatcgacgggcgcaacatctaccgcaagggcgaggacgtggccgaactgcgtcgccgcgtcggtatggtgttccagaagcccaaccccttccccaagagcatctacgagaacgtggtgtatggcctgcgtatccagggcatcaacagcaagcgcgtactcgacgaggcggtggagtgggcactgaagagcgccgcgttgtgggatgaggtcaaggaccgtctgcacgactcggccctcggcctgtccggcggtcagcaacagcgtctggtcattgcccgtaccgtggccgtgcagccggaagtgctgctgctcgacgagccttgctcggcgctcgatccgatctccacgctgaaggtagaagagctgatctacgagctcaagagcaaatacaccatcgtcatcgtcacccacaacatgcagcaggcggcgcgcgtttccgactacaccgcgttcatgtacatgggcaagctgatcgagttcggcgacaccgataccctgttcaccaacccggccaagaagcagactgaagactacat

SEQ ID NO: 274589 - DNA, 397 bp, Unknown
  Bacterial polypeptide expressing nucleotide sequence isolated from the Sargasso Sea
tatgaaaagtataaaaataaaagcagataacttgaatgtttattatggagagaaacaggcactcttcgatgtttccatgtacatggaagaaaaacaagtcactgctttaataggtccatcaggttgtggtaaatcaacctttattagatgcttaaatagaatgaacgatgttattgatatatgcaaagtacaaggaaaaatagaaatcgatggcaacgatatttatgcaccagacatgcaagttgaacaactaagagaacgggtgggcatggtttttcaaaagccgaacccctttccaaaatctatttttgaaaatgtagcttatggtccaagaatacatggaatagcagaacataaatctgatttagaagaaattgttgttaccagtctaaaaaaa

SEQ ID NO: 274590 - DNA, 658 bp, Unknown
  Bacterial polypeptide expressing nucleotide sequence isolated from the Sargasso Sea
gatggcaaaaactaattcaaagaataaaagcaaaattatcgctaaaaatttagatgtattttacggtgatgcccaagcaatatacggagtagatattgatatcctagaaaatcaagtaacttcttttattggtccctctggttgtggtaaatcaactttcctacgttgtcttaaccgtatgaatgacacgattgattcatgcagcatcaaaggacaagtattattagatggtagcgatatctacgatccaaaagttgatgtagtaatgcttagagctaaagttggaatggttttccaaaaaccaaatccttttccaagatcaatctatgagaacgtagcttatggccctcgtattcatggtacctttgattctaaagatgaattagactttattgttgaaaaaagcctaagaagagccggcctttgggatgaagttaaagacagattaagtgaaccaggtaacggcctatctggaggacaacagcaaagattatgtatcgctagagcgattgcaatcagaccagaagttatcctaatggatgaaccatgttcagctcttgaccctattgctacggctaaaatcgaagaattaatcgatgagttaaaggagaaatttacaattgttattgtaacgcattccatgcagcaagcagcgcgt

SEQ ID NO: 274591 - DNA, 559 bp, Unknown
  Bacterial polypeptide expressing nucleotide sequence isolated from the Sargasso Sea
aatagatggtgttgaaatcaatgataaaaatttagatgtagtatctttaagagaaagagtaggtatggtttttcaaaaaccaaacccattcccaaaaagtatatatgataatatttcttatggtccaaaaattcatggaaaaggtgaaactaaaagtgaattagatgaaattgtggaaaatagtttaaagaaagctgcattgtgggaagaagttaaagatagacttgatgagccaggtacaggtctatcaggtggtcaacagcaacgtctttgtattgcaagagcaatttctgtaaatcctgaggttatattgatggatgaaccttgttcagctttagacccgatagcaacagcaaaaattgaggaattaatagatgagcttaaaaaaacctatactatagtaattgtaactcattcaatggcacaggcagttagagtttcacagaaaacagggttttttcatcttggtaaactaattgaagtaggcaaaacagagaaaatttttaaaaatcctgacaataaaatgacacaagactatattacaggtagatttggataa

SEQ ID NO: 274592 - DNA, 691 bp, Unknown
  Bacterial polypeptide expressing nucleotide sequence isolated from the Sargasso Sea
agtttagatattgaggaaaatcaagtcacggcattaattggtccatctggttgtggtaaatcaactttcctaagatgtcttaatagaatgaatgatgtaattgatatctgcagtgttaaaggagaaattttaattaatgactttaatatcaatgataaaggttgtgatgtagtaagactaagagaaaaaattggtatggtttttcaaaaacctaatcctttcccaaaaactttatatgaaaatgtatcttacggtccaacaattcatggtatagctcaatcaaaacaagaaatggatgaaattgttgaaactagtttgaaaaaggctgcactatgggaggaggtaaaagataggttgcatgaacctggaactggattatctggagggcaacagcaaagactttgtattgctagagcaatttctgtaagacctgaagttatattaatggatgagccttgttcagcattagatcctatagcaacagcacaaattgaagaattgattgatgagttaaaaaaagagcacacaataataattgtaactcattctatggctcaagcggcgcgtgtatctcaaaatacaggtttttttcacttaggacaattgatagaacatggatctactgataaaatatttaagaatcctgataataaaaaaacccaggactacataaccgggaggtttggataat

SEQ ID NO: 274593 - DNA, 688 bp, Unknown
  Bacterial polypeptide expressing nucleotide sequence isolated from the Sargasso Sea
aatgtctaagaaagtcgcgagtttagaaaatatatctaaaacatatgggaaagaggatctaactgttaaagccttagacagcataaacttagaaatttacaaaggtgattatttagctgtaatgggagctagtggctcaggcaaaagtacagctatgaatattattggatgtctagatagaccatctgacggtatttataaattaaatggtattcctgttgagaatttatctgatgatgagctcgcggaaatacgtaaccaaaaattaggcttcgtttttcaacaatttcatcttctatcagacgcaactgcacttgaaaacgtaactttgccgatgatttatgctggtattgatcctggacaaagattagagcgaggtaagagtgccttaaaaaaagttggcctttcagaaaggatgaataatcgtccaaaccaattatccggaggtcaacaacaacgagttgctattgcgagggctattatcaataaccctgcaattttgttagcagacgaacctactggagcactagattcaaaaaccactgaagatgtattagatctttttgacaagctgcatgaatctggaataactatcgttttagttactcatgaagatgaagttgcaaatcgcgcaaaaaaaatagccaaatttaaggatggaagaatagttgaattaaaagttaattaa

SEQ ID NO: 274594 - DNA, 658 bp, Unknown
  Bacterial polypeptide expressing nucleotide sequence isolated from the Sargasso Sea
tttgagtgatgatttaaaaaaagaggatgtaataaaaatttcaactaatgatgtatgtgttagttatggaaatgttagggctataaataatatttctttagatataatgcgaaataaggttacagcatttattggcccctctgggtgtggtaaatcaacattcttaaggactattaatagaatgaatgattttattgatatatgcaaagtatctggaaaaattttattagatggtcaagatttgtatgcccctgaagttgatgtagtgcagttaagggcaattgtaggtatggtatttcagaaacctaatccgtttccaaaatcaatttttgaaaatgtattgtatggacccaaaattcatgggcttgtaaactctaaaagtgaatctgatgaaatagtagaaaactctctaaaaagagcaggtttatggcaggaagtaaaagatagattaaaagagcctggcacggggctgtcaggtggacaacaacaaagattatgtatagctagggccattgctgtctcgccagaagttattttaatggatgaaccttgttcagctcttgatccaatagcaactgcaaaaattgaagagctaattgatgagctaagagaaaattatactattgttatagtaactcattctatgcaacaagccgca

SEQ ID NO: 274595 - DNA, 584 bp, Unknown
  Bacterial polypeptide expressing nucleotide sequence isolated from the Sargasso Sea
aatgaatgaaattaaaattaaatcaaaaaatttaaatgtattttatggagaaaagcaggctctgtttgatgtaaatcttgatttgaatgaaaaagaagttactgccctaattggcccatctggatgtggaaaatcaacttttattcgttgtattaatcgaatgaatgatgtgattgatatttgtaaagtttctggctctattgaaatggatggcattgatattaatgacaaaaatcttgatgttgtctcattaagagaacgtgtaggaatggtatttcaaaaaccaaacccatttccaaaaagtatttatgacaatgtttcttatggaccaaacattcatggaaaaggtgaaactaagtctgagctagacgaaattgtagaaaatagtttaaaaaaagctgctctttgggaagaggttaaggatagacttgatgaaccgggtactagcttgtctggaggtcagcaacaaagattatgtattgcaagagcaatatctgtaaacccagaagtaatattgatggatgaaccgtgttcggctttagacccaattgctactgcaaaaatagaagagttaatagatgagt

SEQ ID NO: 274596 - DNA, 652 bp, Unknown
  Bacterial polypeptide expressing nucleotide sequence isolated from the Sargasso Sea
tatgattaagataagtgcaaaaaatgttgatgttttttatggaaaaaagcaagccttgtttaatattaatttagacattgaggaaaatcaggtaacagccttaattggaccatcgggatgtggtaaatctacttttttaagatgcttgaatagaatgaatgatgtaattgacatatgcaaagttcaaggagagatagttataaacgattttaatattaacgataaagggtgtgacgtagtaagattgcgagaaaaaattggaatggtttttcaaaaaccaaatccatttccaaaaacattatacgaaaatatttcttatggtcctacaatccatgggatggctcaatcaaaacaagaaatggatgaaatagttgagacaagtttgaaaaaagctgcgctctgggaagaagtaaaagatagacttcatgaacctggaacaggtttgtcaggtggtcaacaacaacggttatgtatagcaagagctatttcggtacaaccggaagtaatcttaatggacgagccttgttcagcattagacccaattgcaacagcccaaattgaggagttaattgatgaattaaagaaagaacatacaataattatagttacacactctatggctcaagcagcaagggtctcacaaagaacaggt

SEQ ID NO: 274597 - DNA, 292 bp, Unknown
  Bacterial polypeptide expressing nucleotide sequence isolated from the Sargasso Sea
ctatgtattgctagagctatatctgtaagtccagaagtgattcttatggacgaaccatgttcagcgcttgacccaatagcaacagctcaaattgaagaacttatagatgatcttaaaaaagaggtcacaattgtgatagttacccactcaatgtcacaagcagctagggtatctcaaaaaacaggtttctttcatttgggaaaacttatagaatttggaccaacagataaaatatttaaaaatcctgataatcagcaaactcaggattatattacaggaaggtttggttaat

SEQ ID NO: 274598 - DNA, 524 bp, Unknown
  Bacterial polypeptide expressing nucleotide sequence isolated from the Sargasso Sea
cccggttttactgagggcaaagataggaatggtattccaaaaacctaatccattccctaagtcaatttttgacaatgttgcctacggaccaaaaattcatggtattgttaatagcaatgatgaattagaggagcttgttatatatagcttgaaaaaagctggtttgtatggagaggtaaaggataggctaaatgacacaggaacctctttatcggggggacagcagcaacgactatgcatagccagagccattgcaattagtccacaaataatcctaatggacgaaccgtgttctgccctagatccaatagcaactgctataattgaagaacttattgatgagttagctaaaaactttactattgtaatcgtaacccactcaatgcagcaagctgcaagagtctcacagcaaactgctttttttcatatgggtagtttgatcgaagtagggcgcacagatcaaattttttcaacaccaagccaaaaaaagactcaggattatataacaggaaaaataggttaaa

SEQ ID NO: 274599 - DNA, 515 bp, Unknown
  Bacterial polypeptide expressing nucleotide sequence isolated from the Sargasso Sea
actgcgggccagggtcggtatggtattccagaagccgaacccttttcccaagtccatctacgacaacgtggcttacggcccccggattcacgggctggccaaccgcaagtcggatctggacgagatagtggaaaacagtctgcgcaaggccggcctctgggaagaggtaaaggatcgcctggacgccaacgcaaccggcatgtccggcggccagcaacagcgtctgtgtattgcccgtgccattgccgtgagcccggaagtggtgctgatggatgagccctgctcggccctggaccctattgcgaccgcgaaagtggaagagctgattgccgaactgtccgaaagctacacgatcgttatcgtgacccactcgatgcagcaggcggcccgggtatctcaccgtacggcctacttccacctgggacacctggttgaagtgaacgagaccaacaaggtattcacctcgccggaacatgaactgaccgagtcctacatcaccggccgttttggctgat

SEQ ID NO: 274600 - DNA, 502 bp, Unknown
  Bacterial polypeptide expressing nucleotide sequence isolated from the Sargasso Sea
attggtatggtttttcaaaaacccaatccgtttcccaaaaactttatatgaaaatgtatcttacggtccaacaattcatggtatggctcaatcaaaacaagaaatggatgaaattgttgaaaatagtttgaaaaaggctgcactatgggaagaggtaaaagataggttgcatgaacctggaactggattatctggaggacaacagcaaagactttgtattgctagagcgatttctgtaagacctgaagttatattaatggatgagccttgttcagcattagatccaatagcaacagcacaaattgaagaattgattgatgagttaaaaaaagagcacacaataataattgtaactcattctatggctcaagcagcacgtgtttctcaaaatacaggtttttttcatttaggacaattgattgaacatggatctactgataaaatatttaagaatcctgataataaaaaaacgcaagattatataacagggaggtttggataa

SEQ ID NO: 274601 - DNA, 567 bp, Unknown
  Bacterial polypeptide expressing nucleotide sequence isolated from the Sargasso Sea
catgtaccagcaaggcaagactgaaaccctagtttccgccgtacttcctgacgagactgtcggcaatgtctttgtcgacaatccgcgcattacagcgcgtgaagtgaatgttttctacggtgacaagcaggcaatcgaccgggtcacgctcgatattgccgaaaagcaggtcatttccttcatcggtccttccggctgtggcaagtcgacatttctgcgttgcttgaaccggatgaatgataccatcgacatctgccgcatcgagggtgagatcgcgctggacggcatgaatatctacacgccagacgtcgatgttgtgccgcttcgcgcgcgggtcggcatggtgttccagaaaccaaacccattcccgaagtcgatctatgacaatgtcgcctacggaccgcggatacacggtctcgctgctagcagtgtcgagcttgacgagattgtcgagatttcgctggagcgcgctggcctctggaacgaggtgaaggaccggctgcagcagccagggaccggcctgtcgggtggccagcagcagcgcctgtgcatcgcccgtaccattgc

SEQ ID NO: 274602 - DNA, 694 bp, Unknown
  Bacterial polypeptide expressing nucleotide sequence isolated from the Sargasso Sea
tatggaaaaaactaaaatagaaagtaaaaaaataagtgttttctacggtgaaaaaaaagcattatctggaatctcactagatataccggaaaaaagggttacctcattgattggtcccagtggttgtggtaagtcaacgttcttaaggtgtttaaacagaatgaatgacacaattgagatttgcagaattgagggaaagattttagttgatggagaggatatatatgacagaaagttagatccggttttattgagggcacgaattggtatggtctttcaaaaacctaatccttttcccaaatctatatttgacaatgttgcatacggcccaaaaattcatggactcacaaatagtaaagacgaattgtctgaattagtagaatctagtttaaaaaaagctggattatttaatgaagttaaagataggcttaatgagccaggaacatcattatctggtggacaacaacaaagattgtgtatcgccagagcaattgctgtaagtccagaagttattctcatggatgagccttgttcagcgttagaccccattgctacagctgtaattgaagaattaattgatgaaatttctaaaaactttacaattgtaatcgtaacacattcaatgcagcaagctgcgagagtatccaaccaaactgcttttttccatatgggaaatcttatagaggttggaaag

SEQ ID NO: 274603 - DNA, 691 bp, Unknown
  Bacterial polypeptide expressing nucleotide sequence isolated from the Sargasso Sea
agtttagatattgaggaaaatcaagtcacggcattaattggtccatctggttgtggtaaatcaactttcctaagatgtcttaatagaatgaatgatgtaattgatatctgcagtgttaaaggagaaattttaattaatgactttaatatcaatgataaaggttgtgatgtagtaagactaagagaaaaaattggtatggtttttcaaaaacctaatcctttcccaaaaactttatatgaaaatgtatcttacggtccaacaattcatggtatagctcaatcaaaacaagaaatggatgaaattgttgaaactagcttaaaaaaagctgcactatgggaagaggtaaaagataggttgcatgaacctggaactggattatctggagggcaacagcaaagactttgtattgctagagcaatttctgtaagacctgaagttatattaatggatgagccttgttcagcattagatcctatagcaacagcacaaattgaagaattgattgatgaattaaaaaaagagcacacaataataattgtaactcattctatggctcaagcggcacgtgtatctcaaaatacaggtttttttcacttaggacaattgatagaacatggatctactgataaaatatttaaaaatcctgataataaaaaaacccaggactatataaccgggaggtttggataat

SEQ ID NO: 274604 - DNA, 401 bp, Unknown
  Bacterial polypeptide expressing nucleotide sequence isolated from the Sargasso Sea
tatgaatagtaaaaaaaatgatttaaaatctcttgaattgacagtaggcgatgtcttttcaaaaaatgccaggttaaaagctagaaacgttaatgttttttatggggaaaacaaagccattgataatgtcacaatagatattggcaacaaagaagtcatttcatttattggcccttctggttgtggaaaatcaacatttctgcgttgttttaacagaatgaacgacaccattgattcatgtgttattcaaggtgaaataacaattgatgaagaaaatatttatgacaaaaaaattgatgttgtaccattaagagctcgtattgggatggtatttcagaaacctaatccatttccaaaatctatttacgacaatgtcgcttatgggcccagaatacacggtt

SEQ ID NO: 274605 - DNA, 747 bp, Unknown
  Bacterial polypeptide expressing nucleotide sequence isolated from the Sargasso Sea
gctgatcgaacaacacttcgatgcgtctgcgggagagaatgatgcttcatcagaatcagaagatgagaatgaagatgaaaccactgaagaagccgaggatgatgaagaggaatccaatgaagagaccgaggatgttgctgagtcagaagaaactcagaaatcgcatgatgaagacattcctgattcgacgcgaacactcaatattgatgatgaagcacacatgtggattcatgatctagaccttcattatgggaatgcacaagccatctacaatgtttcaattccatttgaacgaaacgcagtcactgccctaatcgggccttccggttgcggaaagtcaacgcttctacgttgcctcaacaggatgaatgatttgatttcaatctgtaaaatcgacggtaaaattgagttggaagatgacaacattatgacgcgtggtgccgatctggtcaccattcgtcggagagttggtatggttttccagaaaccaaatccattcccgaagtcgatttatgacaatgtcgcttacggtgttcgattgcactacaatccaagccgtcgtgagttggatcggattgttgaaagtgcattgaggagagctgcactatgggacgaagtcagtgaccgacttcacgagttgggcacgagtttgtccggaggtcaacagcaacgtctttgcatcgcgaggacaattgccgttgagccagaagtcatcctgatggacgagccttgttctgcactcgaccc

SEQ ID NO: 274606 - DNA, 366 bp, Unknown
  Bacterial polypeptide expressing nucleotide sequence isolated from the Sargasso Sea
aatgataaagattaaagcaaaagatgtggatgttttttacggaaaaaaacaagctctctataacataagtttagatattgaagaaaatcaagtaacagcattaattggtccatctggttgtggtaaatcaacttttcttagatgtcttaatagaatgaacgatgtaattgatatctgtaatgttaaaggagaaattctaattaatgactttaatataaatgataaaagttgtgatgtggtaagactcagagaaaaaattggaatggtttttcaaaaacctaatcctttcccaaaaactttatatgaaaacgtatcctatggaccgacaatccatggtatggctcaatcaaaacaagaaatggatga

SEQ ID NO: 274607 - DNA, 650 bp, Unknown
  Bacterial polypeptide expressing nucleotide sequence isolated from the Sargasso Sea
accatctgggtgtggaaagtctactttcttaagatgcttgaacaggatgaacgacgtcatagaaatttgtagagttgaaggcagtattaaaatggacaacctagaactgaattcaagaaagttagatgttgtgagacttagggagaacgttggtatggtttttcaaaaacccaatccattccctaaaacaatttatgaaaatgtagcttatggtcctactattcacggtattgcacagagcaaagaagaaatggatcaaatagttgaaacaagtttgaaaaaagctgccttgtggaacgaagttaaagatagacttgatgaaatcggaactggtttatcaggaggtcaacagcaacgactatgtattgctagagctatatctgtaagtccagaagtgattcttatggacgaaccatgttcagcgcttgacccaatagcaacagctcaaattgaagaacttatagatgatcttaaaaaagaggtcacaattgtgatagttacccactcaatgtcacaagcagctagggtatctcaaaaaacaggtttctttcatttgggaaaacttatagaattcggaccaacagataaaatatttaaaaatcctgataatcagcaaactcaggattatattacaggaaggtttggttaat

SEQ ID NO: 274608 - DNA, 706 bp, Unknown
  Bacterial polypeptide expressing nucleotide sequence isolated from the Sargasso Sea
tttaaagcaggagatataacttcactcattggcccttctggttgtggtaaatcaaccgttcttagagctttgaatagaatgaatgatttaatccctaattgttcgttaaaagggacagtcctctttgatggaactaatatctatgacaaaagagtagatccagttgaagttagaagaagaatcggaatggtttttcaacaacctaatccttttcctaaatctatttacgaaaatattgcattcggagcaagaatcaatggctttacgggagatatggatgaattagtcgaaagttccctaagaaaagctgctgtatggagtgaatgtaaggataaattaaatgatagtggttactctttatctggtggacaacaacagagattatgtattgctcgaaccatcgcaattgagcctgaaataattctcatggatgagccatgctcagctttagatccaatctctactttgaaaatagaagagacgatgcacgaacttaagaagaattacacaataataatcgttacccataatatgcagcaggcattaagagttagtgatatgactgcattttttaatgctattgaatacgaagatggtgatggagggaaagtcggctatcttgccgaatttgattctactaagacaatttttaactctccaaaagaaaaaactactcaagaatacatatcaggtaaatttggctgat

SEQ ID NO: 274609 - DNA, 547 bp, Unknown
  Bacterial polypeptide expressing nucleotide sequence isolated from the Sargasso Sea
atgcagcgcatcgccgtgccctccgcgcaccaggacctgcagaccccggcaccggtcaagctcgccgcgcgcggcctggacttctactacggccagttccatgcgttgaagaacatcaacctggaaatcccggaaaagcgcgtcaccgcgctgatcgggccgtccggctgcggcaagtccaccctgctgcgcatcttcaaccgcatctacgcgctgtaccccaagctcgaagcccgcggcgaggtgctgctggacggcgagaacatcctctcgccgaaatacccgatgaaccgcctgcgctccaaggtcggcatggtgttccagaagccggtgccgttcccgatgaccatcttcgagaacgtggcctacggcatccgccaccacgagaagctgtccaaggccgacatggccgaccgcgtcgagcacgcgctgcgccagggcgcgctgtgggacgaggtcaaggacaagctcggccagagcgcgctgggcctgtccggcggccagcagcagcgcctgtgcatcgcccgcgcggtggcgctcaagcccg

SEQ ID NO: 274610 - DNA, 331 bp, Unknown
  Bacterial polypeptide expressing nucleotide sequence isolated from the Sargasso Sea
atgataaagattaaagcaaaagatgttgatgttttttacggaaaaaaacaagcactctttaatataagtttagatattgaggaaaatcaagtaacggcattaattggtccatctggttgtggtaaatcaactttcctaagatgtcttaatagaatgaatgatgtaattgatatctgtagtgttaaaggagaaattttaattaatgactttaatatcaatgataaaagctgtgatgtagtaagactaagagaaaaaattggtatggtttttcaaaaacctaatcctttcccaaaaactttatatgaaaatgtatcttacggtccaacaattc

SEQ ID NO: 274611 - DNA, 400 bp, Unknown
  Bacterial polypeptide expressing nucleotide sequence isolated from the Sargasso Sea
aatggatgaaattgttgaaactagcttaaaaaaagctgcactatgggaagaggtaaaagataggttgcatgaacctggaactggattatctggagggcaacagcaaagactttgtattgctagagcaatttctgtaagacctgaagttatattaatggatgagccttgttcagcattagatcctatagcaacagcacaaattgaagaattgattgatgagttaaaaaaagaccacacaataataattgtaactcattctatggctcaagcagcgcgtgtatctcaaaatacaggtttttttcacttaggacaattgatagaacatggatctactgataaaatatttaagaatcctgataataaaaaaacccaggactatataaccgggaggtttggataa

SEQ ID NO: 274612 - DNA, 610 bp, Unknown
  Bacterial polypeptide expressing nucleotide sequence isolated from the Sargasso Sea
atgtctaaaaatccagaatttgttaaatttgataaagttgacaaaagttatgatggtaaagttttagttgttaaagatctccaattagatattgctgagggcgaatttattaccatgcttggtccatctggttctggtaaaacaacttgtctaatgatgcttgctggttttgaaactcctacaaatggtgaaattttattagatggaaatataatttctaatatacctccccacaaaagaggaattggaatggtatttcaaaattatgcactttttccacacatgacagtttacgaaaatttagcttttccattgagagtaagaaaaattgagaaagatgaaattgataaaaaagttgataaagctttatcgatggtttcattaaacgggtttgaaacaagaatgccaggacagctttcaggaggacaacagcaaagggtagcagtagctagagctttagtttttgatccagcagtagttttgatggatgaacctttaggcgccttggataaaaatttaagagagagtatgcaatatgaaattaaacatattcatgagagcataggcgtaactgtagtttatgttactcacgaccaaaggaagccttaac

SEQ ID NO: 274613 - DNA, 682 bp, Unknown
  Bacterial polypeptide expressing nucleotide sequence isolated from the Sargasso Sea
atgtctaaaaatccggaatttgtaaaattcgataaagtagataaaagttatgacggtaaagtacttgtcgtcaaagatcttcaattagatattgcagagggcgaattcataaccatgcttggtccatctggttcaggtaaaacaacatgtctaatgatgttagctggatttgaaacaccaactcatggtgaaatattattagatggaaatataatttctaatattccacctcataaaagagggattggaatggtgtttcaaaactatgcattattcccacatatgacagtttatgaaaacttagctttccctttaagagtaagaaaagttgaaaaagaagaaattgataaaaaagttgataaggctttgtcgatggtttcattaaatggatttgaaaccagaatgccagcccaactttcaggtggtcaacaacaaagggttgctgttgcaagagctttagtatttgatcctgcagtggttttaatggacgaacctctgggagcgttagacaaaaatttgagagaaagtatgcaatacgagattaaacatattcacgaaagtattggtgtaacagtcgtatatgtaactcacgatcaaagtgaggcgttaacaatgtcaaatagaattgcagtatttaatgatgggaaagttcaacaactttctgatccagcagaactttaag

SEQ ID NO: 274614 - DNA, 493 bp, Unknown
  Bacterial polypeptide expressing nucleotide sequence isolated from the Sargasso Sea
ggtttttcaaaaaccaaatccttttcctaaaactatttatgaaaatatttcttatggtccaacaattcatggcatggctcaatcaaaaaatgaaatggatgaaatagttgaaaccagtttaaaaaaggcagcattatgggaagaggttaaagatagacttcatgaaccaggtactggtttgtctggtggacaacaacaaagattatgcatagcaagggctatttcagttaaacctgaagttattcttatggacgagccttgttctgctttagatcctattgctacagctcaaatagaagaactaattgatgagttaaaaaaagaccatactattataatagtcactcattcaatggctcaagcagcaagagtatcccaaaacacaggcttttttcatttgggagaattgatagaacacggttctactgataaaatatttaagaatcctgaaaataaaagaactcaggattatattacagggaggtttggataa

SEQ ID NO: 274615 - DNA, 421 bp, Unknown
  Bacterial polypeptide expressing nucleotide sequence isolated from the Sargasso Sea
aatgaacgaaattaaaataaaatcaaaaaatctaaatgtttattatggtgaaaaacaagctttgtttgatgtaaatttagatttaaacgaaaaagaagttactgctttaataggtccatcaggatgtggaaaatctacctttattagatgtataaacagaatgaacgatgtaattgatatttgtaaagtatctggaaacattgaaatagatggtgttgaaatcaatgataaaaatttagatgtagtatctttaagagaaagagtaggtatggtttttcaaaaaccaaatccatttccgaaaagcatatatgataatatttcttatggtccaaaaattcatggaaaaggtgaaactaaaagtgaattagatgaaattgtggaaaatagtttaaagaaagctgcattgtgggaagaagtaaag

SEQ ID NO: 274616 - DNA, 772 bp, Unknown
  Bacterial polypeptide expressing nucleotide sequence isolated from the Sargasso Sea
aatggtagaaaataacaatactaagatttcagctaaagacgttgatgttttttattctgaaaagcaggcattaaataagatctcaatggatattaaagaaaaagaagtaacagctttaataggtccatctggttgtggtaaatcaacatttcttagatgtatcaatcgaatgaatgatctcattgaaatttgtaaagtaactggatcaataaaagttgataatgaagagattataagttcctctactgatgtggtaagcctcagatctaaaattggaatggtttttcagaaaccaaatccttttcctaaatcaatatttgataatgtagcttatggacctagtattcacggattagcagatacaaaatctgatctagaaaatatagttattacatcgttaaaaaaagctggtttatataatgaagttaaagatagattaaacgagcctggaacaagcttatctggcggtcaacaacaacgattatgtattgcaagagcaattgctgtgaatcctgaaataattttaatggatgaaccctgctctgctttagatccaatagcaactgctattatagaagaattaattgatgagttaagattaaactatacaattattattgtaacccattctatgcaacaggcagcaagagtttcgcagaaaacatgtttctttcatttaggtgaattgatagaaacaggtgatacaaataaaatttttacaaatcctgataatacaaaaactcaagattatatcacagggaggtttggataa

SEQ ID NO: 274617 - DNA, 585 bp, Unknown
  Bacterial polypeptide expressing nucleotide sequence isolated from the Sargasso Sea
agatgttgatgttttttatggaaaaaaacaagcgctctttaatataagtttagatattgaggaaaatcaagtaacggcattaattggtccatctggttgtggtaaatcaactttcctaagatgtcttaatagaatgaatgatgtaattgatatctgcagtgttaaaggagaaattttaattaatgattttaatatcaatgataaaagttgtgatgtcgtaagactaagagaaaaaattggtatggtttttcaaaaacccaatcctttcccaaaaactttatatgaaaatgtatcttacggtccaacaattcatggtatggctcaatcaaaacaagaaatggatgaaattgttgaaactagtttgaaaaaggctgcactatgggaagaggtaaaagataggttgcatgaacctggaactggattatctggaggacaacagcaaagactttgtattgctagagcgatttctgtaagacctgaagttatattaatggatgaaccttgttcagcattagatccaatagcaacagcacaaattgaagaattgattgatgagttaaaaaaagagcacacaataataattgt

SEQ ID NO: 274618 - DNA, 757 bp, Unknown; identical to SEQ ID NO: 274573
  Bacterial polypeptide expressing nucleotide sequence isolated from the Sargasso Sea

SEQ ID NO: 274619 - DNA, 532 bp, Unknown
  Bacterial polypeptide expressing nucleotide sequence isolated from the Sargasso Sea
tatggttgatactgccccaggtaaaattcaggttcgtgatttgaacttctactatggcaaattccatgccctgaagaacatcaacctggatattgctaaaaaccaggtaacggcgtttatcggtccttctggctgtggtaaatcgacgctgctgcgtacgttcaacaaaatgtttgaactgtacccggagcaacgtgcggaaggtgaaattctgctggatggcgacaatattctcaccaatacccaggatatcgctctgctgcgagccaaagtgggcatggtattccagaagcccacgccgttcccgatgtccatctacgacaacatcgcttttggcgtacgtctgtttgagaaactctcgcgtgcggatatggacgaacgcgtgcagtgggcattgaccaaggccgcattgtggaatgaaaccaaagataaattacaccagagcgggtactctctctcgggtggtcagcagcagcgactgtgtattgcgcgtggcatcgccattcgcccggaagtgcttctgcttgatgag

SEQ ID NO: 274620 - DNA, 757 bp, Unknown
  Bacterial polypeptide expressing nucleotide sequence isolated from the Sargasso Sea
catgagcaaaattaaagctaaggatgtaaatgttttttatggagataagcaagcgctatttaatgtgtctatagatattgaagaaaaacaaactacagcattaattggcccttctggttgtggaaaatcaacattattaagatgttttaatagaatgaatgatataattgatggctgtcatgttgaaggccaaataagtatgggaaatacagtcatttctgatcctgctttagatatagtaaaacttagaactaaagtaggtatggtttttcaaaaacctaatccttttccaaagtctatttatgataatgtagcatacggtccgagaatacatggtttggctaaaaataaagctgagttagatcagatagttgaaacaagtttgcaaagagcgggaatttggggagagataaaagatagactaagtagctctggtacaggcttatcaggaggacaacagcagagattatgtattgcaagagctatagctgtgaagccggaagtcatactgatggatgaaccatgctctgcgttagatccaattgcaacagcaacaattgaagagcttatgaatgaactatctaaagattttactattataattgttacacacaatatgcaacaagcggcaagaatatcaaaaaagacagcattttttcatcttggaaacattatagagtacaatactacagaaacaatatttaccaatccaaccgaagaaaaaacacaggactatattacaggtagatttggataa

SEQ ID NO: 274621 - DNA, 547 bp, Unknown
  Bacterial polypeptide expressing nucleotide sequence isolated from the Sargasso Sea
gcaaagtacagctatgaatattattggatgtctagatagaccatctgaaggtatttataaattaaatggaattcctgttgagaatttatctgatgatgagctcgctgaaatacgtaaccaaaaattaggctttgtttttcaacaatttcatctcctctcggacgcaactgcacttgaaaacgtaactttgccgatgatttatgctggtattgaacctgagcaaagattagagcgaggtaagaatgccttaacaaaagttggcctctcagaaagaatgaataatcgtccaaaccaattatctggaggacaacaacaacgagttgctattgcgagggctattatcaataaccctgcaattttattagcagacgaacccactggagcactagattcaaaaaccactgaagatgtattagatctttttgacaaactgcatgaatctggaataactatagttttagttacccatgaagatgaagttgcaaatcgcgcaaaaaaaatagccaaatttaaagatggaagaatagttgaattaaaagtaaattaa

SEQ ID NO: 274622 - DNA, 291 bp, Unknown
  Bacterial polypeptide expressing nucleotide sequence isolated from the Sargasso Sea
aacctgatgtggtgttgatggatgaaccctgttcggcgttagatcccatagccacagctcgaatagaggaactcatagcggaactgaagactcaatatacgattgtgattgttactcacaacatgcaacaagctgcgcgcattagtgaccgtacagctttcttttctgtagaggtgagcgacagcggtcgacgaactggacagcttgttgaaatagacaggaccgaacaaatctttaccaatccggaagatccgcggactgaggcgtacatcaccggccgggtgggctgat

SEQ ID NO: 274623 - DNA, 496 bp, Unknown
  Bacterial polypeptide expressing nucleotide sequence isolated from the Sargasso Sea
aattgttcgttaaaagggacagtcctctttgatggaactaatatctatgacaaaagagtagatccagttgaagttagaagaagaatcggaatggtttttcagcaacctaatccttttccaaaatctatctacgaaaatattgcattcggagcacgaatcaatggctttacgggagatatggatgaattagtggaaagttccttgagaaaagctgctgtatggagtgaatgtaaggataaattaaatgatagtggttactctttatctggtggacaacaacagagattatgtattgctcgaaccatcgcaattgagcctgaaataattctcatggatgagccatgctcagctttagatccaatctctactttgaaaatagaagagacgatgcacgaacttaagaagaattacacaataataatcgttacccataatatgcagcaggcattaagagtcagtgatatgactgctttctttaatgcagttgaatacgaag

SEQ ID NO: 274624 - DNA, 752 bp, Unknown
  Bacterial polypeptide expressing nucleotide sequence isolated from the Sargasso Sea
tatagtaaagtgcagagatgtatcagtatattatggagaaaataaagcgataaatagtgtaagcattggcattgaaaaaaaatctattactgcttttattggaccatccggttgtggtaagtccacttttttaagaactataaatcgtatgaacgacaccattgaacattgtaaaatagaaggaagtgtaattgttgatggacaagatatctatgatccatccgttgatgttgtaccgcttagagcaaaagttgggatggtctttcaaaaaccgaatccattcccaaaatcaatttacgaaaatgttgcttatggcccgcgcatacatggactagcatcaagtaaatccgaacttgatgaaatagtagaaaaagcgctgaagggtgccggattatggaatgaagcaagagaccgacttaatgaatctgggacaggcttgtcaggagggcagcaacagcgtttatgtatcgctagaacaattgcagtagaacctcaaatcatacttatggacgagccatgttctgctctcgacccaatagcgacatcaaagattgaagacctaatgtcagaattggcaaaggaatatacaattataattgtaactcactcaatgcaacaggctgcgagagtgtctcagaaaactgcctactttcatcttggtaatttaattgagtatggggatactaaagaaatatttgttcgcccaaaagacactcagaccgaagcctatatatctggtaaaattggttagg

SEQ ID NO: 274625 - DNA, 712 bp, Unknown
  Bacterial polypeptide expressing nucleotide sequence isolated from the Sargasso Sea
atgtctaaaaatccagagtttgttaaattcgataaagtagataaaagttatgacggtaaggttcttgtcgtcaaagatctacaattagatattgcagaaggtgagttcataacaatgcttggtccatctggttcaggtaagacaacttgtttaatgatgttggctggttttgaaacgccaactcacggtgaaatattattagatggaaatataatttcgaatattcctcctcataaaagagggatcggaatggttttccaaaactatgcattgtttccacatatgacagtttatgaaaatttagcttttccattaagagtaagaaaagttgaaaaagatgaaatagataaaaaagttgataaagcattatcgatggtttcattaagtggttttgaaactagaatgcctgctcaactttctggtggtcagcaacaaagggtagcagttgcaagagccctagtatttgatccagcagtcgtattaatggatgaacctctaggagcattagataaaaatttaagagaaagcatgcaatatgaaataaaacatattcatgaaagtattggtgtaacagttgtatacgtaactcatgatcaaagtgaggcattaactatgtcaaacaggattgcagtatttaatgatggaaaggttcaacaactttcaaatccagctgaactttatgagaagcccagtaaattcttttgttgctgag

SEQ ID NO: 274626 - DNA, 733 bp, Unknown
  Bacterial polypeptide expressing nucleotide sequence isolated from the Sargasso Sea
tatgaaaagtataaaaataaaagcggacaacttaaatgttcattatggagagaaacaagcactcttcgacgtgtccatgtacatggaagaaaaacaagtcaccgctttgataggtccatcaggatgcggcaaatcaacctttattagatgcttaaatagaatgaacgatgttattgatatatgcaaagtacaaggaaaaatagaaatcgatggcaacgatatttattcaccagacatgcaagttgaacaactaagagaacgtgtgggtatggtttttcaaaagccgaacccttttccaaagtctatttttgaaaatgtagcttatggtccaaaaatacatggaatagctgaaaataaatctgatttagaagaaattgttgttaccagtctaaaaaaagcagctctctttgatgaggttaaagataggttaagcgactcaggaacaagcctgtcaggggggcagcagcaaagattgtgtattgcaagagccatatccgtaaatccagatattattctaatggatgagccttgttcagctttagacccaattgctacggctagaattgaagaattaatgggagatcttaagacagaatatacaataattattgttacgcactcgatgcagcaagccgctagagtttcatcaagaacaggtttctttcatttaggtaaattagttgaagttgataagactgaaacaatttttcaaatccatcagatcagagaacgc

SEQ ID NO: 274627 - DNA, 343 bp, Unknown
  Bacterial polypeptide expressing nucleotide sequence isolated from the Sargasso Sea
gatcgtttagatgaaccaggcacttctttatcaggaggacaacaacagagactttgcatcgcccgtgctatatctgttaatccagaagtaattctaatggatgaaccatgttctgcattagatccaattgctacagcaaaaatagaagaacttatggaggagcttaaaaaaacttttaccatagtaatcgtaactcactctatggctcaagcagtaagggtctcacaaagaactggcttttttcatttaggcaatttgattgaagtcgatactactgataagatgttcaaaaatcctaataacaagatgacacaagattatattacaggaaggtttggttaga

SEQ ID NO: 274628 - DNA, 623 bp, Unknown
  Bacterial polypeptide expressing nucleotide sequence isolated from the Sargasso Sea
aatcagatgttttaatagaatgaacgacactattcgaattgcaaatattagtggtcaaattttatacaataaaagaaatgtgactgatattgatcccgctgaagtcaggtatagaataggaatggtatttcaaaaacctaatccttttccaaaatcgatatatgaaaatgttgcctttggtccaaaagttaatggaattaaagaaaacttagatcaaattgttgaaacaagtctaaaaaaagcagatttatggaaagaagttaaagatagactaaaagaaaatgcatacggactttctggaggtcagcaacaaagattgtgcatagctcgaactttagctgttaatcctgaagttatacttatggatgagccttgttcagcacttgatcctatttcaacagatagaatagaagagttaattaaagatttatcaagttcagtgactattgtaatagttactcataatatgcaacaagctgtaagagtatctgactattctgcctgcatgatggcaggagaagaaagaattggagagttaattgagtacggagaagttgatcagatatttggaaatcctaaagacaaaagaacagaggaatatgtaacgggcagaattggataac

SEQ ID NO: 274629 - DNA, 424 bp, Unknown
  Bacterial polypeptide expressing nucleotide sequence isolated from the Sargasso Sea
gggccttgcaaacacaaaaagagaactcaatgatatagtattaaacagcttagagagagcgggtttaatcgacgaagtaagggatcgtcttgaagactctgcaacggggctgtctggagggcaacagcaaagaatttgtatagcgagagctattgcggttaatcctgaggttattcttatggatgaaccttgctcagctttggatccaattgccacggcgaaaatagaggaattgatgagttccttaacggactcatatacaattgtaatagtcactcactcaatgcaacaagcagccagggtttcccaaaaaacagctttttttcatctgggaaccttgattgaaacaaacgacacagaaaaattatttacacaaccagaacataaacaaactcaagactatataacaggaagaataggataa

SEQ ID NO: 274630 - DNA, 631 bp, Unknown
  Bacterial polypeptide expressing nucleotide sequence isolated from the Sargasso Sea
tctactttcttaagatgcttgaacaggatgaacgacgtcatagaaatttgtagagttgaaggcagtattaaaatggataacctagaactgaactcaagaaagttagatgttgtgagacttagggagaacgttggtatggtttttcaaaaacccaatccattccctaaaacaatttatgaaaatgtagcttacggtcctactattcacggtattgcacagagcaaagaagaaatggatcaaatagttgaaacaagtttgaaaaaagctgccctgtggaacgaagttaaagatagacttgatgaaatcggaactggtttatcaggaggtcaacagcaacgactatgtattgctagagctatatctgtaagtccagaagtgattcttatggacgaaccatgttcagcgcttgacccaatagcaacagctcaaattgaagaacttatagacgatcttaaaaaagaggtcacaattgtaatagttacccactcaatgtcacaagcagccagggtatctcaaaaaacaggtttctttcatttgggaaaacttatagaatttggagcaacagataaaatatttaaaaatcctgacaaccagcaaactcaggattatattacaggaaggtttggttaat

SEQ ID NO: 274631 - DNA, 610 bp, Unknown
  Bacterial polypeptide expressing nucleotide sequence isolated from the Sargasso Sea
aatggtaaaaaaattgaattacaaatttgagattaaaggagtcaacgttttctatggatcgaaacaggccataaatgatataagccttaatattgaagaaaacaaaattactgcactgattggcccatcggggtgtggtaaatcaacctttctcaggtgcatgaaccgtatgaatgatgtaatcacaaattgccgtgtcaaaggaaaaattcttttggacaagcaggatatatacagcgataaaatcgatcccgtgcagttgcgagccaaggttggaatggtctttcaaaagccaaatccttttccaaagtcaatttttgaaaatatcgcatatggaccacgaattcatggtctcggttcgactaaagcagaactaagtgaaattgtccttgatagtctcgagagagctggacttattaacgaggtgaaagatcggctagatgatgtagctactggcttatcaggaggacaacagcaacggatttgcatagccagagccatcgcagtgaatccagaagttatcctaatggatgagccttgttcagcacttgatcccattgccacagctagaattgaagagctgatgaatagcctagcaaccacttataca

SEQ ID NO: 274632 - DNA, 709 bp, Unknown
  Bacterial polypeptide expressing nucleotide sequence isolated from the Sargasso Sea
atgagtaaaattatagcagaaaatgtaaatgtatattacggatctaaacaggcattatttgatgtctctataaatatagcagaaaaagaggttacagctttaattggaccatctggatgtggaaagtctactttcttaagatgcttgaacagaatgaacgatgttatagatatttgtagagttgaaggtagtattaaaatggatgacctagaactcaactcaagacaattagatgttgtgagacttagggaaaacgttggtatggtttttcaaaaacccaatccgttccctaaaacaatttatgaaaatgtagcttatgggcctactattcacggcattgcacagagtaaagaagaaatggatcaaatagttgaaacaagtttgaaaaaagctgctctgtggaacgaagttaaagatagacttaacgaagtcgggactggtttatcaggaggtcaacagcaacgactatgtattgctagagctatatccgtaagcccagaagtgattctcatggacgaaccatgttcagcgcttgacccaatagcaacagctcaaatagaagaacttatagatgatcttaaaaaagaggtcacaattgtaatagttacccactcaatgtcacaagcagctagggtatctcaaaaaacaggtttctttcatttgggaaaacttatagaaaagggatcaacagataaaatatttaaaaatc

SEQ ID NO: 274633 - DNA, 613 bp, Unknown
  Bacterial polypeptide expressing nucleotide sequence isolated from the Sargasso Sea
cctgaaccggatgaatgataccatcgatatatgtcgaatagagggtgagatcgcgctggatggcaagaatatctatgcgccagacgtcgatgttgtgccgcttcgtgcgcgggtcggcatggtgttccagaaaccgaacccgttcccaaagtcgatctacgacaacgtcgcctacggaccgcggattcacggcctcgctgctggcagtgttgagcttgacgagattgtaaagatttcgctggagcgcgccggcctctggaacgaggtgaaggaccggctgcagcagcctgggaccggcctgtcgggtggccagcagcagcgcctgtgtatcgcccgggccattgctgtgagcccggaggtgatacttatggacgagccatgctcggcactggatccgattgcaaccgcaaaaatcgaggagttgatcgacgagttgagtagtcagttcaccattgtaatcgtgacccattctatgcagcaggcagcgcgggtatcgcagcgtacggcctattttcacctcggcaagctagtggaggttggcgaaacagaacagatgttcaccacgccgcaacatgaaatgacacagaattacatcaccggtcgtttcggataa

SEQ ID NO: 274634 - DNA, 757 bp, Unknown
  Bacterial polypeptide expressing nucleotide sequence isolated from the Sargasso Sea
atgacaaagataagcgcaaaaaatgtaaatgttttttatggctctaagcaggctttgttcgatgtttcactagatataatggataaagaagtgactgctttaatcggtccatcaggatgtggaaagtcaacttttctaagatgtttaaatagaatgaatgatgtaatagatatttgtaaagttgaaggaagcattaaaatggatgaattggaactcaattcgagaaaactggacgttgtaagactaagagagaatgtaggtatggtgtttcaaaaaccaaatccatttccaaaaacaatttatgaaaacgtctcttatggacctacaattcatggtatggctcaatctaaaagtgaattagatcagattgttgagatgagtttaaaaaaagccgctctttgggaagaggtaaaagacagattagatgaaattggcactggtttatcaggaggtcaacaacaaagattatgtatagctagggctatttcagttagtccggaagtgattttaatggacgaaccttgctcagctctagatcctatagctactgctcaaattgaagaattaattgatgatttaaaaaaagaacacacaatagtgatagttacccactcgatgtctcaagcagcaagggtatctcaaaaaacaggtttcttccacctcggaaaacttatagaatttggcgatacagaaaaaatatttaaaaatcctgacaaccaacaaactcaggattatattacaggaaggtttggttaat

SEQ ID NO: 274635 - DNA, 757 bp, Unknown
  Bacterial polypeptide expressing nucleotide sequence isolated from the Sargasso Sea
atgataaagattaaagcaaaagatgttgatgttttttacggaaaaaaacaagcgctctttaatataagtttagatattgaggaaaatcaagtaacagcattaattggtccatctggttgtggtaaatcaactttcctaagatgtcttaatagaatgaatgatgtaattgatatctgtagtgttaaaggaaaaattttaattaatgactttaatatcaatgataaaagttgtgatgtagtaagactaagagaaaaaattggtatggtttttcaaaaacctaatccttttccaaaaactttatatgaaaatgtatcttacggtccaacaattcatggtatggctcaatcaaaacaagaaatggatgaaattgttgaaactagtttaaaaaaggctgcactatggaaagaggtaaaagatagattgcatgaacctggaactggattatctggaggacaacagcaaagactttgtattgctagagcgatttctgtaagacctgaagtaattttaatggatgagccttgttcagcattagatccaatagcaacagcacaaattgaagaattgattgatgagttaaaaaaagagcacacaataataattgtaactcattctatggctcaagcggcacgtgtatctcaaaatacaggtttttttcacttaggacaattgatagaacatggatctactgataaaatatttaagaatcctgataatacaaaaacccaggactatataaccgggaggtttggataat

SEQ ID NO: 274636 - DNA, 856 bp, Unknown
  Bacterial polypeptide expressing nucleotide sequence isolated from the Sargasso Sea
aatgattaaaaatactaaaaaattgcaaaaaaataatattttatctcttgaggatgtttctattagttatggcacttttgaagcagtaaaaaatgttttttgtaattttaaaaggggagatataacttcactcattggcccttctggttgtggaaaatcaaccgttcttagggctttgaatagaatgaacgatttaatccctaattgttcacttaaaggaactgttctctttgatgggactaatatttatgacaaaagagtagatccagttgaagttagaagaagaatcgggatggtttttcagcaaccaaatcctttcccaaaatccatctacgaaaatattgcatttggggcaagaattaatggctttactgggaatatggacgagctggttgaaagttcgctcagaaaagctgctgtatggagtgaatgtaaagataaattaaatgatagtggctattccttatccggaggacaacaacaaagattatgtattgctcgaaccatcgcaattgaacctgaaataattctaatggatgagccatgttcagctttagatccaatctctactttgaaaatagaagaaacgatgcatgaacttaagaagaattacacaataataatcgtcactcataatatgcagcaggctttaagagtcagtgatatgactgctttctttaatgcggttgaatacgaagatggcgatggaggtaaagttggttatcttgcagaattcgactcaacaaagaaaatttttaactcttccaaaagaaaaaaccactcaggaatatatttctggcaaatttggttaatttacactttaaaaagaaagatttttactctcaagaaagcttag

SEQ ID NO: 274637 - DNA, 640 bp, Unknown
  Bacterial polypeptide expressing nucleotide sequence isolated from the Sargasso Sea
atgtggaaatctacattacttaaatgtattaatagaatgaacgacctagttgaaatatgtaaaactgatggtcaagtgttattggattctaaagacattaatgatgcatcacaagatccagttcttttgagaatgaaagtgggcatggtgtttcaaaaacctaatccttttccaaaatcaatatatgataatgtagcttttggaccaacgttgcatggaatgaccaattcaaaggaggagcttgatcatgtagtgatagaaagtctaagtaaatcaggattgtatgatgaggtaaaagatcggttgtttgatcctggcaccggtttatctggaggccaacaacaaagactttgtattgcaagagctctcgcagttaatcctgagattctcttgatggatgagccatgctctgctttggatccaatcgcgactgcaaagattgaggatttgattgctgagcttaaagagcaatacacaatcgtaattgttactcactctatgcaacaagcagctagggtatctgatagaacggcttacatgcatatgggagaactgattgagtcaggattaaccaagacaattttctccaatccacagcatcagaaaactcaagactatattacgggaaggatcggataat

SEQ ID NO: 274638 - DNA, 406 bp, Unknown
  Bacterial polypeptide expressing nucleotide sequence isolated from the Sargasso Sea
aatggatatcaaggagaaagaagttacggcattaattggtccttcaggatgtggtaaatcaactttcttaagatgtataaacagaatgaatgatttaattgaaatttgtaaagtatcaggatcaataaaagttgataacgaagaaattattagtgataaaatcgatgttgtaagtctaagatctaaaattggaatggtatttcaaaaaccaaatccttttcctaaatctatttttgataatgttgcttatggcccaactatacatggtttagttgactcaaaaaatgacttagaagaaattgtacattcatcattaaaaaaggcaggtctatttgatgaagtaaaagatcgattaaatgaacctggaacaagtttatcaggcggtcaacaacaacgattatgtatt

SEQ ID NO: 274639 - DNA, 709 bp, Unknown
  Bacterial polypeptide expressing nucleotide sequence isolated from the Sargasso Sea
atgataattgagacagagggcgtgaaggtgaacttcggagacttctgggcactgaagggcgtggacatcaaggtgaggaagggcgagatcatcgtcatcctcggcccctcgggatccggcaagtcgacgtacatcaggaccctgaacagactgcagccccacagcggtggcacgatcaagatcgacgggataaccatcgacgacgacacgaccgtgtccgacctgaagtacatcaggtccgagataggattcgtcttccagcagttcaacctcttcccccacctcacgatcatggagaacgtgaccctggccccgatgaaggtcaaggggatgcccaagagggaggccgaggacctggcaatggagctgctcgagagggtaggcataccggagcaggcctacaagtacccgagcgggctttccggcggccagcagcagagggtcgccatcgccagggcgctcgccatggaccccaagatcatgctcttcgacgagcccacctccgcgctcgacccggagatgatcaaggaggtccttgaggtgatgatagatctggccaagagggacatcacgatgatcgtggtcacccacgagatgggcttcgccaaggaggtcgccgacaggtgcatcctcttcgacgagggccacctgatcgaggagaacaccccagaggagttcttctccaaccccaagcacgacaggaccaagc

SEQ ID NO: 274640 - DNA, 811 bp, Unknown
  Bacterial polypeptide expressing nucleotide sequence isolated from the Sargasso Sea
aatgattaaaaatactaaaaaattgcaaaaaaataatattttatctcttgaggatgtttctattagttatggcacttttgaagcagtaaaaaatgttttttgtaattttaaaaggggagatataacttcactcattggcccttctggttgtggaaaatcaaccgttcttagggctttgaatagaatgaacgatttaatccctaattgttcacttaaaggaactgttctctttgatgggactaatatttatgacaaaagagtagatccagttgaagtaagaagaagaattgggatggtttttcaacaacctaatcctttcccaaaatccatctacgaaaatattgcatttggggcaagaattaatggctttacgggagatatggatgaattagtggaaagttcattaagaaaggctgctttatgggacgaatgtaaggataaattaaacgatagtggttactccttatctggcggacaacaacaaagattatgtatcgctagaactattgcaattgaacctgaaataattctcatggatgagccatgttcagctttagatccaatctctactttgaaaatagaagaaacgatgcatgaacttaagaagaattacacaataataatcgtcactcataatatgcagcaggctttaagagtcagtgatatgactgctttctttaatgcggttgaatacgaagatggcgatggaggtaaagttggttatcttgcagaattcgactcaacaaagaaaatttttaactctccaaaagaaaaaaccactcaggaatatatttctggcaaatttggttga

SEQ ID NO: 274641 - DNA, 775 bp, Unknown
  Bacterial polypeptide expressing nucleotide sequence isolated from the Sargasso Sea
aatggaattaaaaaactcaaatataaaaataaaatctaaaaatttaaatgtttattacggtaataaacaagcattacataatattaatttagaaattaataacaaagaagtcacagctttaataggtccttctggatgtggaaagtctacttttataagatgtatcaacagaatgaatgatacaatagatatttgtagagtagatggctcaatagaaatagatggtaaagaagttaatgataaaaatgtagacgttgttactctaagagaaaaaattggaatggtttttcaaaaaccaaatccgtttccaaaaagcatttacgataacattgcttatggcccaactattcatggaataggagaaaaaaaagatgaaatggataagattgttgaaacaagtttaaaaaaagctgcattgtgggatgaagtaaaagatcgtctgaatgagcctggaacaggtttatctggcggtcaacaacaaagattatgtattgcaagagctctttcggtaaatccagaagtaatacttatggacgaaccttgttctgcattggaccctatagcaactgcaaaaatagaggagctaatagatgatttgaagaaaagctatacaattgttatagtgacacattcgatggctcaagctgtgagagtttcacaaaaaactggttttttccatttgggaaaaataatcgaagttgatacaacagaaaaaatttttaagaatccagctaataaaatgacacaagattatataacaggaaggtttggttaa

SEQ ID NO: 274642 - DNA, 760 bp, Unknown
  Bacterial polypeptide expressing nucleotide sequence isolated from the Sargasso Sea
aatgcaaaataaatcaaaaaagaaaattggaaaagaaattatatcaacagatgaagtaacaaaatcttttggtaaatttcaggctttaaaaggaattacatcaaaaatatatgaaaaagaagttgtagttatatttggaccttcgggatcaggtaaatctacttttataagaacattgaatagactagaacctcacgattcaggtgaaattattgtagatggcattgtattaaatgatgatgtaaaaaatcttcaatatgtaagatctaatgttggaatggtctttcaacaatttaatttatttccccatttatcagttctaagaaatatcacaatagctccgcaaaaagtaaaaggattaaagcgtgcagatgctgaagaaatagcaatgggattattagaaagagtaggcatacctgagcaagctagcaagtttcctagtcaactatctggaggacaacaacaaagattagcaatagcaagagctttagcaatgcagcctaaaattatgttatttgatgagccaacatctgctttagatccagaaatgatcaaagaagtattagaagtaatgaccgaacttgcagaatcaggaatgacaatgatatgtgttacccacgaaatgggatttgcaaaagaagtcgctgatcgtttcttgttttttgatgaaggattaatagttgaagaaggaacaggagatcaaatatttaataatccaaaagaagaaagaactaaattatttttatcacaaatcttataa

SEQ ID NO: 274643 - DNA, 781 bp, Unknown
  Bacterial polypeptide expressing nucleotide sequence isolated from the Sargasso Sea
atgtccatagaagaattaaaagtatctattaaaaacttaaatgttttttatggagagaaacaagcattatttggagtaaatttaaatatctatgcaaacgaagtcacatcattaattgggccttcgggttgtggtaaatctacattaataaaatgtataaatcggatgaatgatctggtggatatatgtagatataatggacaaataatgatcgatggagaagatataaatgattcatcgacagatccagtaagtcttagaaccagaatagggatggtctttcaaaaacctaatccgtttccaaaatctttatatgataatgtagcatatggcccaagattacatggtatgactaattcaaaagaagatcttgatgaactggttataacaagtctgcaaaaagctggactatttaatgaagttaaagatagactgtttgaaccaggtacaggactgtctggtggacaacaacaaaggctatgcattgctagagcattagcagtgaatccagagattatattgatggatgagccctgttcagccttagatcctatagccactgcgaagatagaagagctaatagaagagcttaaagaaaaatatactattgtgatagttactcattcaatgcaacaagctgcaagagtttccaatagaacagcttatatgcacatgggtgaactaattgagtctggtctgacaaaaactatattttctaatcctgagcatataaaaacacaagattacatcacgggggagaattggctaacaattatatagt

SEQ ID NO: 274644 - DNA, 775 bp, Unknown
  Bacterial polypeptide expressing nucleotide sequence isolated from the Sargasso Sea
atgattcgactggagaacatcgacaagtacttcggcgagaaccgcgtactgagttcagtgaacctgcaacttgagccgggcaatgtgactgcgctgatcgggccgtccggcagcggcaagagtacgttgttgcgctgcgtgaatctactggagattccggagtccggatcacttgagttgggcgaccagcgccttgaattcagccgggaccacaagccatcgcgggagacggtgctaacgattcgccgccgcactggcatggtgtttcagaatttccagttgtttccgcatctgacggtacggcagaacgtgatggagggtttgctgaccgtactgaagtgggacgagcagagggcgcgcttacgggcggacgaattgctcgagaaagttggcattgcgcaaaaggcggacgcatggccttcgacgctgtccggtgggcagcaacagcgggtcgccattgcacgcgcgctggcaccttcaccggaggtgttgttatgcgacgagccgacatcggcgctcgaccctggcctcgcagcggaggtggtggatgttctgaagcaactggccacagaaggcatgacgatgttgatggcgacgcacgacctgcggcttgccgcgacgattgcgcgagacgtggtgtttctgagcaatggcgtggtggtagaagcgggtccgtcgagggacatattcatgcggccgcgcgaacgggagacggagcgttttgtgtcgacgctgacgcacagcctccctgacgcatggacagcgcaaggctgac

SEQ ID NO: 274645 - DNA, 805 bp, Unknown
  Bacterial polypeptide expressing nucleotide sequence isolated from the Sargasso Sea
aatgattaaaaacactaaaaagtcgcaaaagaaaaacattttatctcttgaggatgtttctattagttatggcacttttgaagcggtaaaaaatgtttttttaaattttaaagcaggagatataacttcactcattggcccttctggttgtggtaaatcaaccgttcttagagctttgaatagaatgaacgatttaatccctaattgttcgttaaaagggacagtcctctttgatggaactaatatctatgacaaaagagtagatccagttgaagttagaagaagaatcggaatggtttttcagcaacctaatccttttccaaaatctatctacgaaaatattgcattcggagcaagaatcaatggctttacgggagatatggatgaattagtggaaagttccttgagaaaagctgctgtatggagtgaatgtaaggataaattaaatgatagtggttactctttatctggtggacaacaacagagattatgtattgctcgaaccatcgcaattgagcctgaaataattctcatggatgagccatgctcagctttagatccaatctctactttgaaaatagaagagacgatgcacgaacttaagaagaattacacaataataatcgttacccataatatgcagcaggcattaagagtcagtgatatgactgctttctttaatgcagttgaatacgaagatggtgatggagggaaagtcggctatcttgccgaatttgattctactaagaaaatttttaactctccaaaagaaaaaaccactcaggaatatatatcaggtaaattt

SEQ ID NO: 274646 - DNA, 1087 bp, Unknown
  Bacterial polypeptide expressing nucleotide sequence isolated from the Sargasso Sea
tatgtctaaaaacccagaatttgtaaaattcgataaagtagataaaagttatgacggtaaagttcttgtcgtcaaagatcttcagttagatattgctgaaggcgaattcataacaatgcttggcccatctggttcaggtaagacaacttgtttaatgatgttagctggttttgaaacaccaactcacggtgaaatattattagatggaaacataatttcgaatattcctccgcataaaagaggtatcggaatggtttttcaaaactatgcattgtttccacatatgacagtttatgaaaacttagcttttccattaagagtaagaaaagttgaaaaagatgaaatagataaaaaagttgataaagcattatcgatggtttcattgagtggatttgaaactagaatgccagctcaactttcaggcggtcagcaacaaagggttgcagttgcaagagccttagtgtttgatccagcagttgtattaatggatgaacctttgggagcattggataaaaatttaagagaaagcatgcaatatgaaattaaacatattcatgaaagtattggggtaacagttgtatacgtaactcacgatcaaagtgaggcattaactatgtcaaataggattgcagtttttaatgatggaaaagttcaacaactttcaaatccagcagaactttatgagaaaccagtaaattcttttgttgctgaatttattggagaaaataatacatttaatggagaggtggttgatattgctaaagacagatgcaaagttaagttggcaaattcagaaatattagccaatccaatttctgttaagtctaaaggtgagaaaactacagtctcattaagacctgaaagagctttaataaatccaactgacaagatggataatatgtttactggaaagattgaggaagtaatctatcacggcgatcatacaagagttagattaaatctattgggcagctcagagtttattcttaaagtacctaatagtacgtccaatttagagctaaaagtcagtcaagatataaatattggctggaacagtattgatgcaagagctttagatccaaaataa

SEQ ID NO: 274647 - DNA, 697 bp, Unknown
  Bacterial polypeptide expressing nucleotide sequence isolated from the Sargasso Sea
catgctgaatattgatcagctggtcaccagctacccggactggcgcgtcagcttcagcgccaccctgcccaagggggagatcaccgcgctgattggcccgagcggtgctggcaagtcgaccctgctcggcatgatcgccggtttcgtgccggtagagtccggcaccctcgacttcgatggcgaggatctattgccgcttggcccggccgcgcggccggtcaccaccctgtttcaggatcacaacctgttcctgcatctgtcggtgttcgacaacatcgccatcggcctgcaccccggcctgcgcctgaacgcagcccaacgggctcaggtgaaagatgccgcgagccgggtcggccttggcgagatgctcacccggctgccggaacagctctccggcggccagcaacagcgggtcgggctggcccgcgccctggtgcggggcaagccactgctgctgctggatgaacccttctcggcgctcgatcccgccctgcgccgggagatgctggcggaagtggcgaggcttgcctgcgagcagggcattaccgtgctgatggtgtctcacaacccggaggatgcccagctcattgccgatcaagtcctgttcgtcgacgaggggcgcatcgccctgcagggaaagccggatattctgcaaaacagcaaccacccggggctgctgcgctatctgggtcaataa

SEQ ID NO: 274648 - DNA, 496 bp, Unknown
  Bacterial polypeptide expressing nucleotide sequence isolated from the Sargasso Sea
tttgtttaatataaatttagaaatagaggaaaatcaggtaacagccttaattggaccatcgggatgtggtaaatctacttttttaagatgcttaaatagaatgaatgatgtaatcgatatatgcaaggttcaaggagagatagttataaatgattttaatataaacgataaagggtgtgacgtagtaagattgcgagaaaaaattggaatggtttttcaaaaaccaaatccatttccaaaaacattatacgaaaatatttcttatggtcctacaatccatggtatggctcaatcaaaacaagaaatggatgaaatagttgagataagtttaaaaaaagctgcgctctgggaagaagtaaaagatagacttcatgaacctggaacaggtttgtcaggtggccagcaacaacggttatgtatagcaagagctatttcggtacaaccggaggtaatcttaatggacgagccttgctcagcattagacccaattgcaaca

SEQ ID NO: 274649 - DNA, 586 bp, Unknown
  Bacterial polypeptide expressing nucleotide sequence isolated from the Sargasso Sea
aatgataaagattaaagcaaaagatgttgatgttttttatggaaaaaaacaagcgctctttaatataagtttagatattgaggaaaatcaagtaacagcattaattggtccatctggttgtggtaaatcaactttcctaagatgtcttaatagaatgaatgatgtaattgatatttgtagtgttaaaggagaaattttaattaatgactttaatatcaatgataaaagttgtgatgtagtaagactaagagaaaaaattggtatggtttttcaaaaacctaatccttttccaaaaactttatatgaaaatgtatcttacggtccaacaattcatggtatggctcaatcaaaacaagaaatggatgaaattgttgaaactagtttgaaaaaggctgcactatgggaagaagtaaaagatagattacatgaacctggaactggattatctggaggacaacagcaaagactttgtattgctagagcgatttctgtaagaccagaagttatattaatggatgagccttgttcagcattagatcctatagcaacagcgcaaattgaagaattgattgacgagttaaaaaaa

SEQ ID NO: 274650 - DNA, 586 bp, Unknown
  Bacterial polypeptide expressing nucleotide sequence isolated from the Sargasso Sea
atttgtagagttgaaggtagtattaaaatggatgacctagaactcaactcaagaaaattagatgttgtgagacttagggaaaacgttggtatggtttttcaaaaacccaatccgttccctaaaacaatttatgaaaatgtagcttatggacctactattcacggtattgcacagagcaaagaagaaatggatcaaatagttgaaacaagtctgaaaaaagctgccctgtggaacgaagttaaagatagacttgatgaaatcggaactggtttatcaggaggtcaacagcaacgactatgtattgcaagagctatatctgtaagcccagaagtgattcttatggatgaaccatgttcagcgcttgacccaatagcaacagctcaaattgaagaacttatagatgatcttaaaaaagaggtcacaattgtaatagttacccactcaatgtcacaagcagctagggtatctcaaaaaacaggtttctttcatttgggaaaacttatagaatttggatcaacagaaaagatatttaaaaatcctgacaaacaacaaactcaggattacattacaggaaggtttggttaat

SEQ ID NO: 274651 - DNA, 811 bp, Unknown
  Bacterial polypeptide expressing nucleotide sequence isolated from the Sargasso Sea
aatggaaactaaagaaacagttcaagtaaacaatgaaaatgtattcaatgtaaaagatgtctccgtaagctacggagaattcgtagctatcaaaaatgtaaatatggatatctctaaaaataaaattacagcttttattggcccatctggttgtggaaagagtactttgataagaacatttaatagaatgaatgatcttatattgggtgcaaaagttaatggaacaataaattatcaaggtgttgatttatacgacaaaatggttgatccagtgcaagtgagaagaagaatcggaatggtttttcaaaaaccaaatcctttcccaaaaactatcaaagaaaatattacctttgggcttaaagtcaacaacatgactgacaatatggatgaaagagtagagagggcattaactcaagcagcgttatgggatgaagtaaaagatgatttaaacaaaaatgcattagagctatcaggtggtcagcaacaaagattgtgtattgctagaacaattgcagttgagccagatacaattttaatggacgagccttgctctgcattagaccctgtagcaacaaaaaaaatagaagaccttatgcaagagttagtgaaagagttttcaattcttattgttacgcacaatatgcagcaagcctcaagagcctctgattattgtgcattttttacaactaaaacctccgatgatggcaaaagaagaactggagaattagttgagttcaatgaaacgaatgccatgtttacaaatcctgatgaggaattaactgaacaatatatatctggaaggtttggatga

SEQ ID NO: 274652 - DNA, 757 bp, Unknown
  Bacterial polypeptide expressing nucleotide sequence isolated from the Sargasso Sea
atgataaagataaattcaaaaaatgtagatgttttctatggaaaaaaacaagctctattcaatataaacttggatattgaagaaaatcaagttacagcactaattggtccttcaggttgtggtaaatctacttatttaagatgtctaaatcgtatgaatgacgtgattgatatatgtagagtaaaagggcagattataatcaatgattttgatattaatgacaagagttgcgatgtagttagattacgagaaaaaattgggatggtttttcaaaaaccaaatccttttcctaaaactatttatgaaaatatttcttatggtccaacaattcatggcatggctcaatcaaaaaatgaaatggatgaaatagttgaaaccagcttaaaaaaggcagcattatgggaagaggttaaagatagacttcatgaaccaggtactggtttgtctggtggacaacaacaaagattatgcatagcaagggctatttcagttaaacctgaagttattcttatggacgagccttgttctgctttagatcctattgctacagctcaaatagaagaactaattgatgagttaaaaaaagaccatactattataatagttactcattcaatggctcaagcagcaagagtatcccaaaacacaggcttttttcatttgggagaattgatagaacatggttctactgataaaatatttaagaatcctgaaaataaaagaactcaggattatattacagggaggtttggataat

SEQ ID NO: 274653 - DNA, 760 bp, Unknown
  Bacterial polypeptide expressing nucleotide sequence isolated from the Sargasso Sea
tatggccgttgatgattgttctttagagattaagtcgggtgaagtttgcatgattgtaggaccttcaggatgcggaaagacaacattattaaatgccatagcaggatttcattcaattacagaaggtgagatttatttggataatgaaattctatgtggtcctaataagccccttgctgaccagggctctgatagaatagttgttttccaacatggtgctctttttccatggaagacccttcaagaaaatgttgcatatggtccaatagttcaaaaagtattgcctaaaaatgaagctcttgataaagccggaagtttactagaagaggctgggattggtgatatgatgaaaaaatatccaggagaagtttcatctggtatggctagaagagcagaaattgttcgagctttaataaataatcccaaagtattattactggatgaaccatatagagcaatggatgcattaacaaaatcaataatgcatgaatctttgcttgaagtatatgataaaacaaatgttacaatattttttataacacatgatcttgaggaagcaatttttttgggtgataaagttgtcgttatgacaaccagaccagcaaaaacaaaattaattcttgatgttgacattcccaggcctcgaaattatcaagtactttcttctgaaaaatttcgagtgttagtaaatgaagcaaaagatgctgttcacgaagaagctataaaagcttttgaagcaggggaaagagagttagcataa

SEQ ID NO: 274654 - DNA, 769 bp, Unknown
  Bacterial polypeptide expressing nucleotide sequence isolated from the Sargasso Sea
catgacaaataataaagttaaaataaaaactgaaaaattagatgttttttatgggcaaaaacaagctcttaaaaatgttaatttagaaatttttaatagagaagttactgccttaataggaccttcgggttgtggtaaatcaacatatataagatgtattaatagaatgaacgacgtaattgaaacatgcaaaatatctggctcaataaaaattgatggacaagaaataaataataaacaaattgatgtagtaagactaagggaaagaataggtatggttttccaaaagccaaatccttttccaaaaagtatttatgataatgtagcttatggtccacaaattcatggtttagctgatcataaagataaattggatcagattgttcaaacaagtttaaaaaaatctgcactttgggaagaggttaaagatcgtttagatgaaccaggcacttctttatcaggaggacaacaacagagactttgcatcgcccgtgctatatctgttaatccagaagtaattctaatggatgaaccatgttctgcattagatccaattgctacagcaaaaatagaagaacttatggaggagcttaaaaaaacttttaccatagtaatcgtaactcactctatggctcaagcagtaagggtctcacaaagaactggtttttttcatttaggaaatttgattgaagtcgatactactgataagatgttcaaaaatcctaataacaagatgacacaagattatattacaggaaggtttggttag

SEQ ID NO: 274655 - DNA, 541 bp, Unknown
  Bacterial polypeptide expressing nucleotide sequence isolated from the Sargasso Sea
gttgaagtgcgccgtcggatcgggatggtgttccagcagcccaacccctttccccaagagcatctacgagaacattgccttcggtgcccggatcaacggtttcaccggtgacatggatgaactcgtggaacggtccctgcgccaggccgccgtctgggacgaatgcaaggacaagctgaatgaaagtggttattccctctcgggtggtcagcagcagcgcctctgcattgcacgcacgattgccatccagccggaagtgatcctgatggatgaaccttgttcagctctggacccgatctccacattgaagatcgaggaaacgatgcacgaactcaagaagagcttcaccatcgtgatcgtgacccacaacatgcagcaggccgttcgcgtcagcgacatgaccgcgttctacaacgcagaggctgttgaaggcggcagcggcaaggtgggctacctggtggagttcaacgagaccgagaagatcttcaactctcctcaacagcaggccactcaggactacgtctcgggccgtttcggttga

SEQ ID NO: 274656 - DNA, 757 bp, Unknown
  Bacterial polypeptide expressing nucleotide sequence isolated from the Sargasso Sea
aatgataaagattaaagcaaaagatgttgatgttttttacggaaaaaaacaagcgctctttaatataagtttagatattgaggaaaatcaagtaacagcattaattggtccatctggttgtggtaaatcaactttcctaagatgtcttaatagaatgaatgatgtaattgatatctgtagtgttaaaggagaaattttaattaatgactttaatatcaatgataaaagttgtgatgtagtaagactaagagaaaaaattggtatggtttttcaaaaacctaatccttttccaaaaactttatatgaaaatgtatcttacggtccaacaattcatggtatggctcaatcaaaacaagaaatggatgaaattgttgaaactagtttaaaaaaggctgcactatgggaagaagtaaaagatagattgcatgaacctggaactggattatctggaggacaacaacaaagactttgtattgctagagcaatttctgtaagaccagaagttatattgatggacgagccttgttcagcattagatccgatagcaactgcacaaattgaagaattgattgatgagttaaaaaaagagcacacaataataattgtaactcattctatggctcaagctgcacgtgtctctcaaaatactggtttttttcacttaggacaattgatagaacatggatctactgataaaatattcaagaatcctgataatacaaaaacacaggattatataacgggaaggtttggataa

SEQ ID NO: 274657 - DNA, 757 bp, Unknown
  Bacterial polypeptide expressing nucleotide sequence isolated from the Sargasso Sea
atgataaagataaattcaaaaaatgtagatgttttctatggaaaaaaacaagctctattcaatataaatttagatattgaagaaaatcaagttacagcactgattgggccttcaggttgtggtaaatctacttttttaagatgtctaaaccgaatgaatgacgttattgatatatgtagagtaaaagggcagattataattaatgattttgatatcaatgataaaagttgtgatgttgttagattaagagaaaaaattggtatggtttttcaaaaaccaaatccttttcctaaaactatttatgaaaatatttcttatggtccaacaattcatggtatggctcaatcaaagaatgaaatggatgaaatagttgaaactagcttaaaaaaggcagcattatgggaagaggtgaaagatagacttcatgaaccaggtactggtttgtctggtggacaacaacaaagattatgtatagcaagggcaatttcagttaaacctgaagttattctaatggacgagccttgttctgctttagatcctattgctacagctcaaatagaagaactaattgatgagttaaaaaaagaccatactattataatagtcactcactcaatggcacaagctgcaagagtttctcaaaatacaggtttttttcaccttggagaattgatagaacatggttctactgataaaatatttaagaatccagaaaacaaaaaaactcaggattatatcacagggaggtttggataat

SEQ ID NO: 274658 - DNA, 883 bp, Unknown
  Bacterial polypeptide expressing nucleotide sequence isolated from the Sargasso Sea
catgaaaaatgtgattgaacaatctgcaacttctggagatcaactacctgaggtgcatgtagatcgcctcgaggccgttgcgcagggcaaagacgttccggcggaagtccatccacaagtacttgaagaaaaacctgttctggaaattgaagatttcaatttatggtacggcatgaaacaagcacttcataatgtcacaatgccgatcactcacagtaaggtaacagctctcatcggcccaagcggctgcggcaagtcaacgcttcttcgaagtgtcaatcgaatgaacgatcttgttcaaaacgtgaagattaagggcacgatgctattaaatggcgattcgatttatgacccgcgcagagatgtcatcgatcttcgcaaaagaatgggtatggtttttcaaaagccaaacccatttccgatgagtatttttgaaaatgttgtgtatgcattgcgaatcgatggtgaacgaaatcgtggaattttagaggaagtctgtgaagttagtcttcgtggggcagcattatgggacgaagtaaaagatcgtctgcaagacagcgcccttggactttctggtggccagcaacaaagactctgtattgctcgcgccattgcagcagagccagaagtgctcttgcttgatgaaccttgctctgctcttgatccaattgcgacaggtaaagtggaagaattgatacaggaactgcgaggccaatactccgtccttatggtgacgcacaatatgcaacaagccagtcgtgccagcgactacaccgcatttatgtatctaggccgtctaattgagtacggttcgacatcagacatattcacaaatcctgtacttcaggaaaccgaatcctacgttactggccgattcggttaa

SEQ ID NO: 274659 - DNA, 751 bp, Unknown
  Bacterial polypeptide expressing nucleotide sequence isolated from the Sargasso Sea
ttgcaaacaagtgaggtatatgtccactatggaaaaaaaatggcaatcaataacgttgctcttaattttccaaaaaatgaagtaacttctcttataggaccctcaggttgtggtaagtcgacatttttgcgatgtttaaaccgtatgaatgatgtaatagatatttgtaatgttaaaggtaagtttttgttgaatggcaatgttgatatatatagccctgatatacaggtagaaactcttcgcgaaaaagttggaatggtttttcaaaaacccaatccttttccaaaaactatttatgaaaatgttgcctacggaccaaaaattcatggtattgcttcttctcaaaatgaattagatgaaatagtaaaagactcacttcacagagcgggtctttatgaagaggtaaaagatagaatggatgatattgctaccggtttatcaggaggacaacagcaaagattgtgcattgcaagagcgattgctataagaccggaaatcattttgatggacgaaccttgttctgcattagatccaatagcaaccgcaaaaatagaagatttaattaacgaattgaaagaaaattacacaattattatagtaactcattctatgtctcaagcatcacgtgtatcatctaaaactgcgttttttcatttaggtaaccttgtcgaatatggagaaactggtaagatatttacaaaacctgataaagaacaaacaaatgactacataactggaaggtttggttaaa

SEQ ID NO: 274660 - DNA, 760 bp, Unknown
  Bacterial polypeptide expressing nucleotide sequence isolated from the Sargasso Sea
atgatccggctcgaaggcatcgacaagtcgttcggcacgcatcgcgtgctgcacgggatcgacctcgcattgcagcccggcagcgtgacggcgctgatcgggccgtccggcagcggcaagagcacgctgctgcgttgcgtgaacctgctcgaagtgcccgaggcgggcgcgctgacggtcggcgacgcacgcatcgacttctccccggcgcatcggccggcgcgcgacgccgtgttcgcggtgcgccgccagaccggcatggtgttccagaacttccaactgtttccgcacctgagcgtcgtgcagaacgtgatggaggggctcgtcaccgtgcagcgctggccgcgcgaacgggcccgtgaacgtgcgctcgcgctgctcgagaaggtcggcatcgcggacaaggccgacgcgtggcccggtacgctgtcgggcggccagcagcaacgtgttgcgatcgcgcgtgcgctcgcgccgtcgccgcaggtgctgttgtgcgacgagccgacgtcggcgctcgatccggagctgtccgtcgaagtggtcgaggtgctgcgccagctcgcacgagaaggcacgacgatgctgatggccacccacgacctgcgcctggccgcgtcgatcgcacacgatgcggtgtttctcgcggagggccgcgtggtcgaggccggtgcgtcgcgcgacctgttcggcgatccgcgcgatccacgcaccgcgaagttcatctcgacgcttgcgcagggcgtgccggtgttctgac

SEQ ID NO: 274661 - DNA, 688 bp, Unknown
  Bacterial polypeptide expressing nucleotide sequence isolated from the Sargasso Sea
aatgtctaagaaagttgcaagtttagaaaatatatctaaaacatatgggaaagaggatttaactgtcaaagccttagacagcataaatttagaaatttataaaggtgattatttagctgtaatgggagcaagtggctcaggtaaaagtacagctatgaatattattggatgtttagatagaccatctaaaggtatttataaattaaatggtattcctgttgagaatttatctgatgatgagctcgcggaaatacgtaaccaaaaattaggcttcgtttttcaacaatttcatcttctttcagacgcaactgcacttgaaaacgtaactttgcccatgatttatgctggtattgagcctgagcaaagattagagcgaggtaagaatgccttaaaaaaagttggtctttcagaaaggatgaataatcgcccaaaccaattatcagggggtcaacaacaacgagttgctattgcgagggctattatcaataaccctgcaattttgttagccgacgaacctactggagcactagactcaaaaaccactgaagatgtattagatctttttgacaaactgcatgaatctggaataactatagttttagttacgcatgaagatgaagttgcaaatcgggcaaaaaaaatagctaaatttaaggatggaagaatagttgaattaaaagttaattaa

SEQ ID NO: 274662 - DNA, 688 bp, Unknown
  Bacterial polypeptide expressing nucleotide sequence isolated from the Sargasso Sea
aatgtctaagaaagtcgcgagtttagaaaatatatctaaaacatatggggaagaggatctaactgttaaagctttagacagcataaacttagaaatttataaaggtgattatttagctgtaatgggagctagtggctcaggcaaaagcacagctatgaatattattggatgtctagatagaccatctgaaggtatttataaattaaatggtattcctgttgagaatttatctgatgatgagctcgcagaaatacgtaaccaaaaattaggcttcgtttttcaacaatttcatcttctatcagacgcaactgcacttgaaaacgtaactttgccaatgatttatgctggtattgaccctgaagaaagattagagcgaggtaagaatgcattaaaaaaagttggcctttcagaaaggatgaataatcgtccaaaccaattatccggaggtcaacaacaacgagttgctattgcgagggctattatcaacaaccctgcaattttgttagcagacgagcctactggagcactagattcaaaaaccactgaagatgtattagatctttttgaaaagctgcatgaatctggaataactatagttttagttacacacgaagatgaagttgcgaatcgtgcaaaaaaaatagccaaatttaaggatggaagaatagttgaattaaaagtaaattaa

SEQ ID NO: 274663 - DNA, 796 bp, Unknown
  Bacterial polypeptide expressing nucleotide sequence isolated from the Sargasso Sea
atgaaaaccaacaactttgacttagcaaacttgagccagaacgataccgcactggagatccgcaacttagacctgcgctatggtgacaagcaagcgctgtttaatgtgtcgatgaagatcccaaagaagcaagttacggcgtttatcggccccagcggttgtggtaaatccaccttattgcgctgcattaaccgcatgaacgatctggtcgacaactgccatatcgacggcgagattttgctgcacggtcaaaatatttatgacaaaaaaatcgacgttgccgccctgcgccgcaacgtaggtatggtgttccagcgtcctaacccattccctaaatcgatttacgaaaacgtggtttatggtctgcgtctgcagggcattaacaaccgccgtgaactcgacgaagcggccgagcgttcgctacgcggtgcggcgatttgggatgaagtgaaagaccgtctgcacgataacgcctttggcttatctggcggtcagcagcaacgtctggtcattgcccgtgcgattgccatcgagccagaagtattactgctcgacgaaccgacttcggctctcgacccgatttcaaccttaaccatcgaagagctgatcactgagcttaagactaagtacacagtggttatcgttacccacaacatgcaacaggcggcgcgggtgtcggaccaaacagcctttatgtatatgggcgaattggtggaatacgccgataccaacaccatcttcaccacaccgaaaaaacgtaagaccgaagattacattaccggccgttacggttaat

SEQ ID NO: 274664 - DNA, 499 bp, Unknown
  Bacterial polypeptide expressing nucleotide sequence isolated from the Sargasso Sea
gttggtatggttttccaaaaacccaatccattccctaaatctatatacgaaaatgtagcctatgggttacgtatccaaggagttaatgatcgtcgcactcttgatgatgctgttgaaaaatctttaaaaggagctgcgctttgggatgaagttaaagatcgtattggtgagtcggcaatggggttatcgggaggacaacagcagagacttgtcattgctcgtgcgatagcaattgaaccggaagtaatattactagatgagccagcttctgcacttgaccctatatccacattaaaaattgaagaattaatttataaactaaaagaagactacacaatagtaattgtaactcataatatgcagcaagcagcgcgtgtttcagattacactgcctatatgtatttaggtaaactaattgagatgaatgacactgggacactattcacaacacctcgtaaaaaaatgaccgaggattacattacaggacgttatgggtaat

SEQ ID NO: 274665 - DNA, 766 bp, Unknown
  Bacterial polypeptide expressing nucleotide sequence isolated from the Sargasso Sea
gatggaaaagaaatctttaattcattgtactgatgtgaatgtcttttatgatgataaacaagctctttttaatgttgacctaaatatcaatgaaaaagaggttacgtcacttataggtccatcaggttgtggcaaatcaacatttataagatgtcttaatagaatgaacgatgttattgaaacatgttcttttaatggatcaattattataaacggacaggatatatatgatcctgaaattgatgtagtagagcttcgagcaaaaataggaatggtatttcaaaaaccaaatccttttccaaaatctgtttttgataatgttgcttatggccctaaacttcatggcagatttttgaataaatcagatatgaataataaggttgaggatagccttataaaggctgggttatgggatgaaattaaagatagattaaatgagccaggaacagctctatccggtggacagcaacagaggttatgtatagctagagctatagcagttgatccagaaattatacttatggatgagccttgttccgcacttgatccgatcgctaccgcacgaatagaagaattaattgatgagctaaaggtaaattatactattgtaatagtgacacattctatgcagcaggctgcaagagtttcacaaaggacagctttctttcatcttggtaatcttattgaggttggtgatacagaaaagatttttagatcgccagacaatgaacaaactgaagcatatgtaactggaaggtatggttaa

SEQ ID NO: 274666 - DNA, 709 bp, Unknown
  Bacterial polypeptide expressing nucleotide sequence isolated from the Sargasso Sea
atggatattactaaaaacaaaattactgcttttattgggccctcaggttgtggaaaaagcacattaataagatcatttaacaggatgaatgatcttatattaggtgcaaaagttaatggaacaataacatatcagggagttgatttatacgacaaaatggttgacccagttcaggtcagaagaagaataggaatggtttttcaaaaacctaatccattcccaaaaactataaaagagaatattacttttggacttaaagttaacaacatgactgataacatggatgatcgagttgagaaagcattaactcaagcagcattatgggatgaagttaaggatgatttagacaaaaatgcattagaactatctggtggtcaacaacaaagattatgcattgccaggacaattgcagttgagccagatacaattttaatggatgagccttgctctgcattagaccctgtagcaacaaaaaaaatagaagacctcatgcaagagcttgtaaaagaattctcaatacttattgtcacacacaacatgcaacaagcctctagatcttctgattactgcgcattttttacaacgaaaacctctgatgatggaaaaagaagaactggagaattagttgagttcaatgaaacaagtgttatgtttactactcctgataaggagttaacagaacaatatatatcaggcaggttcggatgag

SEQ ID NO: 274667 - DNA, 814 bp, Unknown
  Bacterial polypeptide expressing nucleotide sequence isolated from the Sargasso Sea
tatgtctaaaaatccagagtttgtaaaattcgacaaagtagataaaagttacgacggtaaagttcttgtcgttaaagatcttcaattagatattgcagaaggtgagttcataacaatgcttggtccatctggttcaggtaaaacgacttgtctgatgatgttggctggttttgaaacaccaactcacggtgaaatattattagatggaaatataatttctaacattcctcctcataagagaggtattggtatggttttccaaaactacgcattgtttccacatatgacagtttatgaaaatttagctttcccattaagagtaagaaaagttgaaaaagatgaaatagataaaaaagttgataaagctttatcgatggtttcacttaacggttttgaaacaagaatgccagctcagctatcaggtggtcaacaacaaagggtagcagttgcgagagcattggtatttgatccagcagttgttttgatggatgaacctttaggagcattagataaaaatttaagagaaagtatgcaatatgaaattaaacatattcatgaaagcattggtgttactgtagtatatgtaactcatgatcaaagtgaagcattaactatgtcaaaccgaatagctgtattcaatgatggaaaagtacaacaactttcaaatcctgcagaattatatgaaaaaccagtgaattcttttgttgctgagtttattggtgaaaataatacttttaacggagaaatagtagatattgataaagataaatgtaaagttaaattagctaattcagaaatattagctaatcctata

SEQ ID NO: 274668 - DNA, 614 bp, Unknown
  Bacterial polypeptide expressing nucleotide sequence isolated from the Sargasso Sea
tatgtctaataatccagaatttgttaaatttgataaagttgacaaaagttatgatggtaaagttctagttgtaaaagatcttcagttagatattgcggaaggtgagtttattactatgcttggtccctctggatccggcaaaacaacttgtctgatgatgcttgctggctttgaaactccaacaaacggagagatcttgttagatggaaatataatttctaatattccacctcacaaaagaggaataggaatggtttttcaaaattatgcactttttcctcatatgactgtttatgaaaatttagctttccccttaagagttagaaaaatggaaaaagatgaaattgataagaaagttgacaaagctttatcaatggtttcactaaatgggtttgaaacaagaatgccaggacaactttcaggaggacaacaacaaagggtagctgtagctagagctttagtttttgatcctgcagtagttttgatggacgaacctttaggtgcattggataaaaatttaagagagagtatgcaatatgaaattaaacatattcatgaaagcattggagtaactgtagtttacgttactcatgatcaagtgaagctcttacatg

SEQ ID NO: 274669 - DNA, 763 bp, Unknown
  Bacterial polypeptide expressing nucleotide sequence isolated from the Sargasso Sea
catgagtaactctaaaatattggcaaatggtgtagatgtatattatggatccaaacaagctctttttggaatctcaatggatatcaaggagaaagaagttacggcattaatcggtccttcaggatgtggtaaatcaactttcttaagatgtataaacagaatgaatgatttaattgaaatatgtaaagtatcgggatcaataaaagtagataacgaagaaattattagtgaaaaaaccgatgttgtaagtctaagatctaaaattggaatggtatttcaaaaaccaaatccttttcctaaatctatttttgataatgttgcttatggcccaactatacatggtttagttgactcaaaaaatgaattagaagaaattgtacattcatcattaaaaaaggcaggtctatttgatgaagtaaaagatcgattaaatgaacctggaacaagtttatcaggcggtcaacaacaacgattatgtattgcaagagcaattgctgttaatcctgaaataatcctaatggatgaaccttgctctgctttagatccaatagcaactgctattatagaagaattaattgatgagttaagattaaactatacaattattatagtaactcattctatgcaacaggcagccagggtttcgcagaaaacatgtttcttccatttaggagaattaatagaaacgggtgagacaaacaaaatttttacaaatcctgataatacaaaaacacaggattacattacagggagatttggttaa

SEQ ID NO: 274670 - DNA, 343 bp, Unknown
  Bacterial polypeptide expressing nucleotide sequence isolated from the Sargasso Sea
gaccggctgaatcagaatgcgacatcgctttcgcttgaagagcagcaaaagctctgcatagcacgattacttccggtaaaaccgtcggtgctccttatggatgagccgacctcagcactggaccccaaggccgcggcggcgcttgaagaactgatctggagcctcagagggtcggatacgattctaatcgttacgcataacatggctcaggcgcgacgagccagtgaagactgtgccttcatgctccttgggaagatgatggaggtcgcacctactgccgaccttttcttgtcgccgcagctgccagagacagcggattacgttgagggacgctacggttgat

SEQ ID NO: 274671 - DNA, 835 bp, Unknown
  Bacterial polypeptide expressing nucleotide sequence isolated from the Sargasso Sea
aatgaaaaaagacgaacagccaccaacaaaaagaaacgaaccaggaaaaaagatgacaaatgacatagcaagtaacaaggaatacaaagttttgattgaaaatttggctgtatcatacagtggaaaaacagcaatcaaagacattaacatgaaaattccagacaaggcagttactgcattaatcggcccatcaggatgtggaaagaccacacttctacgaaccattaacagaatgcatgatttaacaaaaggtgcagaagttacaggcaaaatcatcattgatggagaaaatgtgtacgattcctacatcaatccaattttacaaagaagaaaaattggaatggtgttccagaaaccaaatccatttccaacaatgtcaatttgggacaatgttgcagcaggattgaagctcaacggtgtaaaagacaagagcatcctaaacgagattatagaagattcattaaagatggcatatctatgggacgaggtgaaagatgaattgaaaaaacctgcagttgcattatcaggaggacaacagcaaagactgtgtattgcaagagcgcttgctatacaaccagaggtattacttatggatgagccagcatctgcactagacccaattgctacacagaaaattgaacaaacaattatcgaattaaagaaacattatacaataattattgtaacacataacatgcaacaagcacttagggtttcagatagaacaggcttcatgtatttgggagatttggtcgaatatgacaaaactgaaaagattttcaagaatccagaaaaggaactgactgcaaattacgtacaagggagatttggatag

SEQ ID NO: 274672 - DNA, 844 bp, Unknown
  Bacterial polypeptide expressing nucleotide sequence isolated from the Sargasso Sea
cggtacgggtacggcgcttctggcaagggcgccatcagcatccgcaacgtcacaaaaatttatgatccagggggcgccgatgtgcttgccctggacgactgctctcttgagatcgcctccggagaggtgtgcatgatcgtgggcccatcgggttgcggcaagacgacactgctcaacgcgattgcagggtttcattccatcaccgagggtcagattgatctcgatggtgagatgctttgcggaccgggaaaagagctcgcaacacaaggtgcggatcgtgttgtggtattccaaaacggagcccttttcccctggaaaaccttagcagacaacgtggcttatgggccgattgttcaaggccagatgaataaagcagaggctagggataaagcggagagcatgctggccgaagctgggttgggcggtgtcgcggataagtatccgggtgaagtctcttcaggtatggcgcgccgggcagagattgtccgagcattgatcaatgaccccaaggtgttgctcctcgatgagccctaccgcgcaatggatgctctgactaagtcaatcatgcatgaatccttgctggaggtgtacgaccggaccaaggtcactatcttcttcatcacgcatgatcttgaggaagcgatctttttgggagatcgggtcgttgtcatgaccacgagaccggcacgaaccaagaagattgtcgacgtcaagatagataggcccagagactatcgcctgctttcctcagaggagttccgcatccttgtgcaagaaactaaagaggcggtgcacgaggaggcggtgaaagcgtttgaggcgggcgaacgcgagctggcatagg

SEQ ID NO: 274673 - DNA, 757 bp, Unknown
  Bacterial polypeptide expressing nucleotide sequence isolated from the Sargasso Sea
aatgataaagattaaagcaaaagatgttgatgttttttacggaaaaaaacaagcactctttaatataagtttagatattgaggaaaatcaagtaacggcattaattggtccatctggttgtggtaaatcaactttcctaagatgtcttaatagaatgaatgatgtaattgatatctgcagtgttaaaggagaaattttaattaatgactttaatatcaatgataaaggttgtgatgtagtaagactgagagaaaaaattggtatggtttttcaaaaacctaatcctttcccaaaaactttatatgaaaatgtatcttacggtccaacaattcatggtatagctcaatcaaaacaagaaatggatgaaattgttgaaactagcttaaaaaaagctgcactatgggaagaggtaaaagataggttgcatgaacctggaactggattatctggagggcaacagcaaagactttgtattgctagagcaatttctgtaagacctgaagttatattaatggatgagccttgttcagcattagatcctatagcaacagcacaaattgaagaattgattgatgaattaaaaaaagagcacacaataataattgtaactcattctatggctcaagcggcacgtgtatctcaaaatacaggtttttttcacttaggacaattgatagaacatggatctactgataaaatatttaagaatcctgataataaaaaaacccaggactatataacagggaggtttggataa

SEQ ID NO: 274674 - DNA, 799 bp, Unknown
  Bacterial polypeptide expressing nucleotide sequence isolated from the Sargasso Sea
gttgtttgaacacaatacgctaaatgttaaagacattagtgaagagcaaactgccgttgaggttaaaaatctcaacttatggtttggtaataagcatgttttaaacgacgtcagcatgcgtattcctaaacataagatcacggccttaataggtcaaagtgggtgtggtaaatctacccttataagctgttttaatcgacttaatgacttgtatgacggctgtaaatacaacggtgaaattatcattgacggacgtaacatcaatagccgtaaaatcaatgtgtcgcggctgagaaccaacgttggtatggtgtttcagcgtcccaatccgtttcctatgagcatttatgaaaacgtgtgttacgggcttagacttcagggtgtgaaggtacgaaggcatctagatgatgcggtggaaggcgcacttaaacaagcggcgctgtgggacgaggtgaaagatcgtcttttcgaatcggctcaagtgttatccggtggtcagcagcagcgtttggtcatagcgagagcgttggcattaaagcctgatattttgctacttgatgagcctacatcggcacttgatccgctgactacactgtttatagaggaacttatggacgtgctgaaaaagcagtgcaccattgttattgttactcataatatgcagcaagcggcacgtgtaagtgactataccgcctttttccatcagggccggctaatagaatacgctgacagtgacacactgtttaccatgcctgagaaaaagcaaaccgaagattatattacgggtcgctatggataa

SEQ ID NO: 274675 - DNA, 757 bp, Unknown
  Bacterial polypeptide expressing nucleotide sequence isolated from the Sargasso Sea
aatgataaagattaaagcaaaagatgttgatgttttttatggaaaaaaacaagcgctctttaatataagtttagatattgaggaaaatcaagtaacggcattaattggtccatctggttgtggtaaatcaactttcctaagatgtcttaatagaatgaatgatgtaattgatatctgtagtgttaaaggagaaattttaattaatgattttaatatcaatgataaaagttgtgatgtcgtaagactaagagaaaaaattggtatggtttttcaaaaacccaatcctttcccaaaaactttatatgaaaatgtgtcttacggtccaacaattcatggtatggctcaatcaaaacaagaaatggatgaaattgttgaaactagtttgaaaaaggctgcactatgggaagaggtaaaagataggttgcatgaacctggaactggattatctggaggacaacagcaaagactttgtattgctagagcgatttctgtaagacctgaagttatattaatggatgaaccttgttcagcattagatccaatagcaacagcacaaattgaagaattgattgatgagttaaaaaaagagcacacaataataattgtaactcattctatggctcaagcagcacgtgtttctcaaaatacaggtttttttcatttaggacaattgattgaacatggatctactgataaaatatttaagaatcctgataataaaaaaacgcaagattatataacagggaggtttggataa

SEQ ID NO: 274676 - DNA, 682 bp, Unknown
  Bacterial polypeptide expressing nucleotide sequence isolated from the Sargasso Sea
atggaaataaatgaagataaaaaagactttaaaactaatactgttggagatatattttctgataatcctaaaatcgtttcaagaaatgtaagtgtttattataatgataaaaaagctatctcagacgtttcattggatatcggttcaaaagaaatcatttctttgataggaccctcagggtgcggtaaatctacctttttaaggtgttttaatagaatgaatgacacaattgatggttgtaaagttgagggtaaaatctttttagataatgaaaatatttatgatgaaatgatagatgttgttcctttgagagctaaagtgggaatggtttttcaaaaacctaatccttttcctaagtctatttatgataatgtggcttatggtcctcgtattcatggtttagtagataataaaaaagatatggataacattgttgaaatgtctttaaaaaatgcaggtctttgggatgaagttaaagataggttagattcacctggaactgggttatcaggtgggcagcagcaaagattatgcattgcaagagctatagcagttagtcctgagataattttaatggatgagccatgttctgcattagatccaattgctacagccaaaattgaggaattattacaaacacttgctaatgattattcaattgtaatagtaactcattctatgc

SEQ ID NO: 274677 - DNA, 617 bp, Unknown
  Bacterial polypeptide expressing nucleotide sequence isolated from the Sargasso Sea
aatgataaagattaaagcaaaagatgttgatgttttttatggaaaaaaacaagcgctctttaatataagtttagatattgaggaaaatcaagtaacagcattaattggtccatctggttgtggtaaatcaactttcctaagatgtcttaataggatgaatgatgtaattgatatctgcagtgttaaaggagaaattttaattaatgactttaatatcaatgataaaagttgtgatgttgtaagactaagagaaaaaattggtatggtttttcaaaaacctaatcctttcccaaaaactttatatgaaaatgtatcttacggtccaacaattcatggtatggctcaatcaaaacaagaaatggatgaaattgttgaaactagcttaaaaaaagctgcactatgggaagaagtaaaagatagattgcatgaacctggaactggattatctggaggacaacagcaaagactttgtattgctagagcgatttctgtaagaccagaagttatattaatggatgagccttgttcagcattagatcctatagcaacagcgcaaattgaagaattgattgatgagttaaaaaaagagcacacaataataattgtaactcattcta

SEQ ID NO: 274678 - DNA, 556 bp, Unknown
  Bacterial polypeptide expressing nucleotide sequence isolated from the Sargasso Sea
tttgggcagtgtccagactgttggggaggccctattggagagtcccagcgtgagctgccgcgacgtggcggtacattacggcgataagcaggcgctcttcgatatcaatttggacatgggtactaacgaggtgctttccctgattgggccttcgggatgcggcaagacaacttttctaagatgcatcaaccgcatgaacgatacgatcgaggggtgtcgtgtcagcggcactatcaagatttatgatgaggagattaaccatgtggatgcagatgtcgtgtccttgcggtcgcgtgtcggcatggtctttcaaaagcctaacccttttcccaagtcgatatacgacaacattgcttatggccctcgaattcatgggctcgcggcttccaacgaagagcttgatcaaattgttgagagctctcttaagcgtgcaggactttggaaggaggtttcggatcggttacagacgccggggaccgggttgtcgggaggtcagcaacagcggctctgcatcgctcgggctatagcggttaaccccgaagtgatcctgatggat

SEQ ID NO: 274679 - DNA, 499 bp, Unknown
  Bacterial polypeptide expressing nucleotide sequence isolated from the Sargasso Sea
tatgaacaatgtaaaagtgtctaccaaaaatgtgaatgtgcattacggcactaagcaagcgcttcaccgagtaacacttgatatcaatgaaaaggaagttacagcactgattggaccttctggttgtggtaaatctacttttctaagatgtataaatagaatgaatgatttaattgatatttgtaaagtagatggatctattacggttgataatgaagaaattatttcggatgaagttgatgtcgtaagtcttcgatccaaaattggtatggtttttcaaaaaccaaatccttttccaaaatctatttttgataatgtagcttacggaccaactattcacggtatcgtcgagactaaaacagatttagaagagatagttcattcatctttaaaaagagcaggactgttaaaagaagtaaaagatcgtttgcatgaaccagggaccagtttgtctggcggtcagcaacaacggttatgcatcgctcgtgccattgcagtt

SEQ ID NO: 274680 - DNA, 757 bp, Unknown
  Bacterial polypeptide expressing nucleotide sequence isolated from the Sargasso Sea
atgattaagattagtgcaaaaaatgttgatgttttttatggaaaaaaacaagctttgtttaatataaatttagaaatagaggaaaatcaggtaacagccttaattggaccatcgggatgtggtaaatctacttttttaagatgcttaaatagaatgaatgatgtaattgacatatgcaaagttcaaggagagatagttataaatgattttaatataaacgataaagggtgtgacgtagtaagattgcgagaaaaaattggaatggtttttcaaaaaccaaatccatttccaaaaacattatacgaaaatatttcttatggtcctacaatccatggtatggctcaatcaaaacaagaaatggatgaaatagttgagacaagtttaaaaaaagctgcgctctgggaagaagtaaaagatagacttcatgaacctggaacaggtttgtcaggtggccagcaacaacggttatgtatagcaagagctatttcggtacaaccggaggtaatcttaatggacgagccttgctcagcattagacccaattgcaacagcccaaattgaggagttaattgatgaattaaagaaagaacatacaataattatagttactcactctatggctcaagcagcaagagtatctcaaaatactggtttctttcacttaggagagttgatagaacatggatcaacagataagatatttaagaatccagaaaataataaaacgcaagattatattacagggaggttcggataat

SEQ ID NO: 274681 - DNA, 760 bp, Unknown
  Bacterial polypeptide expressing nucleotide sequence isolated from the Sargasso Sea
atggacaccaaaattagtgctgaaggggtgaatgtcttttatggagaagcccatgccctgaaaaatgtcagcatgcaattcatgagaaatgaggtaactgctctgataggaccatccggttgcggaaaatctacctttcttcgatgtctgaatcggatgaatgatgtgatcccggactgcagggtcgagggcaagatcatgatgggagatgtcgacatcaatgataataggctagatgtggtccggttacgtgaaaaagttgggatggtttttcagaaacccaatccttttccaaaatcgatttatgacaacgttgcctatggtccaagcattcatggtcttgcccggacccaagcagatatggaccggattgtggaggaaagccttgaaaaagctggactgctggaagaagtcaaagatcgattgaaccagccaggaactggtttgtcaggaggtcaacagcaaaggctctgcatagcccgggcgattgccgtcagtccggatgtgatcctcatggatgaaccctgttctgccttagacccgattgcgaccgcgaggattgaagaactcatggaagaattgaggaagaattacacgatcatcattgtcacgcattccatgcagcaggcagcaagagtctctcagcaaaccgcgtttttccatcttggagatctggttgaagttgggaaaaccgatgacctatttgttaagccccaagaacaaaagacccaggattatattactggtcgttttggataaa

SEQ ID NO: 274682 - DNA, 722 bp, Unknown
  Bacterial polypeptide expressing nucleotide sequence isolated from the Sargasso Sea
ttacggcactaagcaagcgcttcaccgagtaacacttgatatcaatgaaaaggaagttacagcactgattggaccttctggttgtggtaaatctacttttctaagatgtataaatagaatgaatgatttaattgatatttgtaaagtagatggatctattacggttgataatgaagaaattatttcggatgaagttgatgtcgtaagtcttcgatccaaaattggtatggtttttcaaaaaccaaatccttttccaaaatctatttttgataatgtagcttacggaccaactattcacggtatcgtcgagactaaaacagatttagaagagatagttcattcatctttaaaaagagcaggactgttaaaagaagtaaaagatcgtttgcatgaaccagggaccagtttgtctggcggtcagcaacaacggttatgcatcgctcgtgccattgcagttaatcctgatattattttaatggatgagccttgctcagcattagatccaattgcaacagcaacaatagaggaattaattgatgaacttaaaaacaaatatacaattgtaatagtaacacactcaatgcagcaagcagcaagagtatcgcaacgaacaggtttttttcatttaggtgaacttgtggagactggagagacacaaaaaatttttacaaatcctgaaaacgaaaaaacacaaggatatataacaggaaggtttggataac

SEQ ID NO: 274683 - DNA, 757 bp, Unknown
  Bacterial polypeptide expressing nucleotide sequence isolated from the Sargasso Sea
atgagtaaaatcaaagcggaaaatgtaaatgtatattacggatccaaacaggcattatttgatgtctctatagatattgcagaaaaagaagttacagctctaattggaccatctgggtgtggaaagtctactttcttaagatgcttgaacaggatgaacgacgtcatagaaatttgtagagttgaaggcagtattaaaatggacaacctagaactgaactcaagaaagttagatgttgtgagacttagggagaatgttggtatggtttttcaaaaacccaatccgttccctaaaacaatttatgaaaatgtagcttatgggcctactattcacggtattgcacagagcaaagaagaaatggatcaaatagttgaaacaagtctgaaaaaagctgccctgtggaacgaagttaaagatagacttgatgaaatcggaactggtttatcaggcggtcaacagcaacgactatgtattgctagagctatatctgtaagtccagaagtgattctcatggacgaaccatgttcagcgcttgacccaatagcaacagctcaaatcgaagaacttatagatgatcttaaaaaagaggttacaattgtaatagttacccactcaatgtcacaagcagccagggtatctcaaaaaacaggtttctttcatttgggaaaacttatagaatttggaccaacagataaaatatttaaaaatcctgacaaccagcaaactcaggattatattacaggaaggtttggttaat

SEQ ID NO: 274684 - DNA, 264 bp, Unknown
  Bacterial polypeptide expressing nucleotide sequence isolated from the Sargasso Sea
gctcagcgctcgatccaatctccacgctgaaagtggaggaaacgatgcacgagttgaagaaggacttcaccatcgtgattgtcacccacaacatgcagcaggctgtgcgggtttcagacatgaccgccttctacaacgccgtggccgtggaaggcggctcaggcaaagtggggtacctggtcgaatttgatgaaaccagcaatatcttcaacaacccaagacaagaagccacacaggagtatgtcagcggtcggtttggataat

SEQ ID NO: 274685 - DNA, 749 bp, Unknown
  Bacterial polypeptide expressing nucleotide sequence isolated from the Sargasso Sea
gatttcagctagaggcgttcaagtttactatgaagataaacaggcaataaaaaatgtggatgttaaaatacaagataagactgttaccgcttttattggtccttctggttgtggaaaatcgacttttttacgttgcctaaatcgcatgaatgatacaattagtatctgtcgtgtagagggtgaaattttacttgaagggcagaatatctatcacccagatgttgatcctgtacaattacgggcgaaagttggaatggtctttcaaaagcctaatccatttcccaaatcaatttatgaaaatgttgcatatggtccaagaatacatgggttatttgaatcaaaatccgatctggacgaaatagtagagatggtactgcgtcgagcggcactttgggaagaagttaaagacagattgtctgaaccagggaccggattgtctggtggacagcagcagcgtttgtgtattgcgagagcgattgcaactcgtcctgaagtgcttcttatggatgagccttgttccgcattggatccaattgcaactgcgcaaattgaagagttaattgccgatttgaaggaaaacttctgtgtcgtgatagttacgcactcaatgcaacaggcggcacgagtaagtaacaaaactgcattttttcatcttggtgacttagttgagtacggagaaacagaggagttatttgtcagacctactgatccccgaacggaaagttatattagtggaaagattggataac

SEQ ID NO: 274686 - DNA, 772 bp, Unknown
  Bacterial polypeptide expressing nucleotide sequence isolated from the Sargasso Sea
atgtcagataaaaataatattaaaattgatgctcaaaatgtaaatgttttttatgcagataagcaagccattgataatgtttcgttgaaagtagaaaagtctaaaattacagctttaatcggcccttctggttgtggtaaatccacttttctaagatgtattaatcgtatgaatgacgtaattccatcttgtcgtgttgagggaaaaatattagtcgatgaaaccaatgtgaataatcctgaactagaccctgtatttcttagggcaagagttggaatggttttccaaaaacccaatccatttccaaaatcaatatttgataacattgcttatggaccaaggattcatgggttaaccaataacaagagtgagttagatgatatcgttaaagaaagtttagtaagggcaggattatgggcagaggtttctgatagattgtttgatcaaggtacaggattatctggaggtcagcaacaaagactttgtattgcaagagcgatagcagttaatcctgaagtaattctaatggatgaaccatgttctgcattggatcctattgctacagcaaaaattgaagaattgatgatgagtttatctcaaaattatactatagtaattgtaactcattcgatgcaacaagctgcacgaatttctcaaaaaactgctttttttcatcttggtaaattaattgagatggatactacagataaaatatttacaaatccaaataaatcaaaaactcaagattatataactggtagatttgggtgaa

SEQ ID NO: 274687 - DNA, 777 bp, Unknown
  Bacterial polypeptide expressing nucleotide sequence isolated from the Sargasso Sea
aatgattaaaaatactaaaaagtcgcaaaagaataatattttatctcttgaggatgtttctattagttatggtaattttgaagccgtaagaaatgttttttgcaattttaaaagtggagatataacttcactcatcggcccttctggttgcggaaaatcaacagttcttagagctttaaatagaatgaatgatttaattcctaattgttcattgagagggacggtcctcttcgatggaactaatatttatgacaaaagagtagatccagttgaagttagaagaagaatcggaatggtttttcaacaacctaatccttttcctaaatctatctacgaaaatattgcatttggagcaagaattaatggatttgtaggtgatatggatgaactagttgaaagttcactaagaaaagctgctgtatggagtgaatgtaaggataaattaaatgatagtggttactccttatctggaggacaacaacaaagactatgtatagcaagaacaatagcaattgaacctgaaataatacttatggatgaaccttgttcagcattagatcctatttcaactttaaaaatagaagaaacaatgcacgaacttaagaagaattacacaattataatagttactcacaatatgcagcaagctcttagagttagtgatatgactgctttctttaatgcaattgaatatgaagatggtgatggaggtaaggttggatatttagcggaattcaattctacaaagaagatttttagttctcctaaggaaaaaac

SEQ ID NO: 274688 - DNA, 952 bp, Unknown
  Bacterial polypeptide expressing nucleotide sequence isolated from the Sargasso Sea
gatggcaaacgatgtactggtgagcttccgtggcgtacagaagagctatgacggcgaaacgctgatcgtcaaagacctcaacctggatatccgcaagggcgagtttctgaccctgctcggtccgtccggttccggcaagaccaccagcctgatgatgctggccggtttcgagacgccgaccgctggcgagatcctcctcgatggccgctcgctgaacaaactgccgccgcacaaacgcgacatcggcatggtgttccagaactacgcgctgttcccgcatatgaccgtggccgagaacctggctttcccgctgagcgtgcgcggcatgtcgcgcaccgatatcagcgagcgggtcaagcgcgcgctgtcgatggtgcagctcgacagcttccgcaaccgttaccccggccagctttctggtggtcagcagcagcgtgtggccctggcccgtgcgctggtgttcgagccgcagctggtgctgatggacgaacctctcggcgcactggacaagcaactgcgcgaacacatgcagatggagatcaagcacctgcaccagcgcctgggcgtgaccgtggtctacgtcacccacgaccagggcgaggcgctgaccatgtccgaccgcgtggccgtgttccatcagggtgagatccagcagatcgcgccgccgcgcgaactctacgaagcgccgcataacaccttcgtcgcccagttcattggcgagaacaatcgtctgactggcgagctggtcagtcgcgatggcgagcagtgcgtggtgcgcctggcgcgaggtgaagaagtgcgcgccacggcggtcaacgtcggtgctgtgggtgagtcggtgagcctgtcgatccgccccgagcgcatccgtctcaacggccacagcgaagcctgcccgaaccgtttctccgggcgcatcgccgagttcatctacctgggcgatcacgtgcgt

SEQ ID NO: 274689 - DNA, 763 bp, Unknown
  Bacterial polypeptide expressing nucleotide sequence isolated from the Sargasso Sea
atgaataatattaaaataaaatcaaaaaatttaaatgtttattatggtgataaacaagcattgtttgacgttaatttagatttaaatgaaaaagaggtgaccgcattaattggtccatccggatgtggaaaatcaacttttataagatgcattaacagaatgaacgacgtgatcgatatttgtaaagttacaggaaatattgaaatggatggtatgaatattaatgataaagatctggatgttgtctcattaagagaaagagttggaatggtttttcaaaagccaaatccatttccaaaaagtatatatgataatatttcgtatggtcctaaaattcatggaaaaggcgaaaccaaaagtgaactagatcaaattgttgagaacagcttaaaaaaatctgctttatgggaagaagttaaagatagactagatgaaccaggcactagtttatctggaggacagcaacaaagactttgtatagcgagagctatatctgttaatcctgaagtgatcttaatggatgaaccatgttcagcattagacccaattgctactgcaaaaattgaagaattaattgatgaattaaaaaaaacttatacgattgtaatagtgacacactcaatggctcaggctgtacgtgtttcacaaaaaacagggttttttcacctaggaaagttaattgaagttggaaaaactgagaaaatttttaaaaatcctgacaataaaatgacacaagactatattacaggtagatttggataaa

SEQ ID NO: 274690 - DNA, 448 bp, Unknown
  Bacterial polypeptide expressing nucleotide sequence isolated from the Sargasso Sea
attgcttatggtccaactattcatggaattggagaaaagaaagatgagatggacaagattgttgaaacaagtttaaaaaaagcagcattgtgggatgaagtaaaagatcgtttgaatgagcccggaacaggtttatctggcggtcaacaacaaagattgtgtattgcaagagctctctcagtaaatccagaagtaatacttatggatgaaccatgttctgcactagaccctatcgctactgcaaaaattgaagagttaatagatgatttgaagaaaagctatacaattgttatagtaacacattcgatggcccaagcagtgagagtttcacagaaaacaggttttttccatttgggcaaaataatcgaagttgatacaacagaaaaaatttttaagaacccggctaataaaatgacacaagattatataacaggaaggtttggttaaa

SEQ ID NO: 274691 - DNA, 247 bp, Unknown
  Bacterial polypeptide expressing nucleotide sequence isolated from the Sargasso Sea
gatgacaaatgacatagcaagtaacaaggaatacaaagttttgattgaaaatttggctgtatcatacagtggaaaaacagcaatcaaagacattaacatgaaaattccagacaaggcagttactgcattaatcggcccatcaggatgtggaaagaccacacttctacgaaccattaacagaatgcatgatttaacaaaaaggtgcagaaagttacaggcaaaatcatcattgaggagaaaatgtgta

SEQ ID NO: 274692 - DNA, 632 bp, Unknown
  Bacterial polypeptide expressing nucleotide sequence isolated from the Sargasso Sea
aattagatgcttcaatagaatgaatgacttaattccttcagctagggttgagggaattgttcattataatgatgtatctatttactctgatcaagcagatccaacggatattagatttaaaataggaatggtttttcaaaagccaaatccattcccaaaaacaatttttgaaaatgttgcatttggacctaaaatcaatggatttccatctagtgaaatagaaggaatagttgaatcatcattaaagcaagcagctttatgggatgaagttaaggaccgcctccaagataatgggttagatctctcgggcggacagcaacaaagactatgtatagctagggcgctagcagtaaatccggatataattttgatggatgaaccagcttcagctttagaccctgtgtcaacatcaaaactagaagatttggtcaaagaattatcaaaaaatgtgacaatcattattgttactcataatatgcaacaggcaactagaatttgtgattatgcagcagttatgatggctggcgaagcaagaataggcgaattgatagaatatgggacaaatgactccgtatttggaaatccaaaggacaaaagaacagaagactacgttacaggaaggataggataat

SEQ ID NO: 274693 - DNA, 799 bp, Unknown
  Bacterial polypeptide expressing nucleotide sequence isolated from the Sargasso Sea
ttgtttgaacacaatacgctaaacgttaacgacattggtgaagaacaaactgcggtagaggttaaaaaactcaacctgtggtttggcaataagcatgtgttaaatgacatcagcatgcggatcccaaaaaacaaaatcacagcgttaattggtcaaagtggttgcggtaaatctacactcattagctgtttcaatcgccttaacgatttgtatgacggttgcaaatacgatggtgaaattattattgatgggcaaaacatcaatagccgcaaagtaaatgtgtcacgcctaagaacgaacgtgggcatggtttttcagcgacccaacccctttcctatgagcatttatgagaacgtgtgctacgggcttaagcttcagggtgtgaaaattcgtcgacacttagacgatgcggtagaaagtgcactaaaacaagctgcgttgtgggacgaggtgaaagatcgtttgtttgaatctgcccatgttttatctggcggtcagcagcagcgtttggtgattgctagagcactggcgttgaagcccgacattctacttcttgatgaaccaacctcggctcttgaccctctgaccacgctttttatcgaagaactgatggatgcattaaagaaacaatgcaccattattatcgtgacgcacaacatgcagcaagcggctagggtaagcgactacaccgcctttttccatcagggcaggctgatagaatatgcagacagcgatacgctgtttactatgccagataagaagcaaactgaagactacataacggggcgatatggataag

SEQ ID NO: 274694 - DNA, 757 bp, Unknown
  Bacterial polypeptide expressing nucleotide sequence isolated from the Sargasso Sea
atgagcaaagcaataaatatagagaatttgtctctttattatggagaatctaaggctttaaaagaggttactttagacatagaagctaataaatctacagcttttatagggccgtcaggctgtggtaaatctacattactaagatgtcttaatagactcaatgatttaattgaaggagtcaaaattgagggtgaaattaaaatttcaggaacgaatatatatgacccatctgttgatctaactaatttaagaagaagtgttggaatggtatttcaaaaatcaaatccttttccactttcaatatatgaaaatattgcttatggattaaaaatagcaggtattaaagataaaagtaaactcgaccatgtaatagaaaagagcttaaagggtgctgcactctgggatgaagttaaagatagactaaatgaatcagcatatagtttgtctggaggccaacaacaaagactgtgtattgccagagctattgctgtagagccaacaattttattgatggatgaaccctgctctgcattagacccaatagccactgcaaaagttgaagaattaattaaagagttaaagaaagattatacaattgtaattgttactcataatatgcaacaagcatctagggtatctgactatacagcctttatgtttttaggagaattaattgagtttgatgaaacaaagacaatatttatgaatccaagtattcaacaaactaatgattatattagcggaagatttggttaat

SEQ ID NO: 274695 - DNA, 541 bp, Unknown
  Bacterial polypeptide expressing nucleotide sequence isolated from the Sargasso Sea
atgaacgaaataaaaataaaatcaaaaaatctaaatgtttattatggtgaaaaacaagctttattcgacgtaaatttggatttaaacgaaaaagaagtcacagctttaattggtccatctggatgtgggaaatctactttcatcagatgtattaaccgcatgaacgatgtaatcgatatttgcaaagtgtctggaaacattgaaatagacggtgttgaaatcaatgacaaaaatttagatgtagtatctttaagagaaagggtaggaatggtttttcaaaaaccaaacccattcccaaaaagcatatatgataatatttcttatggtccaaaaattcatggaaaaggtgaaactaaaagtgaattagatgaaattgtagaaaatagtcttaagaaagctgcattgtgggaagaagttaaagatagacttgatgagccaggtacaggtctatcaggtggtcaacaacaacgtctttgtattgcaagagcaatttctgttaatcctgaagttatattaatggacgaaccttgttctgcctaga

SEQ ID NO: 274696 - DNA, 769 bp, Unknown
  Bacterial polypeptide expressing nucleotide sequence isolated from the Sargasso Sea
catgataaataataaagttaaaataaaaactacaaaccttaatgtttattatggagataaacaggcacttaatgatgtgaatttagaaattcacagtaaagaagttacagcactaatcgggccatctggatgtggaaaatctacatatataagatgtattaatcgtatgaatgatgtaatcgatatttgtagagttactggttccatcgaaattgatggcaatgaaataaataaaaaagaaattgatgttgtaagcttaagagagaaaataggaatggtttttcaaaaacctaatccatttccaaaaagtatctatgacaatgtttcttacggaccaaatattcatggtttagcagaaaacaaagttaagatggacgaaattgttgaaactagtttaaaaaaagcagcactatggaatgaggttaaagatcgattaaatgagccgggtacaagtttatctggtggccaacaacaaagattatgtatagcaagagcaatatcggtaaatcctgaagttattttaatggacgaaccctgttcagcgcttgatcctatcgctactgctaaaatagaagaattaatggacgaattaaaaaagacttatacaatagtaatagttacgcattctatgtcccaagccgttagggtttcgcaaagaacaggatttttccatctcggtaagctcatagaagttgatacaacagaaaaaatatttaaaaatcccaacaataaaatgacacaagattatattacagggaggttcggataa

SEQ ID NO: 274697 - DNA, 490 bp, Unknown
  Bacterial polypeptide expressing nucleotide sequence isolated from the Sargasso Sea
tttcaaaaaccaaatccatttccaaaaacattatacgaaaatatttcttatggtcctacaatccatggtatggctcaatcaaaacaagaaatggatgaaatagttgagacaagtttaaaaaaagctgcgctctgggaagaagtaaaagatagacttcatgaacctggaacaggtttgtcaggtggccagcaacaacggttatgtatagcaagagctatttcggtacaaccggaggtaatcttaatggacgagccttgctcagcattagacccaattgcaacagcccaaattgaggagttaattgatgaattaaagaaagaacatacaataattatagttactcactctatggctcaagcagcaagagtatctcaaaatactggtttctttcacttaggagaattgatagaacatggatcaacagataagatatttaagaatccagaaaataataaaacgcaagattatattacagggaggttcggataat

SEQ ID NO: 274698 - DNA, 505 bp, Unknown
  Bacterial polypeptide expressing nucleotide sequence isolated from the Sargasso Sea
aaattggtatggtttttcaaaaaccccaatcctttccccaaaaactttatatgaaaatgtgtcttacggtccaacaattcatggtatggctcaatcaaaacaagaaatggatgaaattgttgaaactagtttgaaaaaggctgcactatgggaagaggtaaaagataggttgcatgaacctggaactggattatctggaggacaacagcaaagactttgtattgctagagcgatttctgtaagaccagaagttatattaatggatgaaccttgttcagcattagatccaatagcaacagcacaaattgaagaattgattgatgagttaaaaaaagagcacacaataataattgtaactcattctatggctcaagcagcacgtgtttctcaaaatacaggtttttttcatttaggacaattgattgaacatggatctactgataaaatatttaagaatcctgataataaaaaaacgcaagattatataacagggaggtttggataa

SEQ ID NO: 274699 - DNA, 1084 bp, Unknown
  Bacterial polypeptide expressing nucleotide sequence isolated from the Sargasso Sea
atgtccagtaaaaatgattcgtttgtagtatttgacagggttcaaaaaagttatgatggcttaagccttgttgtcaaagatctaaacttaaatattaagaaaggtgaatttcttactatgcttggaccatctgggtcagggaagactacatgtttgttaatgttggcaggatttgaaacagctactcatggcgaaatcctcttagatggcaaaccaatcaataacattcctcctcacaagagaggaattggtatggtttttcaaaactatgctttgtttcctcatatgactgttggagaaaacctatcattcccattagaggttagaaaaattagtaaaaatgatagagaggaaaaagtattacaagcgcttgaaatggtgcaaatgactgattttataaacaggaaacctgcacaactgtctggaggacagcaacagagaatcgctttagcaagaagccttgtttttaatcctgatcttgtattgatggatgaaccgttaggtgctcttgacaaacaattaagagaacatatgcaatatgaaataaaaaatctacacaagcaactaggtgtaactgttgtttacgttactcatgatcagtcagaggcgctaacaatgtcagatagagtagctgtttttaatgatggtcaaatacaacagttatcaacacctgatggactttatgaaagacctgaaaatgcatttgttgcccaatttattggtgaaaacaataaattaacaggaaaaattaagagtgtaaataatagcgaggttattgttaaaacaactcaaaatatggaggtaaaagctttaaaagttaattgtggaggtgaaggaaccaatacaactttatctataaggcctgaaagaatacatcttaacagtaaatataaaaataaagtagatgctactataaaacaactaatataccacggtgatcatattaggtgtctcataaaaattgataaagaaaatgattttattgtaaaaataccaaattcaaatattaaaaacactctcaaaataggggagaaaatacttataagttgggatataaaggattgtcatgcattagatgcatgat

SEQ ID NO: 274700 - DNA, 426 bp, Unknown
  Bacterial polypeptide expressing nucleotide sequence isolated from the Sargasso Sea
atggtatagctcaatcaaaacaagaaatggatgaaattgttgaaactagcttaaaaaaagctgcactatgggaagaggtaaaagataggttgcatgaacctggaactggattatctggagggcaacaacaaagactttgtattgctagagcaatttctgtaagacctgaagttatattaatggatgagccttgttcagcattagatcctatagcaacagcacaaattgaagaattgattgatgaattaaaaaaagagcacacaataataattgtaactcattctatggctcaagcggcacgtgtatctcaaaatacaggtttttttcatttaggacaattgatagaacatggatctactgataaaatatttaagaatcctgataataaaaaaacccaggactatataaccgggaggtttggataat

SEQ ID NO: 274701 - DNA, 352 bp, Unknown
  Bacterial polypeptide expressing nucleotide sequence isolated from the Sargasso Sea
gtaaaagataggttgcatgaacctgggaactgggattatcttggagggcaacagcatagactttgtattgctagagcaatttctgtaagacctgaagttatattaatggatgagccttgttcagcattagatcctatagcaacagcacaaattgaagaattgattgatgaattaaaaaaagagcacacaataataattgtaactcattctatggctcaagcggcacgtgtatctcaaaatacaggtttttttcacttaggacaattgatagaacatggatctactgataaaatatttaaaaatcctgataataaaaaaacccaggactatataaccgggaggtttggataat

SEQ ID NO: 274702 - DNA, 367 bp, Unknown
  Bacterial polypeptide expressing nucleotide sequence isolated from the Sargasso Sea
gctgccctgtggaacgaagttaaagatagacttgatgaaatcggaactggtttatcaggcggtcaacagcaacgactatgtattgcaagagctatatctgtaagcccagaagtgattcttatggacgaaccatgttcagcgcttgacccaatagcaacagctcaaattgaagaacttattgatgatcttaaaaaagaggtcacaattgtaatagttacccactcaatgtcacaagcagctagggtatctcaaaaaacgggtttctttcatttgggaaaacttatagaatttggatcaacagataaaatatttaaaaatcctgacaaacaacaaactcaggattacattacagggaggtttggttaat

SEQ ID NO: 274703 - DNA, 763 bp, Unknown
  Bacterial polypeptide expressing nucleotide sequence isolated from the Sargasso Sea
tatgaaaaatataaaaatatcttcaaaaaatgtaaatgttcattatggtgcaaaacaagcacttcattcagtgtcattaaatattaatgaaaatgaagttacttcactaattggaccttctggttgtggaaaatctacttttctaagatgtatcaatagaatgaatgatttaattgatatttgtaaagttgatggatctattacagtagataatgaggaaattatttcggatgaagttgatgtagtaagtcttcgttcaaaaattggaatggtttttcaaaaaccaaacccttttcctaaatctatttttgataatgttgcttatgggccaactattcatggtatagctgaaagcaaaacagacttagaagaaatagttcattcatcattaaagagagcaggacttttaaaagaggtaaaggatcgtttgcatgaacctggcacaagcttatctggtggacaacaacaacgcttatgtattgcacgagcaatagctgttaatccagatattattttaatggatgaaccatgttcagcattagatccaattgcaacagcaataattgaagaattaattgatgagcttaaagcaaattacactattgtgatagtgactcactctatgcagcaagcagctagagtatcacaacgaactgggttttttcatttaggggaactaattgaaacaggtgatacacaaaaaatttttactaatcctgataatgaaaaaacacagggttatataacgggaaggtttggataa

SEQ ID NO: 274704 - DNA, 1087 bp, Unknown
  Bacterial polypeptide expressing nucleotide sequence isolated from the Sargasso Sea
atgtctaaaaatcctgaattcgttaaattcgataaagtagataaaagttatgacggtaaagttcttgtcgtcaaagatcttcaattagatattgctgagggcgagtttataaccatgcttggtccatctggatcaggtaagacaacatgtttaatgatgttagctggatttgaaacaccaactcatggtgagatattattagacggaaacataatttcaaatattcctcctcataaaagaggaattggcatggtatttcaaaactatgcattattcccacatatgactgtttatgaaaacttagcttttcctttaagagtaagaaaagttgagaaagacgaaattgataaaaaagttgataaggctttgtcgatggtttcattaaacggatttgaaactagaatgccagcccaactttcaggtggtcaacaacaaagggttgctgtagcaagagctttagtatttgacccagcagttgttttaatggacgaacctttaggagcgctagataaaaatttgagagaaagtatgcaatatgaaattaaacatattcatgaaagcattggggtaacagttgtttatgtaactcacgatcaaagtgaagctttgacaatgtccaatagaattgcagttttcaatgatggaaaagttcaacaattatcagacccagctgaattatatgaaaaacctgtaaattcgtttgtagctgaatttattggtgagaataatacttttaatggagaagttacagatatagataaagataaatgtaaagttaagctggcaaattcagaaatattagccaatcctatttcagttaaatccaaaggagaaaaaactacagtttcattgagacccgagagggcactaataaatccaaaagataaaatggataatatgtttactggaaagatagaagaagttatttatcatggtgaccatacaagagtgaggttaaatcttttaggtagcgcagaatttattttaaaagttccaaatagcacctccaatctagagcttaaagttagtcaagatattaaaattggatggaacagcttagatgctagggctttagacccaaaataaa

SEQ ID NO: 274705 - DNA, 346 bp, Unknown
  Bacterial polypeptide expressing nucleotide sequence isolated from the Sargasso Sea
gatgtccggtggtcagcagcagcgtctgtgcatcgcccgcgctattgctgtccagcctgatgtcatcttgatggacgagccgtgctcggccttagacccggtctctaccggcaaggttgaggacctcatgctcgagctgaaagaggactacacgatcgttatcgtcactcacaacatgcagcaggcagcgcgtgtttcggacctcacagctttttttacggtcgcggcgatggatgagcgcagtagccgcaccggagtcctagtggaaattgacgagacgcgggcgatcttctccgaccccaaggatgacaggacggccaattacgtcaccggcaagttcggctga

SEQ ID NO: 274706 - DNA, 358 bp, Unknown
  Bacterial polypeptide expressing nucleotide sequence isolated from the Sargasso Sea
gctgcactatgggaagaaagtaaaagatagattgcatgaacccggaactggattatctggaggacaacagcaaagactttgtattgctagagcgatttctgtaagaccagaagttatattgatggatgagccttgttcagcattagatccaatagcaacagcacaaattgaagaattgattgatgagttaaaaaaagagcacacaataataattgtaactcattctatggctcaagcggcacgtgtatctcaaaatacaggtttttttcacttaggacaattgatagaacatggatctactgataaaatatttaagaatcctgataatacaaaaacccaggaatatataaccgggagg

SEQ ID NO: 274707 - DNA, 421 bp, Unknown
  Bacterial polypeptide expressing nucleotide sequence isolated from the Sargasso Sea
atgataaagattaaagcaaaagatgttgatgttttttacggaaaaaaacaagcactctttaacataagtttagatattgaggaaaatcaagtaacggcattaattggtccatctggttgtggtaaatcaactttcctaagatgtcttaatagaatgaatgatgtaattgatatctgtagtgttaaaggagaaattttaattaatgactttaatatcaatgataaaagttgtgatgtagtaagactaagagaaaaaattggtatggtttttcaaaaacctaatccttttccaaaaactttatatgaaaatgtatcttacggtccaacaattcatggtatggctcaatcaaaacaagaaatggatgaaattgttgaaactagtttgaaaaaggctgcactatgggaagaaagtaaaagataga

SEQ ID NO: 274708 - DNA, 229 bp, Unknown
  Bacterial polypeptide expressing nucleotide sequence isolated from the Sargasso Sea
atggaattaaataactcaaaaataaaaataaaatcaaaaaatttaaatgtttattacggcaataaacaagcattacacaatattaatttagaaattaataacaaagaagtcacagctttaataggcccttctggatgtggaaagtccacttttataagatgcatcaacagaatgaatgatacgatagatatttgcaaagtagatggttcaatagaaatagacggcaagg

SEQ ID NO: 274709 - DNA, 757 bp, Unknown
  Bacterial polypeptide expressing nucleotide sequence isolated from the Sargasso Sea
tatgaataaaatagaagcaaaaaatgttgatgtctattatggagcgaaacaagctttatttgatatcaatatggatatcgaagcaaataaagtaactgctcttattggaccttctggttgtggtaaatcaacattcttaagatgtttaaataggatgaatgatgtgatcgatatttgtaaagtcagtggtgtcgtaaaaattaatgactatgacataaatcaaaaagatacagatgttgtaaggcttagagaaaaagttggaatgatttttcaaaaaccaaatccttttccaaaaaccatttatgagaatatttcttatggacctgagatacatgggatagctcaatctaaaagtgaaatggataatattgttgaagagagtttgagaaaagcagcactttgggaagaggtaaaagacagaattcacgaaccaggtactggtttatcaggtggacaacaacaaagactttgtattgcaagaacaatatcaattaagccagaggtaatactcatggatgagccatgttcagctcttgatccaattgcgacagcacaaatagaggagctaattgatgaattaagaaaggaacatactataataattgttactcactcaatgtcccaagctgcaagagtctctcaaaatactggtttttttcaccttggcaaattgattgaagtaggttctactgataagatattcaagaatccgactcaacaacaaacgcaggattacataacaggaaggtttggataa

SEQ ID NO: 274710 - DNA, 316 bp, Unknown
  Bacterial polypeptide expressing nucleotide sequence isolated from the Sargasso Sea
ttgtctggtggtcagcagcaacgtttggtcattgcccgtgctattgcaattgaaccagaagtgttattgctggatgaaccagcctcagctttggacccaatttccacgctgaaaattgaagagctgatttatgagctcaaagataaatacactattgtgattgttacccacaatatgcaacaggccgcccgtgtatccgactatactgcctttatgtatatgggtgatttaattgagtttgatgccaccaataagatgtttaccaatccatcgcagcaacaaactgaagattacatcacaggccgttttggttaat

SEQ ID NO: 274711 - DNA, 757 bp, Unknown
  Bacterial polypeptide expressing nucleotide sequence isolated from the Sargasso Sea
atgataaagattaaagcaaaaaatgtagatgttttttatggaaaaaaacaggccctctataatataggtttagatattgaagaaaaccaagtaactgcattaattggtccatctggttgtggtaaatcaacttttcttagatgtcttaatagaatgaatgatgtaattgatatctgtagtgttaaaggagaaattttaattaatgactttaatataaatgataaaagttgcgatgtagtaagacttagagaaaaaattggtatggtttttcaaaaacctaatcctttcccaaaaactgtatatgaaaatatatcatacggcccaacaattcacggtatggctcaatcaaagcaagaaatggatgaaattgttgaaactagcttaaaaaaggctgcactatgggaagaggtaaaagataggttacatgaacctggaactggtttatctggaggacaacaacaaagactttgtattgctagagcaatttccgtaagaccagaagttatattaatggatgagccttgttcagcattagatccaatagcaacagcacaaattgaagaattgattgatgagttaaaaaaggagcatacaataataattgtaactcattctatggctcaagctgcacgtgtctctcaaaatacaggtttttttcacctaggacatttgattgaacatggatcaactgataagatatttaagaatcctgataacacaaaaacacaggattatataaccgggaggtttggataat

SEQ ID NO: 274712 - DNA, 763 bp, Unknown
  Bacterial polypeptide expressing nucleotide sequence isolated from the Sargasso Sea
tatgaaaagtataaaaataaaagcggacaacttaaatgttcattatggagagaaacaagcactcttcgacgtgtccatgtacatggaagaaaaacaagtcaccgctttgataggtccatcaggatgcggcaaatctacctttattagatgcttaaatagaatgaacgatgttattgatatatgcaaagtacaaggaaaaatagaaatcgatggcaacgatatttatgcaccagacatgcaagttgaacaactaagagaacgcgtgggtatggtttttcaaaagccgaacccctttccaaaatctatttttgaaaatgtagcttatggtccaagaatacatggaatagcagaacataaatctgatttagaagaaattgttgttaacagtctaaaaaaagcagctctctttgatgaggttaaagatagattaaacgatgcgggaacaggcctctcggggggacagcaacaaagattgtgtattgcaagagctatatccgtaaatccagatattattctaatggatgaaccttgctcagccttagacccaatagctacggctaggattgaagaattaatgggagaacttaaaacagaatatacaataattattgtcacgcactcgatgcagcaagccgctagagtttcatcaaggacaggtttttttcatttaggtaaattagttgaagttgataagactgaaacaatcttttcaaatccatcagatcagagaacgcaagattatataacagggaggtttggttaa

SEQ ID NO: 274713 - DNA, 559 bp, Unknown
  Bacterial polypeptide expressing nucleotide sequence isolated from the Sargasso Sea
tatgtcaaaaaatccagaatttgttaaatttgataaagttgacaaaagctatgatggtaaagttctagttgtaaaagatcttcagttagacattgcggaaggtgagttcattactatgcttggtccctctggatctggcaaaacaacatgtctgatgatgcttgctggctttgaaactccaacaaacggagagattttgttagatggaaatataatttctaacattccacctcacaaaagaggaataggaatggtgtttcaaaattatgcactttttcctcatatgactgtttatgaaaatttagctttccccttaagagttagaaaaatggaaaaagatgaaattgataagaaagttgacaaagctttatcaatggtttcactaaatgggtttgaaacaagaatgccaggacaactttcaggaggacaacaacaaagggtagctgtagctagagctttagttttcgatcccgcagtagttttgatggacgaacctttaggtgcgctggataaaaatttaagggagagtatgcagtatgaaattaaacatattcatgaa

SEQ ID NO: 274714 - DNA, 757 bp, Unknown
  Bacterial polypeptide expressing nucleotide sequence isolated from the Sargasso Sea
gatgataaagataaattcaaaaaatgtagatgttttctatggaaagaaacaagctctattcaatataaacttagatattgaagaaaatcaggttacagcactaattggtccttcaggttgtggtaaatctacttttttaagatgtcttaatagaatgaatgatgtgattgatatatgcagagttaaaggtcagattattatcaatgattttgatatcaatgacaagagttgtgatgtagttagattaagagaaaaaattggtatggtttttcaaaaaccaaatccttttcctaaaactatttatgaaaacatttcttatggcccaacaattcatggcatggctcaatcaaaaaatgaaatggatgaaatagttgaaaatagcttaaaaaaagcagcgttatgggaagaggtcaaagatagacttcatgaaccaggaactggtttgtctggtggacaacaacaaagattatgcatagcaagggctatttcagttaaacctgaagttattcttatggacgagccttgttctgctttagatcctattgctacagctcaaatagaagaactaattgatgagttaaaaaaagaccatactattataatagttactcattcaatggctcaagcagcaagagtatcccaaaacacaggcttttttcatttgggagaattgatagaacatggttctactgataaaatatttaagaatcctgaaaataaaagaactcaggattatattacagggaggtttggataa

SEQ ID NO: 274715 - DNA, 533 bp, Unknown
  Bacterial polypeptide expressing nucleotide sequence isolated from the Sargasso Sea
catgagtaactctaaaatattggcaaatggtgtagatgtatattatggatccaaacaagctctttttggaatctcaatggatatcaaggagaaagaagttacggcattaatcggtccttcaggatgtggtaaatcaactttcttaagatgtataaacagaatgaatgatttaattgaaatatgtaaagtatcgggatcaataaaagtagataacgaagaaattattagtgaaaaaaccgatgttgtaagtctaagatctaaaattggaatggtatttcaaaaaccaaatccttttcctaaatctatttttgataatgttgcttatggcccaactatacatggtttagttgactcaaaaaatgaattagaagaaattgtacattcatcattaaaaaaggcaggtctatttgatgaagtaaaagatcgattaaatgaacctggaacaagtttatcaggcggtcaacaacaacgattatgtattgcaagagcaattgctgttaatcctgaaataatcctaatggatgaaccttgct

SEQ ID NO: 274716 - DNA, 493 bp, Unknown
  Bacterial polypeptide expressing nucleotide sequence isolated from the Sargasso Sea
ttttcaaaaaccaaatcctttttcccaaaaactatttatgaaaatatttcttatggtccaacaattcatggtatggctcaatcaaagaatgaaatggatgaaatagttgaaactagcttaaaaaaggcagcattatgggaagaggttcaagatagacttcatgagccgggcacagggttatcaggaggtcaacagcaaagattatgtatagcaagagctatttcagttaaacctgaagttattctcatggatgagccttgctctgctttagatcccattgctacagctcaaattgaagaattaattgatgaactaaaaaaagaccatactatcataatagtcactcactcaatggcacaagctgcaagggtctctcaaaatactggtttttttcacttaggagaattgattgaacatggctctactgataaaatatttaagaatcctgaaaataaaaaaactcaggattatatcactgggaggtttggataat

SEQ ID NO: 274717 - DNA, 742 bp, Unknown
  Bacterial polypeptide expressing nucleotide sequence isolated from the Sargasso Sea
gatgactgttgccatccgcgccaccgacctggtgaagagctacacccctggggtgagggctctggatcgggtgagcctggaggtgagcagcggtgaggtgctggtggtgatgggtccgtccggatcgggcaagagcaccctgatccgcaccttcaacggactcgagaggctggatggtggcgccctggatgttcttggggtgcgtctggattccacccatgctgagcatcaggtgcgggcgatccgccgtcgggtgggaatggtgtttcagcagttcaacctgtttccccatctctcgatcctcgagaacatctccctcgcgccggtgaaggtgcagaagcgcccgaaggcggaggtggagcagcgggcgctgcagttgctggagcaaatggggattcaggagcaggcagagaagtacccggcacagctcagtggcggccagcagcaacgggtggcgatcgcccgggccctcgccctggatcctgaggtgatgctcttcgatgaacccaccagtgccttggatccggaacgggtcaaggaggtgctggatgccatgcgtcagctggccagcggtgggatgaccatggtggtggtgacccatgagatcggcttcgcccgcgatgtggccgatcgcgtgatgttcatggatcaggggcaggtggtggagacgtcggatccagtgacgtttttctcgggggctcgggaggaacgcagccgccgctttctcagtcagatgctctga

SEQ ID NO: 274718 - DNA, 775 bp, Unknown
  Bacterial polypeptide expressing nucleotide sequence isolated from the Sargasso Sea
atggtagataaaataaataaccttaaatttaaaacaaagaatgtaagcgttttttacggatctaaacaagcgataaacaaaataagcttggatatagaagaaaaacaaattactgcattaattggtccttctggatgtggaaaatctacattcctaaggtgccttaacagaatgaacgatgttatatcaaattgttcagttaatggtaaaatacttctagatgggaacaatatatacagtgatgaaattgatcctgtcttattgagagcaaaagttggaatggtttttcaaaagccaaacccatttccaaaatctatttttgaaaatattgcttatggaccaagaattcatggtattggtaacaatagagccgaacttactgatttagtacatcatagtttagagcaagctggattaatagatgaagtaaaagacagattagatgatattgcaacaggtttatctggtggacaacagcagagaatttgtattgcgcgcgctatagctgtcaatccagatgtcatattaatggatgaaccttgttctgcattagatcctattgcaactgctaaaattgaagaattaatgagtagtctatcaaaatcctataccattattatagttacacattcgatgcaacaagcaggtcgtgtttcgcaaaaaactgccttttttcatatgggtgatctcattgaatatggagagactcccaaaatatttacacaacctgatcaacagaaaactcaagattacattacagggagatttggataaa

SEQ ID NO: 274719 - DNA, 307 bp, Unknown
  Bacterial polypeptide expressing nucleotide sequence isolated from the Sargasso Sea
attgaaattatcggatgaaaaaatcaaacttcaggttaatgatctgaaactgtattacggtgatgcactggcgttaaaaagcgtcaatatgacaataccggagaagcgtgtcacagcttttatcggtccttcaggctgcggtaagtcgactttattacgttgttttaaccggatgaatgacttagtggatatttgtcgtattgaaggtgagattttaatggatagccagaatatctacgacccgaaagtggacgtagctgagctgcgccgtcaggtgggtatggtgttccagaagccgaatcctttt

SEQ ID NO: 274720 - DNA, 763 bp, Unknown
  Bacterial polypeptide expressing nucleotide sequence isolated from the Sargasso Sea
atgatccgcttgagtggcatcgagaaacagtttgcggggcagcgagtgttgaaaggggtagggctggcgatggccgcgggcagcgtcaccgccctgatcggcccctccggcagcggcaagagtaccttgctgcgctgcgtgaacctgctggagcgacccgatgcgggccagctggtgctggggggcagcgagctcgactttacccggcatctgtcacggcaaagcgtactggccctgcgccagcagaccggcatggtgttccagaatttccagctgttcccacacatgacggtgctggagaacgtgatggaagggttggtgaccgtgttgcagtggcccagggagagggcggcggtgcgcgccctgcaactgctcgacaaggtggggctcaggcacaaggcccaggcggtgcctgccaccctctccggcggtcagcagcagcgggtggccattgcccgggcgctggcgccggcccccaaggtgttgctctgtgacgagcccacctcggcgctggatcccgagcttgcccaggaggtggtggccgtgctgcgccagctggccagtgagggcaccaccatgctgatcgccacccatgatttgcgcctggcggcccagatcgcgcagcaggtgatcttcctggaggcgggtgaggtggtggaggcgggcagtgcgcgccagatgttcaccacccccaagcgggcgcgtaccttcgaatacatctccaccctcaccgagcggctgccggagagctggagcatctagc

SEQ ID NO: 274721 - DNA, 658 bp, Unknown
  Bacterial polypeptide expressing nucleotide sequence isolated from the Sargasso Sea
ttaataggtccatcaggttgtggtaaatcaacctttattagatgcttaaatagaatgaacgatgttattgatatatgcaaagtacaaggaaaaatagaaatcgatggcaacgatatttatgcaccagacatgcaagttgaacaactaagagaacgcgtgggtatggtttttcaaaagccgaacccctttccaaaatctatttttgaaaatgttgcttatggcccaagaatacatggaattgcagaacataaatctgatttagaagaaattgttgttaccagtctaaaaaaagcagctctctttgatgaggttaaagatagattaagcgactcaggaacaagcctgtcaggtgggcagcagcaaagattatgtattgcaagagctatatccgtaaatccagatattattctaatggatgagccttgttcagctttagacccaattgctacggctagaattgaagaattaatgggagatcttaaaacagaatatacaataattattgttacacactcgatgcaacaggcagccagggtttcatcaagaacaggtttctttcatttaggtaaattagttgaagttgataagactgaagcaattttttcaaatccatcagatcagagaactcaagattatataacaggaaggtttggctaat

SEQ ID NO: 274722 - DNA, 455 bp, Unknown
  Bacterial polypeptide expressing nucleotide sequence isolated from the Sargasso Sea
aatgagtaaaataaaagcggaaaatgtaaatgtttattacggatccaaacaggcattatttgacgtctctatagatatagcagaaaaagaagttacagctttaattggaccatctgggtgtggaaagtctactttcttaagatgcttgaacaggatgaacgacgtcatagaaatttgtagagttgaaggcagtattaaaatggacaacctagaactgaattcaagaaagttagatgttgtgagacttagggagaacgttggtatggtttttcaaaaacccaatccattccctaaaacaatttatgaaaatgtagcttatggtcctactattcacggtattgcacagagcaaagaagaaatggatcaaatagttgaaacaagtttgaaaaaagctgccttgtggaacgaagttaaagatagacttgatgaaatcggaactggtttatcaggaggtc

SEQ ID NO: 274723 - DNA, 292 bp, Unknown
  Bacterial polypeptide expressing nucleotide sequence isolated from the Sargasso Sea
gtttgtatcgcgcgtgcaattgctacctctcccgatgtcttgcttatggatgaaccttgctccgcattggatccgattgcaacggcgcaggtggaagaattgattgatgagcttcgtcagaatttctgcgttgtaatagtgacgcactcaatgcagcaggcagctagagtaagccagaggaccgcttttttccaccttggtagtttagttgagtttggggatacggagaaaatttttacaaaccctaatgatccaagaactgaaagctacatcactgggcgaataggctagg

SEQ ID NO: 274724 - DNA, 763 bp, Unknown
  Bacterial polypeptide expressing nucleotide sequence isolated from the Sargasso Sea
atgaataatataaaaattaaatcaaaaaatttaaatgtttactatggtgaaaagcaggctttatatgatgttaatttagatttaaatgaaaaagaagtaacagcattaattggtccatctggatgtggaaaatctacttttatcagatgcattaatagaatgaatgatgtcatagatatttgcaaagttacaggaaatattgagatggatggtatagaaattaatgataaagatttagacgttgtatccttaagagaaagagttggaatggtttttcaaaaacccaacccatttccaaaaagtatttatgataatgtttcttatggaccaaaaattcatggaaaaggtgaaagtaaaaatgaattagacgagattgttgagcatagtttaaaaaaagctgcattgtgggaagaagtaaaagacagacttgaagagcctggcacaagtttgtcaggtggtcaacaacaaagactttgtatagcaagagctatatctgtaaacccagaagtaattttaatggatgaaccttgttcagctttggatccaattgcaacagctaaaatagaagaattaattgatgaattgaaaaaaacatatacaatagtcatagttacgcactctatggctcaagcagtaagagtttctcaaaaaactggattctttcatttgggaaaactaattgaggtaggaaaaacagagaaaatttttaagaatcctgacaataaaatgacacaagattatattacaggtagatttggataaa

SEQ ID NO: 274725 - DNA, 262 bp, Unknown
  Bacterial polypeptide expressing nucleotide sequence isolated from the Sargasso Sea
cctgaagttatattaatggatgagccttgttcagcattagatcctatagcaacagcacaaattgaagaattgattgatgaattaaaaaaagagcacacaataataattgtaactcattctatggctcaagcggcacgtgtatctcaaaatacaggtttttttcacttaggacaattgatagaacatggatctactgataaaatatttaagaatcctgataataaaaaaacgcaagattatataaccgggaggtttggataat

SEQ ID NO: 274726 - DNA, 616 bp, Unknown
  Bacterial polypeptide expressing nucleotide sequence isolated from the Sargasso Sea
tatgattaagataagtgcaaaaaatgttgatgttttttatggaaaaaagcaagccttgtttaatataaatttagacattgaggaaaatcaggtaacagccttaattggaccatcgggatgtggtaaatctacttttttaagatgcttgaatagaatgaatgatgtaattgacatatgcaaagttcaaggagagatagttataaacgattttaatattaacgataaagagtgtgacgtagtaagattgcgagaaaaaattggaatggtttttcaaaaaccaaatccatttccaaaaacattatacgaaaatatttcttatggtcctacaatccatgggatggctcaatcaaaacaagaaatggatgaaatagttgagacaagtttgaaaaaagctgcgctctgggaagaagtaaaagatagacttcatgaacctggaacaggtttgtcaggtggtcaacaacaacggttatgtatagcaagagctatttcggtacaaccggaagtaatcttaatggacgagccttgttcagcattagacccaattgcaacagcccaaattgaggagttaattgatgaattaaagaaagaacatacaataattatagttactcactct

SEQ ID NO: 274727 - DNA, 574 bp, Unknown
  Bacterial polypeptide expressing nucleotide sequence isolated from the Sargasso Sea
tatgaaaagtataaaaataaaagcagataacttgaatgtttattatggagagaaacaggcactcttcgatgtttccatgtacatggaagaaaaacaagtcactgctttaataggtccatcaggttgtggtaaatcaacctttattagatgcttaaatagaatgaacgatgttattgatatatgcaaagtacaaggaaaaatagaaatcgatggcaacgatatttatgcaccagacatgcaagttgaacaactaagagaacgggtgggcatggtttttcaaaagccgaacccctttccaaaatctatttttgagaatgtagcttatggtccaagaatacatggaatagcagaacataaatctgatttagaagaaattgttgttaccagtctaaaaaaagcagctctctttgatgaggttaaagatagattatacgatgcgggaacaggcctctcgggtggacagcaacaaagattgtgtattgcaagagctatatccgtaaatccagatattattctaatggatgagccttgttcagctttagacccaattgctacggctagaaagaagaattaa

SEQ ID NO: 274728 - DNA, 757 bp, Unknown
  Bacterial polypeptide expressing nucleotide sequence isolated from the Sargasso Sea
aatgagtaaaataaaagcggaaaatgtaaatgtttattacggatccaaacaggcattatttgacgtctctatagatatagcagaaaaagaagttacagctttaattggaccatctgggtgtggaaagtctactttcttaagatgcttgaacaggatgaacgacgtcatagaaatttgtagagttgaaggcagtattaaaatggacaacctagaactgaattcaagaaagttagatgttgtgagacttagggagaacgttggtatggtttttcaaaaacccaatccattccctaaaacaatttatgaaaatgtagcttatggtcctactattcacggtattgcacagagcaaagaagaaatggatcaaatagttgaaacaagtttgaaaaaagctgccttgtggaacgaagttaaagatagacttgatgaaatcggaactggtttatcaggaggtcaacagcaacgactatgtattgctagagctatatctgtaagtccagaagtgattcttatggacgaaccatgttcagcgcttgacccaatagcaacagctcaaattgaagaacttatagatgatcttaaaaaagaggtcacaattgtgatagttacccactcaatgtcacaagcagctagggtatctcaaaaaacaggtttctttcatttgggaaaacttatagaatttggaccaacagataaaatatttaaaaatcctgataatcagcaaactcaggattatattacaggaaggtttggttaa

SEQ ID NO: 274729 - DNA, 763 bp, Unknown
  Bacterial polypeptide expressing nucleotide sequence isolated from the Sargasso Sea
atgagtgatattaaaattaaatccaaaaatttaaacgtctattatggagacaaacaagctttgtttgatgttaatttagatttaaatgagaaagaagtaactgcattaattggtccatcaggatgtggaaaatcaacttttataagatgcatcaacagaatgaatgatgtaattgatatttgtaaagttacaggaaatattgagatagatggtatcgagatcaatgatagtaatttagatgtagtttcattaagagaaagagttggcatggtatttcaaaaacccaacccatttccaaaaagtatatatgacaatatctcttatggtcctaaaatacatggtaagggcgaaactaaaaatgagttagacgaaattgtagagaagagcttaaaaaaagcagctctatgggaagaggttaaagatagattgaatgaacccggaacaggattatctggtggacaacaacaaagactttgcattgctagagctatatcggttaatccagaagtaattctaatggatgagccatgttcagcattagatccaattgctacagctaaaattgaagaattaattgatgaactaaaaaaaacttatactattgtaattgtaactcattcaatggcgcaggcagttagagtttcacaaaaaacaggcttttttcatcttggtaagataatagaagtaggcaaaactgaaaaaatatttaaaaatcctgacaataaaatgacacaagattatattacaggtagatttggataaa

SEQ ID NO: 274730 - DNA, 478 bp, Unknown
  Bacterial polypeptide expressing nucleotide sequence isolated from the Sargasso Sea
caaatccttttccaaatctatttttgataatgtagcttacggaccaactattcacggtatcgtcgagactaaaacagatttagaagagatagttcatttatctttaaaaagagcaggactgttaaaagaagtaaaagatcgtttgcatgaaccagggactagtttgtctggcggtcagcaacaacggttatgcatcgctcgtgccattgcagttaatcctgatattattttaatggatgagccttgctcagcattagatccaattgcaacagcaacaatagaggaattaattgatgaacttaaaaacaaatatacaattgtaatagtaacacactcaatgcagcaagcagcaagagtatcgcaacgaacaggtttttttcatttaggtgaacttgtggagactggagagacacaaaaaatttttacaaatcctgaaaacgaaaaaacacaaggatatataacaggaaggtttggataa

SEQ ID NO: 274731 - DNA, 229 bp, Unknown
  Bacterial polypeptide expressing nucleotide sequence isolated from the Sargasso Sea
tatgaacaatgtaaaagtgtctaccaaaaatgtgaatgtgcattacggcactaagcaagcacttcatcgagtaacacttgatatcaatgaaaaggaagttacagcactgattggaccttctggttgtggtaaatctacttttctaagatgtataaatagaatgaatgatttaattgatatttgtaaagtagatggatctattacagttgataatgaagaaattatttcg

SEQ ID NO: 274732 - DNA, 772 bp, Unknown
  Bacterial polypeptide expressing nucleotide sequence isolated from the Sargasso Sea
atgccaaccgcccggacgaccaaagcgcgcatctctgtgcgcggactgaatttccactacggccgacgtcaggcgctatacgacgtcaacgtcgatttcccagaccgggaagtgaccgcaatcatcggctcgtcaggttgcggcaagtcgacactgctgcgggttctgaaccggatgtactcgatttatccagagcagaaagcgactggcgaagtcgagatggatggaaaaaacatcctcgacccgcaattcaagctgaacgagttgcgtctgaaggtcggtatggtgtttcagaagcctacgccattcacgatgtcgatttacgacaacgttgcgctggcgattacccatcatgaagtgttaacgcgcagcgaactggatgagcgcgttgaattcgcgctgaggcaggctgccttgtgggatgaggtcaaggacaagctggaccagagcgcgttagccctgtctggtggacaacagcagcgtctttgtattgcccgtgcgctagccatcgacccggaagtgttgctgctggacgaaccgacttccgcgctggacccgatagcaaccggcaagattgaagacctgctgcatgcgctgcgaaaacactacacggtcgtcatcgtcactcacaacatgcagcaggcggcccgcgtctcggagcatactgcgttcatgcatctggggaagctcattgagttcggcaccaccgagcagattttttcgaagcccaaccagaaagcgaccgaagactacatcaccggccgtttcggct

SEQ ID NO: 274733 - DNA, 763 bp, Unknown
  Bacterial polypeptide expressing nucleotide sequence isolated from the Sargasso Sea
atgagtaatatcaaaataaaatcaaaaaatttggatgttttttatggtgataaacaagcgttgtttgacgtcaatttagatttaaatgaaaaagaagtcactgcattaattggaccatctggttgtggaaagtccacttttataagatgcattaatagaatgaatgatgttatcgatatttgtaaagttacaggaaatattgaaatggatggtatggacattaatgataaagatttagatgtagttgcattaagagaaaaagttggaatggtttttcaaaaacccaatccatttccaaaaagcatatatgataatatttcttatggccctaaaattcatggtaaaggtgaaaccaaaagtgaattagacgaaattgtcgaaaatagtttaagaaaatctgcactatgggaagaagtaaaagatagattagatgaaccgggtacaagtttatctggtggtcaacaacaaagactttgtatagctagagctatatcagttaatcctgaagtaattttaatggatgaaccttgttctgctttagatccaatagctaccgcaaaaattgaggaattaattgatgaattaaaaaaaacatatactattgttatagtgacacactcgatggctcaagctgtacgagtttcacaaaaaacagggttttttcacttaggaaagttaattgaagttggaaaaactgagaaaatttttaaaaatcctgacaataaaatgacacaagattatattacaggtagatttggataaa

SEQ ID NO: 274734 - DNA, 394 bp, Unknown
  Bacterial polypeptide expressing nucleotide sequence isolated from the Sargasso Sea
catgaccacctcacaacttcaaactgaacagcatcaggtctcggacgacaccgcgatctcaattcagaacgtcaccattagctacggcagctacgaagccgtgaagaacgtctactgcgatgttccacgcggaaaagtcaccgccttcatcggtccatccggctgcggtaagtcgacggtggtgcgcgccctcaaccgcatgaacgatctgatcgagggatgttccctcaagggtcgtgttttgttcgacggtgtcgatctttacggtgccagtgttgaccctgttgaagtgcgccgtcggatcgggatggtgttccagcagcccaacccctttccccaagagcatctacgagaacattgccttcggtgcccggatcaacggtttcaccggtga

SEQ ID NO: 274735 - DNA, 469 bp, Unknown
  Bacterial polypeptide expressing nucleotide sequence isolated from the Sargasso Sea
catgaaaaccaacaactttgacttagcaaacttgagccagaacgataccgcactggagatccgcaacttagacctgcgctatggtgacaagcaagcgctgtttaatgtgtcgatgaagatcccaaagaagcaagttacggcgtttatcggccccagcggttgtggtaaatccaccttattgcgctgcattaaccgcatgaacgatctggtcgacaactgccatatcgacggcgagattttgctgcacggtcaaaatatttatgacaaaaaaatcgacgttgccgccctgcgccgcaacgtaggtatggtgttccagcgtcctaacccattccctaaatcgatttacgaaaacgtggtttatggtctgcgtctgcagggcattaaccaccgccgtgaactcgacgaagcggccgagcgttcgctacgcggtgcggcgatttgggatgaagtgaaagaccgtctgcacgat

SEQ ID NO: 274736 - DNA, 763 bp, Unknown
  Bacterial polypeptide expressing nucleotide sequence isolated from the Sargasso Sea
atgaaaaatataaaaataaaagcggacaacttaaatgttcattatggagagaaacaggcactcttcgatgtttccatgtacatggaagaaaaacaagtcaccgctttaataggtccatctggatgtggtaaatcaacctttattagatgcttaaatagaatgaacgatgttattgatatatgcaaagtacaaggaaaaatagaaatcgatggcaacgatatttatgcaccagacatgcaagttgaacaactaagagaacgtgtgggtatggttttccaaaagccgaacccctttccaaaatctatttttgaaaatgtagcttatggtccaagaatacatggaatagcagaacataaatctgatttagaagaaattgttgttaacagtctaaaaaaagcggctctctttgatgaggttaaagatagattatacgatgcgggaacaggcctctcgggtggacagcaacaaagattgtgtattgcaagagctatatccgtaaatccagatattattctaatggatgagccttgttcagctttagacccaattgctacggctagaattgaagaattaatgggagatcttaaaacagaatatacaataattattgttacacactcgatgcaacaagccgctagagtttcatcaaggacaggtttttttcatttaggtaaattagttgaagttgataagactgaaacaatcttttcaaatccatcagatcagagaacgcaagattatataacagggaggtttggttaat

SEQ ID NO: 274737 - DNA, 817 bp, Unknown
  Bacterial polypeptide expressing nucleotide sequence isolated from the Sargasso Sea
tatgattataccctctgaaacagatgataactttgaaaccgttggtcaaacaactgtagataatcctaaaatatcagcacgaaatgttactgtaagttatgggtctaaaacagccataaaaaatgtgtcaattgatatagcacaaaatgaagttctagctatgattggtccctcagggtgcggtaagtctactttcttaaggtgtcttaatagaatgaatgattctattgatatatgtaaagtttcgggagaaattttactcgatgatcaaaatattttagacaaaaagattgatgtagttcctttgagagcaagagttggaatggtttttcaaaaacccaatccttttccaaaatctatttatgacaatgtgtcgtatgggcctaaaattcacgggcttgcaaacaataaagaagaacttgacgaaatagttgtaacaagtttagaaaaagcaggattgtttgatgaagtaaaagataggttaaatgaacctggtactggattgtctggaggtcaacaacaaagactttgcatagcaagaacaattgccgtaagtccagaagttattcttatggacgaaccttgctcagccttagaccctatagcaactgcaaaagttgaggatctaataaacgaattaaaagaaaatttctctattgttattgttacgcacgcgatgcaacaggctgcaagagtttcgcaaagaacggcttactttcatttaggcgatttagttgaagtaggaccaactgataaaatttttacaacgccttcgcatcgtttaactgaatcatatattactggcagatttgggtga

SEQ ID NO: 274738 - DNA, 766 bp, Unknown
  Bacterial polypeptide expressing nucleotide sequence isolated from the Sargasso Sea
ctgagcccggagcagaccgcgctggaagtgaaggatctcaacctgtactacggcaacaagcaggcgctgttcaacgtcaacatgaagatccccaagggccaggtcaccgccttcatcggcccctccggctgcggcaagtccaccctgctgcgctgcatcaaccggatgaacgatctggtggagatctgccgcatcgagggcgaaatccagctgcacggacacaacatctacgacaagagcgtcgatgtctccgccctgcgtcgtcaggtgggcatggtgttccagcgtcccaaccccttccccaaatccatctacgagaacgtggtctatggcctgcgtctgcagggcatcaacgaccgtcgcaccctggacgaggcggccgagcgctccctgcgcggcgcggccctgtgggacgaggtgaaggatcgtctgcacgacaacgccttcggcctctccggcggtcagcagcagcgactggtgattgcccgtgccatcgccatcgagccggaagtgctgttgctcgatgaaccgacctcggcgctcgaccccatctccaccctcaccatcgaggagctgatcaacgagctcaagagccagtttaccgtggtgatcgtgacccacaacatgcagcaggcggcgcgggtctcggatcagaccgccttcatgtacatgggcgagctcatcgagtactcggacaccaacaccatcttcaccaccccggccaagaagaagaccgaagactacatcaccggtcgttacggctaag

SEQ ID NO: 274739 - DNA, 868 bp, Unknown
  Bacterial polypeptide expressing nucleotide sequence isolated from the Sargasso Sea
catgcagtctctcccggaggagccgccgaaggccaatgaaggtgagaaaagcgatcttccggataacatcaatccggatacactccaatcaacgagggaactccacatagacggcgaggcgcaaatagaagtcaaggatctcaacctaagatatggctcagcacaagctctattcgacgtctcaatcccaatagagaaaaactccgttacctctctaatcggaccatcaggctgtgggaagtctacattgctcagatgcctgaatagaatgaatgacctaatccccatctgcaactttgacggtagcatcgtttacgatggcgaagacatcaacaagtcgggcaccgaccttgtaaggctaaggagaaagatagggatggtgttccagaagcccaacccattccccaaatcagtattcgacaacgtatcatacggggttcaattacactacaacccctcaaggaggaaaatgaacgagatagtcgagaagtcactcaccagcgctgctctttggggagaggtttcggaccgcctgcatgaattagggaccagcctttcaggaggccagcagcagaggctctgcatagccaggaccatcgcggtcgagccagacgtaattctgatggacgagccatgctctgcgctagaccccatagccacggccaagatagaggacttgattacgcagctgaaggagcacttcacagtggtcattgtcactcactcaatgtcccaggcaatgcgagtctcggattacacggcattcatgttccttggcagattgatagagttcgacaagacagacaagatcttcaacaacccgggcaatgagctgacagaccgatacatctcgggaaggttcggctga

SEQ ID NO: 274740 - DNA, 769 bp, Unknown
  Bacterial polypeptide expressing nucleotide sequence isolated from the Sargasso Sea
atgacacaagaaaaacttaaaatatctgtaaaaaatctaaatgttcactatgggtctaaacaagcattgtataatgttaatctgaatatctttgaaaatgaagttacatctttgataggaccatcaggttgcgggaaatctacattaattaaatgctttaatagaatgaatgatcttgtggatatttgcagagttgatggacaaataataattgatggtcaaaatataaatgatcatgatactgatccagttttattgagaacgaaagtaggtatggtttttcaaaaaccaaatccattcccaaagtctgtttatgataatgttgcttatggtcccaagcttcatggaatgacgggtaacaaaagagagcttgacgaattggttataaaaagtcttcaaaaagcaggtttatttgatgaagttaaggatcgcttgtttgagcccggtaccggattatctggtggacaacaacaaagactatgcattgctagagctttagcggtgaatccagaaatccttttaatggatgagccttgttcggcattagatccaattgcaacggcaaaaattgaggaattaataaatgaactgaaacaaaaatatacaattgtaattgttacacactcaatgcaacaggctgctcgagtatctaacagaacagcctatatgcatatgggcgaactaattgagtcaggtttaactaaaacaattttttcaaatccagaacatgtcaaaacacaagactacgtaacgggtcgtattggataat

SEQ ID NO: 274741 - DNA, 373 bp, Unknown
  Bacterial polypeptide expressing nucleotide sequence isolated from the Sargasso Sea
aaaaaggcaggtctatttgatgaagtaaaagatcgattaaatgaacctggaacaagtttatcagggggtcaacaacaaagattatgtattgcaagagcgattgctgtaaatcctgaaataattttaatggatgaaccatgttccgctcttgatcctatagcaactgccataattgaagaattgattgatgaattgagactaaactatacaattgttatagtgacacattctatgcagcaagcagcaagggtatcgcaaaaaactagtttttttcacctaggggaattaattgaaacaggtgatacaaaaaaaatatttactaatcctgataattcaaaaacacaagattacataacagggaggtttggttaat

SEQ ID NO: 274742 - DNA, 175 bp, Unknown
  Bacterial polypeptide expressing nucleotide sequence isolated from the Sargasso Sea
catgccaaaaattacggctgaaaatataaacgttttttatgacgaggttcacgctcttaaagatgtttctgtggaaattgagcaaaatgcagttactgcatttattggtccatctggctgcggcaaatctacatttcttcgctgcttaaatcgcatgaatgatacaattgatatt

SEQ ID NO: 274743 - DNA, 796 bp, Unknown
  Bacterial polypeptide expressing nucleotide sequence isolated from the Sargasso Sea
catgaaaaccaataactttgacttagcaaacttgagccagaacgataccgcgctggagatccgcaacttagacctgcgctatggcaataagcaagcgctattcaatgtgtcgatgaagatcccaaagaagcaagttacggcgtttatcggccccagcggttgtggtaaatccaccttattgcgttgcattaaccgcatgaacgatctggtggacaactgccatatcgacggcgagattctgctgcacggtcaaaatatttatgacaaaaagatcgacgttgctgccctgcgccgcaacgtaggtatggtgttccagcgtcctaacccattccctaagtcgatttacgaaaacgtggtttatggtctgcgtctgcagggcattaacaaccgccgtgaactcgacgaagcggccgagcgttcgctacgcggcgcggcgatttgggatgaagtgaaagaccgcctgcacgataacgcctttggcttatccggtggtcagcagcaacgtttggtgattgcccgtgcgattgccatcgagccagaagtattactgctcgacgaacccacttcggcactcgacccgatttcaaccttaaccatcgaagagctgataaccgagcttaagactaagtacacagtggttatcgttacccacaacatgcaacaggcggcgcgggtatcggaccaaacggcctttatgtatatgggcgaattggtggaatacgccgataccaacaccattttcactacaccgaaaaaacgtaagaccgaagattacattaccggccgttacggttaa

SEQ ID NO: 274744 - DNA, 850 bp, Unknown
  Bacterial polypeptide expressing nucleotide sequence isolated from the Sargasso Sea
atgaatatggcagaaagccacctgaatccggtcgaacgcactgcagcgccggccggcacgcaagaagcggcgcacggccgtccgctcgagccgctgaacgcgaagatcgaggtcaacaacctcaacttcttctacaacaagttccatgcgctgaagaacatcaacctgagcattcccgaagggaaggtgacggcgttcatcggcccgtcgggctgcggcaagtcgacgctgctgcgcacgttcaacaagatgttcgcgctctatccggagcagcgcgccgaaggcgaaatcctgatggacggcgagaacctgctgacgacgaagcgcgacatctcgctgctgcgcgcgcggatcggcatggtgttccagaagccgaccccgttcccgatgtcgatctacgacaacatcgcattcggcgtgaagatgttcgagaagcttacgcgctcggaaatggacgatcgcgtcgagtgggcgctcacgaaggccgcgctgtggaacgaagtgaaggacaagctgaaccagagcggctacggcctgtcgggcggccagcagcagcgtctgtgcatcgcgcgcggcatcgcgatccgtccggaagtgttgctgctcgacgaaccgtgctcggcgctcgacccgatctcgacgggccgcatcgaagagctgatcgcggagctgaagagcgactacacggtcgtgatcgtcacgcacaacatgcagcaggccgcacgctgctcggatttcacggcctacatgtacctgggcgagctgatcgaattcggcgagaccgaaaagatcttcatcaagccggtgcgcaaggaaacggaagactacatcaccggccgcttcggctgat

SEQ ID NO: 274745 - DNA, 457 bp, Unknown
  Bacterial polypeptide expressing nucleotide sequence isolated from the Sargasso Sea
aaatgttgcatttggtgcccgtatcaatggctacaaagggaacatggatgagctagttcggtcctcccttgagcaggctgcgctttgggacgaagtgagtgacaagctcagcgagagcggactggcgttatcgggcgggcagcagcaaagactgtgtatagccagggccattgctgtgaggcctgaagtgattttgatggacgagccctgttctgcattggatcctatcgctactcaaaggattgaggacctcatccgagagctgagaaatacatttactatcgtgattgtcacgcacaatatgcagcaggcagcaagggtgtcggataaaacagcgttcatgcttgctggcgaggagcgtattggtaggcttgttgagttcagtcctacgcaggaactgtttactaatccgtcagatagccgcaccgaagactacatcactgggcggtttggataa

SEQ ID NO: 274746 - DNA, 625 bp, Unknown
  Bacterial polypeptide expressing nucleotide sequence isolated from the Sargasso Sea
tttttaagatgcttaaatagaatgaacgatgttattgatatctgcaaagttgaaggagaaatcaaaataaacgattacaatattaatcaaaaaggtactgatgttgttagattgagagaaaaaattggaatggtttttcaaaaacctaatccatttcctaaaactttatatgaaaatatttcttatggacctgaaatccatggtatggctcagtcaaaggatgagcttgatcaaatcgtagaagatagtttaaaaaaggcagctctttggaacgaagttaaagatcgacttaatgaacctggaacaggtttatcaggtggtcagcaacaaagactatgtatagctagagctatttcagtaaaacctgaggtaattttaatggatgaaccatgttcagcattagaccctattgcaacagcacaaatagaggaattaattgatgaactgaaaaaagaacataccattgttattgtaactcactcaatgtcacaagcggcacgtgtatcacaacaaacagggttttttcacttgggtaaattgattgaggttggttctactgataagatatttaagaatcctgaccaacaacaaactcaggattatataacagggaggtttggataat

SEQ ID NO: 274747 - DNA, 410 bp, Unknown
  Bacterial polypeptide expressing nucleotide sequence isolated from the Sargasso Sea
ccgccgtgaactcgacgaagcggccgagcgttcgctacgcggtgcggcgatttgggatgaagtgaaagaccgtctgcacgataacgcctttggcttatccggtggtcagcagcagcgtctggtgattgcccgtgcgattgccatcgagccagaagtattactgctcgacgaaccgacttcggccctcgacccgatttcaaccttaaccatcgaagagctgatcactgagcttaagactaagtacacagtggttatcgtgacccacaacatgcaacaggcggcgcgggtgtcggaccaaacagcctttatgtatatgggcgaattggtggagtacgccgataccaacaccatcttcaccactccgaaaaaacgtaagaccgaagattacattactggccgttacggttaat

SEQ ID NO: 274748 - DNA, 625 bp, Unknown
  Bacterial polypeptide expressing nucleotide sequence isolated from the Sargasso Sea
cttctacgaaccattaacagaatgcatgatttaacaaaaggtgcagaagttacaggcaaaatcatcattgatggagaaaatgtgtacgattcccacatcaatccaattttacaaagaagaaaaattggaatggtgttccaaaaaccaaatccatttccaacaatgtcaatttgggacaatgtagcagcaggactaaagcttaacggcgtaaaaaacaagaatgttttgggtgaaataatagaagattcactaaagatggcatatctttgggatgaggtgaaagatgagttgaaaaaacccgcagttgcattgtcaggaggacagcaacagagactgtgtattgccagagcacttgcaatacagccagaagtattactgatggatgagccagcatcagcactagacccaattgctacgcaaaaaattgaacaaacaattattgaattgaaaaaacattatacaataatcattgttacacataacatgcaacaagcactaagagtttcagatagaaccggtttcatgtatttaggagatttggtagaatatgataaaacagaaacagtattcaaaaatccaaaaaaggaattaacagcaaattatgtacaaggaaggtttggataaa

SEQ ID NO: 274749 - DNA, 660 bp, Unknown
  Bacterial polypeptide expressing nucleotide sequence isolated from the Sargasso Sea
ctttaattggaccatctgggtgtggaaagtctactttcttaagatgcttgaacaggatgaacgacgtcatagaaatttgtagagttgaaggcagtattaaaatggacaacctagaactgaattcaagaaagttagatgttgtgagacttagggagagcgttggtatggtttttcaaaaacccaatcccttccctaaaacaatttatgaaaatgtagcttatggtcctactattcacggtattgcacagagcaaagaagaaatggatcaaatagttgaaacaagtttgaaaaaagctgccttgtggaacgaagttaaagatagacttgatgaaatcggaactggcttatcaggaggtcaacagcaacgactatgtattgctagagctatatctgtaagtccagaagtgattcttatggacgaaccatgttcagcgcttgacccaatagcaacagctcaaattgaagaacttatagatgatcttaaaaaagaggtcacaattgtgatagttacccactcaatgtcacaagcagctagggtatctcaaaaaacaggtttctttcatttgggaaaacttatagaatttggaccaacagataaaatatttaaaaatcctgataatcagcaaactcaggattatattacaggaaggtttggttaat

SEQ ID NO: 274750 - DNA, 940 bp, Unknown
  Bacterial polypeptide expressing nucleotide sequence isolated from the Sargasso Sea
ttgtacaaatgttttatatgcacctttatgtctaaaaatccagaattcgtaaaatttgataaagtagataaaagttatgacggtaaagttcttgtcgttaaagatcttcaattagatattgctgaaggtgagtttataacaatgcttggtccatctggttcaggcaaaacaacatgcttaatgatgttagctggatttgaaacaccaacacatggggaaattttattagatggaaacataatttcgaatattcctccacataaaagaggtataggaatggttttccaaaactatgcattgttcccacatatgactgtttatgaaaatttagcttttcctttgagagtaagaaaagttgaaaaagatgaaattgataaaaaagttgataaagcattgtcgatggtttctttaaatggttttgaaactagaatgccagctcaactttcaggtggtcaacaacaaagggttgctgttgcaagagctttagtatttgatccagcagtcgtattaatggatgaacctctaggagcattagataaaaatttaagagaaagtatgcaatatgaaatcaaacatattcatgaaagtattggtgtaacagttgtatatgtaactcatgatcaaagtgaggcattaactatgtcaaataggattgcagtatttaatgatggaaaggttcaacaactttcaaatccagctgaactttatgagaagccagtaaattcttttgtcgctgagtttattggggaaaacaatactttcaatggtgaagttgtagatatcgataaagacaaatgcaaagttaaattagcaaattcagaaatactagccaatccaatttccgtaaagtctaaaggtgagaaaacaactgtttctttaagacctgaaagggcattaattaatccaactgacaagatggataatatgtttaccggaaaga

SEQ ID NO: 274751 - DNA, 730 bp, Unknown
  Bacterial polypeptide expressing nucleotide sequence isolated from the Sargasso Sea
tatggcggtcgttcgtacgcagcaggtaaagaaggtttatgagatgggtgacttcaaactcgaagcactcaagggagttgacctcgaggtggagcagggcgagtatctctcgattatgggtccgtcagggtcagggaagagcaccctgttcaacatgatcggtggcttggacaagccctcagacgggaaggtctacatcgatgatgtagacgttgctcaactagatgcctatgaactcgcttggttgcgatgtcggaagatcgggtacatcttccagtccttcaacttgattccggtgatgacggcgcttgaaaacgttacactaccaatggttttcgcaggtctgacgagcgatgaagcccgcgacaaaggtgtggatttgctgactaaagtgggactggaagagcggatttcacacaagccctacgagctttccggcgggcagcaacagcgtgtggcggttgctcgtgctttcgcgaacgatccggcgataatcctagcagacgagccgacggggaacctcgatctgcacacgggtacggagatcatcgagttgctccggctaatgaacaaggaatctggggttacggtgatttcggccacgcacgatcacaagatgctgagtgtttcggaccgtgtggtatgggttcgagacgggatcgtcgaccgcatcattaaccgggcagacctgaagattgaggtcggtacgatcgacggtgaagctgaataa

SEQ ID NO: 274752 - DNA, 634 bp, Unknown
  Bacterial polypeptide expressing nucleotide sequence isolated from the Sargasso Sea
tagacaagtgcaagttttaaaaaatttaaattttacaattaaaaaaggcgaattaattgcactcacaggaccttctggttcaggtaagtctactttattacatttaatagctttgatggaaaaacctacatatggtaaaatatttttttctgataaaaatttaaataatttaagcagtagagaaataaacaaaattagaaaatataatatttctttaatatttcaaaataataaccttatttcagatctaaatgtaattgaaaatgtcatgcttccgctattaattagaaatgaggataaaaaaaaaagttatgaaaaatcaaaaaaaattctctctttagttaatctttctaatagattagatttttttccaggcgatttatcgggaggagaacaacaaagagttgcaatagcaagatctctaatagctgaaactgacttaattttagctgatgaaccaacaggtaatttagattttaaaacttcaaaggaaatatttaattatttcttaaaattaaaaaaaatgaataaaacaattttatttgcaactcataatagagaacttgctaacaaagctgattataagttgagtattttcaatggtaatataaaaagagtaaatggaaagaaatga

SEQ ID NO: 274753 - DNA, 529 bp, Unknown
  Bacterial polypeptide expressing nucleotide sequence isolated from the Sargasso Sea
aaagacaagcttaataatgctgataggtggtttggaaaaagcatcttcaggaaaaatcgaatttaaagactttgagatttcgagtttaaaagaggatgagatttcagagataagacgaaaggatattggcattgtttttcaatcattttatttaattcccaattatacagctatagaaaatgtgagtttagcattagaaattaataaaattaaagatccgattaataaagcaaaagaaatcctagataaatttggccttggaaagaggctaaataatttaccaagtcaattatctggaggagaacagcaaagagtagcaattgcacgatcaattgttatgaagcctgaattaattttagcagatgaacctactggaaatttagatagtgaaaattctgagctaatctcaaatattctttttgattatgtaaaagaagaaaatgcaagtttaattatggttacgcacgataataaattggcaaatctttctaagagaattattaaaattaaggatggtaaaattgaataa

SEQ ID NO: 274754 - DNA, 374 bp, Unknown
  Bacterial polypeptide expressing nucleotide sequence isolated from the Sargasso Sea
tatgaaaaatgtagcaatccctttattaattagaggcaatgatcatagttcatctataaaaaaagcagcaaagattctatcaagagttaatttgggacatagacttgatcatttcccatctgatttgtctggcggcgaacaacaaagagttgcaattgctagatctctggcatctgacacaagcattattttagctgatgaacccactggaaatttagatgaaaaaacatcagaagaagtattttcttattttcttaaattaaaacagaaaaacaaaactattttaattgcaactcataatagagaacttgctagaaaggcggattatactttaagactgactgatggtaatataaaaagagtgaatgcataat

SEQ ID NO: 274755 - DNA, 637 bp, Unknown
  Bacterial polypeptide expressing nucleotide sequence isolated from the Sargasso Sea
taactataaaatagataacaaatctataaatattttaaaaaatataagttttgagattgattacaaggaaactatatcaatagttggagagagcggttctggtaaaacaagtttaataatgttaattggaggccttgaacaggcatcttctggaaaaattttttttaaagatttggaagtttccagcatgagcgaagatgagatttcagaaattagaagaaaggatattggaatagtctttcagtctttttacttaataccaaactatacagcccttgaaaatgtgagtttagctctggaaataaacaaactagacaatccaattaaaaaagctaaagaagttttagatagatttggtttaagtaatagatttaataatttacctagtcagctctcaggaggtgagcaacagagagtagctattgcaagatctgttgtaatgaaaccagagcttattttagcagatgagccaactgggaatttagatagtgaaaatacagagactatctctcaacttctttttaattatgtaaaagatgaaaatgccagcttaataatggtaactcacgacaataatttagcaaatttaactaaaagaaaaattagtattaaggatggaataattaatgaaaattaa

SEQ ID NO: 274756 - DNA, 728 bp, Unknown
  Bacterial polypeptide expressing nucleotide sequence isolated from the Sargasso Sea
gctgtccgaacataatgataatccggctgtacgcttatcgaacttagatttttgctgggggtcaacgaaaaacgatttccaaataaaaattaaagattttcaacttaaaaaaaatgaaagtgggattcttgtaggtccatccggttcaggaaaatcaactttgcttagcctgctttgtggcatactgaggcctcaaaaaggaactactcaaatattgggtgagaatattgaaagtatttctaattcggaaagagaccgttttcgatcagatcatatgggaattatatttcaacaattcaatctggtgccttatctatcagcaattgataatgtccttctacctttgtatttctcacctgctcgtagacaagccgctggcaaaatacaatctaaaatcaattccgaggcgaaacaacttttagatacactgggtattgctagtaaaacattaggaacccaaaaagcagttacgttatcaattggtcaacagcaacgtgttgctgctgctcgggcattcatcggatctcctgaacttattattgcggatgaaccaacctcctcattggatgaagaaaaccagaatgagtttctaaatcaactgtttaaacaaaaagagcaaactggtgcttcgcttctaatggtaagtcacaatacacatattgctaaaagatttgatcgactaattgaaattgaaaaaataagcgatatctctgtagaaaaggaaaaaa

SEQ ID NO: 274757 - DNA, 694 bp, Unknown
  Bacterial polypeptide expressing nucleotide sequence isolated from the Sargasso Sea
tatgaataaaatactttcaaattatttggaattattcgatgtaagttatcattataaaaacaaactagaaaacgttaaaatctttaaaaatttaaatttaacaatttatcctggagaaatggtggctttgttaggtccaagtggatcagggaaatcaacacttttaaattgtattgggttattagataaatttgtttcaggtaaatttaaaattttaaataaagattattcttcattgactgagagtgaaattacaaatattcggctaaatgatataggctttgtatttcaaaatcatagactttttcaagagttttctgcacttgaaaatattatcattccatctttgataaaaaaaatttcttttgatgaagcaaaaaaaaaggctacacaaattttaacttatttaaatctagaacataggattaatcataggccagctaaattatcgggtggtgagtctcaaagggttgctattggaagagctttatcaaataatccaaaatttatattggctgatgaaccaactggaaacttagataaagataatacgttattaattttcaatattttaaagaaaattactttagatacagaaaaaagctgtattatagcaacccataataattttttagcggaaaagatggatagaatatttttaattgaaaaccaaaatattaaaattttaaaataa

SEQ ID NO: 274758 - DNA, 478 bp, Unknown
  Bacterial polypeptide expressing nucleotide sequence isolated from the Sargasso Sea
gctgtccgagcaaaatgataaaccagctatacgcctatcaaaaatagatttttgctggggatctgtaagctatgattttcgaataagggttaaagattttcagcttaaaaaaaacgaaagcgggattctggttggcccctccggtgcagggaaatcaactttgctcagtctaatttgtggaatcttgaggccacaaaaaggtattacccaaatactgggagagaatattgaaagcatgcccgattcacagaaagaccgttttcgggcagaccatatgggaattattttccaacaatttaatttagtaccttacctatcagcaattgataatgtacttctccccttgtatttttcacccgaccgtagagaagcatccggcgaaatacaatccaaaaccaatgacgaggcaaagcgattgcttgatgcgctaggtattgctagcaaaacacttgggatgcagaaagctgctacattatca

SEQ ID NO: 274759 - DNA, 613 bp, Unknown
  Bacterial polypeptide expressing nucleotide sequence isolated from the Sargasso Sea
atgactaaaaatttaatagaattaaaaaatatttctaaaacttttctaagtggagaaaaaagaattgatttatttagtaatgtaaatttaaaaattaaaaatggagatcttattgccctagttggtccatctggatcgggcaagtcaacttttttacacatgatggcattacttgaggaaccaaacgtagggaaaatcttactatctgaaaaagatataggtaaaatgtctgagagtgaaaaagatttagttagacgagataagatttcaattatttttcaaaataataacttactcaatgattttacagcacttgaaaacgtattaatgcctctttacatcaaaggtgagattaatccgggaactagggataaaggtctcaaaatgctcacagatgttaaactaaataagagagctaatcattttcccagtgaactttctggtggtgagcaacagagggtagcaatagcaagatcaataatttcagatactgatttaatcttagcagatgagccaactggaaatttagataggaaaacttcaaaaaatgttttcaattactttaaaaaacttcagaaaaaaaacaaagcagttttgtttgcaacccaataat

SEQ ID NO: 274760 - DNA, 514 bp, Unknown
  Bacterial polypeptide expressing nucleotide sequence isolated from the Sargasso Sea
gagccaaacaaaggaaaaatttatttatctgatattgacacgggagatatgacagaaagtgagaaagataatgtcagaagagaaaaaatttcaattatttttcaaaataataatttacttaacgattttacagcattagaaaatgtattaatgcctctttatattaaaggtaatatcaatcaaaataccagagagaaaggtcttaagattctcacagatgttaaacttaataatagagcaaatcattttcccagtgaattgtcaggtggtgagcaacagagggttgcaatagctaggtccataatttcagataccaacttaattttagctgatgaaccaactgggaacctagacagaaaaacttcaaaaaatgtttttaattactttaaaaatcttcaaaaaaaaaacaaagctattttgtttgcaactcataatagagaacttgctaacatggcagattataagttgagtatttctaattctaagttattaagaagtaatggaaaaaaatgaa

SEQ ID NO: 274761 - DNA, 685 bp, Unknown
  Bacterial polypeptide expressing nucleotide sequence isolated from the Sargasso Sea
tatgaataatctaattaaaatttctaaattaaataaatctttcgaaggtataaaaaagattaatgtcttaaaaagtatttcttataattttaaaaaaggtaaaatttattccttgatgggcccatcaggttcaggtaagtcaacattattaaatttgttatctttaattgatagacctacttcaggttcaattacatttgaaaataaaaagataaattacaatgattccaataaaaatgatgttttaagaggtaataaaattgggattatttatcaacaagataatttattgccagattttacttcattggaaaatatttatttagctgctttagctggtggtaatgatgagaaagttgcagttaataaggcaaaaaatttattaaaaaaggttgggctgactaatagatcagatcattatccctcacaattatctggtggtgaaaaacagaggatttctattgcaagagcggttgtcaataatcctcaagtaattttagctgatgagccaactggaagtttagatttacaaacagcaaaagaaatttttggacttttaaaaaatcagataaataaagaaagattaataatatttgcaactcataatagattttttgctaataaggctgattgcttattggaaataactaatggtaatataaaaaccattaatgcacgaatctaa

SEQ ID NO: 274762 - DNA, 507 bp, Unknown
  Bacterial polypeptide expressing nucleotide sequence isolated from the Sargasso Sea
aaagtatggccaatgcaaagagagaccgttttcgagcagaccatatgggaattatatttcaacaattcaatttagtttcttatctgtcagcaattgataatgtccttctacctttgtatttttctcctactcgaagacaggcatctggaaaaatacaatctaaaattagagctgaggctagacgactgctagatacgctaggtattaccagtaaaacactggggacccagaaagctgctacattatcaattggtcaacaacaacgtgttgctgctgctcgagcattcattggttctcctgaaattataattgctgacgagccaacctcctcattagatgaagaaaaccagagtgaatttctagaacaactattcaaacaaaaggatgcaactggcgcctctcttctaatggtaagtcacaataaaaatatttctaaaaaatttgatcggctaattgagcttgaaaaaatctgtgatatctcagtaaggaaggaaaaagccaaatgat

SEQ ID NO: 274763 - DNA, 682 bp, Unknown
  Bacterial polypeptide expressing nucleotide sequence isolated from the Sargasso Sea
tatgaataatttaatagaattaaaaaatatatctaaacattattttactaataaaaaaaattttgtattaaagaaaataaattataaatttaaaaaaggattaatatattcattggtcggtccttcgggttcgggcaaatctactttacttaatcttatatctcttattgataaaccttcttcgggtgaaattttaatagataaaaaagctattgtttacaaaaataaatcagaaaacgatattattagggctagtaaaattggaatagtttatcaacaaaataatttattaaatgactttacagccttagaaaatgtttgtttagcaagtttagctataaataatgataagcaaaaggctttattagaatctataaaaattatacaaagcttaggtctttcaaaacgtaaaaaccactttccatctgaactatctgtgggagaaatgcaaagaattgcaatatctagagcattagtgaataaaccagaaataattttagctgatgaaccaacaggaagcttggatcattctacagcaacggaagtttttaaaattttgtataaacttaaaaataaaaatagaacaataatttatgcaacccataatagattatttgctaatatggcagattgtaaattggaaatgattgatggtaatattaaaccatcaaatgttagaaaa

SEQ ID NO: 274764 - DNA, 685 bp, Unknown
  Bacterial polypeptide expressing nucleotide sequence isolated from the Sargasso Sea
atgagtaatgacttaataaaaataaaaaaattaagtaaaatttttaaaaataacaatacaaacattaaagttttaacaaatgttaatttaaatttaccaaaaggaaaattaattgctttaactggaccatctggatcaggaaaatcgacttttctacatttaatcgcactattagacactcctactacaggtcaaattgttatatcaggaaaaaaaactgaaaatttaactgaaatagaaaaaaatttaattgtaagaaataatatttcaattatttttcaaaataataacttattatcagattttacagctatagaaaatgttgcaattcctttaataattaaaagtaacgattacaaatcttcattatctaaagctaaaaaaattttatcaaaagtgaatttatcacacagattaaatcatttacccttggatctatctggtggtgaacaacaaagggttgcaattgcaagatctttagcggctgacacagatattattctcgctgatgaacccacaggaaatttagattcaaaaacaactgatgaggtattttcttatttccttaaaatgaaacaaaaaaacaaaactattttaattgcaactcataatagagaattagcaagaaaagctgattatactttaagagtgagcaatggtgttataaaaagaactaatgagtaac

SEQ ID NO: 274765 - DNA, 622 bp, Unknown
  Bacterial polypeptide expressing nucleotide sequence isolated from the Sargasso Sea
tatgtcgttaatacaacttgatggcgtctcacgccgctacaaaacggaaggctttgaagtcaccgcattagacaatgtttcgttatcaatcgataagggggaattcgtagctattatggggcaatcggggtcgggtaagtcgaccttgatgaatatcctagggtgtttagacaccccttcagaaggggagtaccgtattcacgggcagtcagtgtcttcgttaaacccagaccagctttcagctcttcgcttgaaaacgtttgggtttgttttccagcgctatcaactactgtcgtcgctaaatgccactgaaaacgtggcgctgccagcaatatacagcggtacgcctagtgaagagcgtactcaaaaagcgcaacagttgcttgataaacttgggcttgcaagcagaaaagagcacaagcccggagagctttctggtggccaacaacagcgtgtctcggtagcccgcgccttaattaacggtgcagaagtaatattagccgacgagcccactggtgcccttgactcggcgagtggagagcagttactggcactgcttcgcgagcttcacgcagaaggggtgactattattcttatcacccacgatagtgcggtcgctgaa

SEQ ID NO: 274766 - DNA, 308 bp, Unknown
  Bacterial polypeptide expressing nucleotide sequence isolated from the Sargasso Sea
ttctaaaaaaagtgataagaatagaattaaatctttattagaaagtttaggaatagaggacaaagcaaacaaaaaaacacagaatctaagccaaggtgaaaagcaaagagtttcaatagcattagcaattgttaattcacccaaattaattttggctgatgaaccaacttccagccttgatgatttgaactgtgacaaagtaataaatattttaaaaaatcaagcctctaaatacaaggcaaaattaatcatcattacacatgattataggctgaaaaaacattttaaaaatactttatcattatgaa

SEQ ID NO: 274767 - DNA, 268 bp, Unknown
  Bacterial polypeptide expressing nucleotide sequence isolated from the Sargasso Sea
aatcacttgccatctgatttatcaggcggcgaacaacaaagagttgcaatagctagatctttggcttcagatacaagtattattttagcagatgaacctactggtaatttagatgaaaaaacctcagcagaagtattttcatattttcttaaattaaaaaagaaaaacaaaacaattttaattgcaactcataatagagaacttgcaaaaaaagcggattatactttaagaataaggaatggtaatataataagagtaaatggttaat

SEQ ID NO: 274768 - DNA, 895 bp, Unknown
  Bacterial polypeptide expressing nucleotide sequence isolated from the Sargasso Sea
tatgtcgttaatacagcttaatggcgtatcacgtcgctacaaaacagaagggtttgaagtcaccgcattggataacgtttcgttatcaatcgataagggtgaatttgtcgccattatggggcaatccgggtcaggaaagtcgaccttgatgaatatcctaggatgtttagacaccccttcagaaggggtgtaccgtatccacggacagtcagtatcctcgctaaatcccgatcaactttctgcccttcgcttgaaaacgttcgggtttgttttccaacgctatcagctactgtcgtcgctaaatgcgactgaaaatgtggcactgccagcaatatacagcggtacgtctagcgaagatcgcactcaaaaagcgcaacagctgctcgataaacttggcctttcaagcagaaaagagcacaaacccggagagctttcaggtggccaacaacagcgtgtctcggtagcgcgagccttaattaatggtgcagaagtaatattagccgacgagcccaccggggcgcttgactcggccagcggagagcagttactggcgctgcttcgagagcttcacgcagaaggggtgactattattcttatcacccacgatagtgcagttgctgaacatgccgacaggcaaatacacttgcttgatgggaaaattgtaacagataccaaaaccgctgcgcctagcacaagtgaatcagttgaaaaaaatgcggcttcagtgcagcacgcactttctcaagagcccaaatcagtaccggtaattaaaccttttccaagtatctcacttttttcagccctatctatggcgttcactgctcttagaatgaattggtttagaaccttgctcacactcttgggaattattattggagtagcggcagtggtggcc

SEQ ID NO: 274769 - DNA, 562 bp, Unknown
  Bacterial polypeptide expressing nucleotide sequence isolated from the Sargasso Sea
catgaacaaacttctcgaaattaaaaatttaagtttatcttataagataaataataagtcattacaaatacttaaaaatgtaaatattgatctaaattataaagaatcaatttcagtcattggagaaagtggctcaggtaaaactagtttaattatgttaatagctggtttagaaaaatttaatactggagaattaatttttgatggcaataactttaaaaacttaaatgaagacgaactttcagatattagaagaaaaaatattggtataatttttcaatctttttttcttttgcccaattttacagcattagaaaatgtaaatttaacgttagaaattaacaacataaataatggtttaaataaatccaaagaaattttagataagataggtttgaaacatcgatttaatcattatccaagtcaactctctggaggtgagcaacaaagagttgctatagctagatcattagttatgaacccaaagttaatattagctgacgagcctacagataatcttgataaagtaaattcatcattaatttcaggtatcttatttgat

SEQ ID NO: 274770 - DNA, 339 bp, Unknown
  Bacterial polypeptide expressing nucleotide sequence isolated from the Sargasso Sea
tgggctggctgagattgcattgcaaagggctgagagcctgtcaggcggtcagcaacaacgggttgcaatttgtcgtgcgatgatgcagaccccaaaacttattcttgccgatgagccaattgcatctcttgatccgctcaatgctcgtctcgccatggaagctttgaagcggatacaagtagaagaaaaaatcacagtcatttgcaatcttcacactttggatactgcaaagcactactgttcccgcatcattggtatgcaaaatggcgacatcgtgtttgacggaacgccgaagtctctcacagatgaaaaagcccgcgaaatttatggtgctgaagc

SEQ ID NO: 274771 - DNA, 610 bp, Unknown
  Bacterial polypeptide expressing nucleotide sequence isolated from the Sargasso Sea
aatgattttagaggcgaaaaatttatggaagtcttttgataatggtaaaagtaccttaactgtccttaaaggtttgtcgcttgaagttcaagagggtgagcttgttacaattatgggacagtcaggaacagggaaatctaccttgttaaatattttggggacacttgacaattccgatagcggagaattaaaaataagtcgcaatgacataaatgggtacaataaaaatcaattgagcagacttcgaaatagagaaattggatttgtattccaatcccatcatcttcttccagattttactgccattgaaaatattttaatgccaagttggattttgaacaaaaaaggtgcaagatttcactttgctaatgaattattagaaagggtaggccttttagaaagaaaagataatttcccaagccagctatctggtggggaaaaagcaagagttgctcttgtaagagctctcattaataaaccacgattaatattagcggatgagccaacgggtaatctagatcaaaaaaatgctttaaaactgattgatcttttaatagaaataaatgaaaattacaggcaatctatagtgctaactacgcataatcctgag

SEQ ID NO: 274772 - DNA, 517 bp, Unknown
  Bacterial polypeptide expressing nucleotide sequence isolated from the Sargasso Sea
aatgactctactagcagaaaaaataacaaaatcattttcaagtagcggagaaagattttatgtgtttcaaaatcttaccataagcattgaaagtaaggagcttgtaacaatagttggtccaagcggttctggaaaatctactctacttaatattcttggaacactggataagtgtgatgacggttctttatacttaaatggtattgatattagcaaaatggacagcaatcagatggctagggctcgtaatgagctcatagggtttgtttttcagtttcatcatttaattcctgagctttcagccttggaaaatgttttattgccgcaacttattctttctggaatcgataatcccagcagggcaaaagagttgctaagttttttaggtcttagcgaaaggataaatcatttcccatctcagctatccggtggcgaaagatcaagagtctcaatcgctagagctctaataaataggccaaagataattctggcagatgaacccagtggtaatttagat

SEQ ID NO: 274773 - DNA, 496 bp, Unknown
  Bacterial polypeptide expressing nucleotide sequence isolated from the Sargasso Sea
ggcgccctggtgcccatgcttagcgtgttccacaacatctacatgggcgccctgtcacgcaatagcactctcactaatctgcgaaatctgattgctcctagtcgccatgagcgtgaacaaattggcgccttggccaccgatctgtctctgcacgacaaactgttcaccagtatcgaccagctctccggcggccaggcgcaacgcgccgcactgggccgggcgctctatacccaacgcccgattctactggccgatgaaccggtatccagcctggacgaacatcaaggccttgccttgctgaccctgtcgctggcccgccatgacagtgccgtaatcgccctgcacgatcgagcgctggcgctggcctgcagcgatagaatcattggcctaaaccacggcaaagtcgtactcgatgccgccacccattcgctgtcactcagcgatctggatgcgttatatcaggacgcttcataccaacaccgctcgtatcagtgaa

SEQ ID NO: 274774 - DNA, 388 bp, Unknown
  Bacterial polypeptide expressing nucleotide sequence isolated from the Sargasso Sea
tctgactttacttctttagaaaatgtagcaattccgttaataattaggggtaacgattataattcttcacttaaaaaagcaggaaagattttatcaagtgttaatttaggtcatagacttaatcatttcccatcggatttgtccggcggtgaacaacaaagagttgcaatcgctaggtctttagcatctgatacaagcattattttagctgacgaacctacaggaaatttagatgagaaaacctcagaagaagtattctcttattttcttaaactaaaaaagaaaaacaaaactattttgattgcaactcataatagagaactggctaaaaaggcggattatactttaagactgagcaatggtaatataaaaagagcaaatgtctaat

SEQ ID NO: 274775 - DNA, 562 bp, Unknown
  Bacterial polypeptide expressing nucleotide sequence isolated from the Sargasso Sea
ccatctggttcgggaaaatcgactttgctgcatttgctcgctttgttagataaacctactgctggaaaaattactatattaggtgagccaacacaaaatataactgaaaataaaagaaaccaactaattagaaattacatatcaataattttccaaaacaataatttacttctggattttactgctgtcgaaaatgttgcgatgccattaataataagaaacaaaaattacaacagttcaataaaagaagcagaaagttacttaaaaaaagttaatttaggtcatagacttaaccattttccatctgatttgtcaggaggagaacaacaaagagttgcaatagcaaggtcgttaatttcagatacaaaaattattctagcagacgaaccaactggtaatcttgacaataaaaattcttctgaagttttatcttattttttaaaattaaaacaaaaaaataaaatagttttaattgcaacccataatagagaaattgcaaaaaaagccgattatactttaagcataagggatggtattataaaaacatcaaatgcaaaatgaa

SEQ ID NO: 274776 - DNA, 646 bp, Unknown
  Bacterial polypeptide expressing nucleotide sequence isolated from the Sargasso Sea
tatgaataatcttatccaattatcaaatttaaataaatcatttgaaggatcaaaaaagataagtgttttaaaaaaaatttcttacaattttaagaaaggtaagatttatgctttaatgggtccctctggatctggtaaatccactttattaaatctactttctttaattgataggccaaattcaggaacaattaaatttgaaaacaatttaatcaattttagtaaatcaaacgataatgatattttaagagctaataaaataggcattgtctatcaacaagataacttgttacctgactttacttcattagaaaatatttatttagctagtcttgcggctggaaacaataaaaagatttctttattaaaagcaaaaaatttgcttaaaaaagtaggtctattgaatagatcagatcattatccttcacaattatcaggtggagagaaacaaagagtttcaattgctagagctgtgataaacgatccccaaataattttggcagatgaaccaacaggcagtttagatcttgagactgcaaaagaaatttttgaacttctaaaaaatcaaataaattcaaatcgattgattatatttgcaacccataatagattttttgcaataaggcagattgcttattggaaatag

SEQ ID NO: 274777 - DNA, 409 bp, Unknown
  Bacterial polypeptide expressing nucleotide sequence isolated from the Sargasso Sea
ggagtagtatttcaagaggattatttattatcagagtttacagctattgaaaatataatgttaccttatatcatcgctggaaattcaagaaaaaaatcttataacaaggcacattccttgctagaaaaatttaatttattatctataaaaaacacttaccccaacactttatcaggtggagagaagcaaagagtttcaattttgcgtgcaataattaacaatccaaaacttattttagcagatgagccaacaggtagtattgatgaatttaataaagaaaagattttttctttatttcaagatataacaagcgagtataattcatctattctaattgcaacacatgataataatgtttcaaaaatatcaaataaaatacttaacttgtcgaaaggtaaaataaagtaat

SEQ ID NO: 274778 - DNA, 558 bp, Unknown
  Bacterial polypeptide expressing nucleotide sequence isolated from the Sargasso Sea
gttcgggtaaatctactttattacacttaatagctttaatggaaaaaccatcaacaggaaaaattttttttactgataaaaatcttaataatttaaacattaaagaaataaacaaaattagaaaatataatatttctttaatatttcaaaataacaaccttatttctgatcttaatgtaattgaaaatgttatgcttccactattgattagaaatgaaaataaaaaaaaaagctacgataaatcaaaaaaaattctttctttagttaatctttcgaacagattagatttttttccaagtgatttatctggaggtgaacaacaaagagttgcaatagcaagatctctaatagctgaaacagacttaattttagctgatgaacccacaggcaatttagattttaaaacttctaacgaaatatttaattatttcttaaaattaaaaaaaatgaataaaacaattttatttgcaactcataatagagaacttgctaacaaagctgattataagttgagtatttcaaatggtaatataaaaagagtaaatggaaaaaaatgaa

SEQ ID NO: 274779 - DNA, 333 bp, Unknown
  Bacterial polypeptide expressing nucleotide sequence isolated from the Sargasso Sea
atcacaggaattcattttctaaagcaaaaaagatactaaatgcagtaaaacttcaagatagatctaatcattttccaaatgagttatctggaggcgaacaacaaagagttgcaatagctagatctttaattgcagaaacaaatttaattttagctgatgaaccgacaggaaacttggattataaaacttcacttgatattttttcttactttttaaaattgaaaaaattaaataaggcagtaatttttgcaactcataatagagaacttgctaacaaagctgattataagttgagtatttctaatggtaatataaaaagattgagtggctgaa

SEQ ID NO: 274780 - DNA, 403 bp, Unknown
  Bacterial polypeptide expressing nucleotide sequence isolated from the Sargasso Sea
caggattatcatcttttaaatgatcgaaatgtttttcataatgtagctttaccattgcacgtaatgggttgcagcgctaatgaaattccttatagggtagatgaagctcttgagcttgtgggctttgaaggaaaaagagatcattatcccaatgagctgtctggcggagaaaaacaaagagtaactttagcgagagctatagtgaaagagccagatcttatattggctgatgagcctacaggcaacttagatcctgtagccgcttttgagctggtacagttgttagatactataaataataatgggacaacaatattaatggcctcacataattataatttgatcaaagggcgtggaagaagaatactcgagctaaaagatggagccataaggggaagttaat

SEQ ID NO: 274781 - DNA, 463 bp, Unknown
  Bacterial polypeptide expressing nucleotide sequence isolated from the Sargasso Sea
tcggagttagaacagaataaatttagacaatcaaaagtttcaataatctttcaaaataataatttattatcagattttacatctttagaaaatataatgttgcctctgctaattagaggggagaaatcttcaagttcaattttagaggccaaaaaaatcttaaaggttgtcaatttatcggaaagagctactcattttccttcgcaattatctggaggtgaacaacaaagagtcgctatagctagatctcttataacaaaatcagatttaatattagcagacgaaccaacaggaaatttagatcataatacttctttagaaattttttcttattttcaaaaacttaaaaaattaaataaaaccattttatttgcaactcacaatagagaacttgctaacagagcggattataagttgagtattttaaatggtggtataaaaagaattaatgtcacaaaatgat

SEQ ID NO: 274782 - DNA, 924 bp, Unknown
  Bacterial polypeptide expressing nucleotide sequence isolated from the Sargasso Sea
tctggatgaaggtaatgctggtccctttggtatcgacataggtttcaaaccacccacaggagttggtctaagcattgatgcaccaccggtaaaaggaggcgggttccttaattacgatgaatctacatctacatatacaggcggcatagaactacaattctccaaaatatctttctctgcaatcggtattatcagcacaaaactacccggaggtgaaaaaggttattccttactagttatcatatcggttgagttcacacctttgcaaatcggtatgggctttaccatcaacggcataggtgggcttttaggactacacagaacttccaatccagatgcattacgtacaggaatccgttacaataccctcgaccatatcctttttccaaaaaatatcgtcgagaatgccaacaccatcatcagtaacctggggcaggcatttcctgctcgcaaagaccagtttatgattggaccaatggcaaagatcggttggggaacaccaacacttcttactattgatattggcataatcattgagctgcccgatcctgtgcgcctgatcattcttggaatattacgtgcacaattaccgaacgccgataatgtcattctgcaactacaggtaaatttcttgggaattttagacttcaaagaaaaatacctttcattcgatgctaccttatacgattctaagatactgacctttggtttgtttggcgatatggcgttacgcttacattggggtgaccgtccaaactttttactttcagtcggaggatttcatccatcatacacaccgccgccgcttaaatctgcgtcgatgcagcgtctgacccttattctggcagatgaaccacaattaaagatatccgtggaaatctattttgcagtaacatccaattctgcacaattccggagcacgcg

SEQ ID NO: 274783 - DNA, 505 bp, Unknown
  Bacterial polypeptide expressing nucleotide sequence isolated from the Sargasso Sea
catgagtgccgccaacgcccgattgcacgatctggcccctgcgcccagccacgccgaacagactgaactgcacccggacttgaaccgcgcccatgtgcggttcatcaacctgggcaaaacctatgacggcacggtgcacgcgctgcagggcattgacctggcgatccagcgtggcgaagtgttcggcatcatcggccgcagcggggccggcaagtcatcgctgatccgcaccataaaccgcctggaacaacccagcagcgggcgtgtgctgatcgaccaggtggacatcggcagcttcgatgaagaccacctggtggcgctgcggcgacgcatcggcatgatcttccagcacttcaacctgatgtcggccaagaccgtgtggcagaacgtcgagttgccgctcaaggtcgccggtgtgccccaggcacaacgcgcgcgaaaggtgcatgaactgctggagctggtaggcctgcaggacaaacacaaggcgtacccggcgcagctg

SEQ ID NO: 274784 - DNA, 492 bp, Unknown
  Bacterial polypeptide expressing nucleotide sequence isolated from the Sargasso Sea
aatatggaaataaacaaattgattttaataattacaactataatgatattttaagagccaataaaattggaattatatatcagcaagataatctacttccagatttcacagctttagaaaatgtatatttggcaaatttagcaattgaaaagaataaagaagtttctgtaataaaatcaaaacaattattgagaaaagttggtttatcaaatcgaatttaccactatccttcagaactttctggaggtgaaaaacaaagagtatcgatagctagggctttaattaacaatccacaagttatcttagctgatgagccaactggaagtttagatctagtaacagcaaaaaatgtttttgatcttttaaaaaagcaaataaatgcaaaccgacttattatctttgcaactcataatagattttttgctaaaaagtcagattgcatgttggaaatagttaatggtaatataaaatccattaatgcgagagtctaat

SEQ ID NO: 274785 - DNA, 640 bp, Unknown
  Bacterial polypeptide expressing nucleotide sequence isolated from the Sargasso Sea
tatgagtaagtatttagtagaagtaaaaaatttaaaaaaagattttgaacataaaaatggtaagattaaaatctttcatgatgttaatttaggtataaaaccaggagagttagtagcgctagtagggccctcaggctcaggaaaatcttcttttttacatttgctttctcttcttgataagcctactgccggtaaaatatattttttaggaaaagactctaaaaatttcagtgaaaatcggaaagatgaaattagaagaagaaacatatctttaatatttcaagacaataatttactttctgattttaccacaatcgaaaatgtattgatgccattgattattagaggtgaaagctataagagctctcacaataaagctaaaaatattctaagaagagttaatctattagaaagaagaaaccattttccaagtgaactatctgggggagaacaacaaagagttgcaattgctaggtcaataatagctgaaacagatcttatattagcagatgagcctactggaaatttagactttaaaacttcacaagatattttttcatattttcttaaattaaaaaaattaaaaaaagcagttatatttgcaactcataatagagagcttgcgaaaaaagcagattac

SEQ ID NO: 274786 - DNA, 495 bp, Unknown
  Bacterial polypeptide expressing nucleotide sequence isolated from the Sargasso Sea
tccaacagcaattcgacctggtctctcacttaagtgttatacataatgtgaatgcaggaagattaggtgagtggggtttctttaagagtctattctcattaattaatcccataggaaaatctgaggttgttgatgctctagagtcagttggcattgaacctaagctttatcagagaacctcgactctttcaggtggtgaacaacaaagggtagctgttgctagagtattgatccaagatcctcaaattgtattggcagatgaacccgttgcttccttagatccgtatagatctgaagaattgatcaagctactagtagatttaactatcaaaagagataaaacattcatcgcaagcttgcataaactagaactggttagagaatactttactcgggtaattgggttacgagaagggcatgtgacttttgatgtccctgttagcaaattgaatgagaaaatgatcgcgcaattatactctttggatgcaagctaaa

SEQ ID NO: 274787 - DNA, 553 bp, Unknown
  Bacterial polypeptide expressing nucleotide sequence isolated from the Sargasso Sea
tggatctggaaaatcatctttcttacatttactttcgttattagacaaaccttcctctggaaaaatattatttttaggagaagatacaaaaaattttggagaaaataaaaaagatcaaattaggaaaagaaatatttcaataatatttcaagacaataatttactatccgattttactacaattgaaaatgttataatgccacttattattaggggtgaaaactataaaagttctttaaagaaagcagaaaatattttaaagcaggttaaccttttagagagatcaaatcattttccaagtgagctatccggaggagaacaacaaagagttgcaatcgctaggtcaattattgctgaaactgacttgatcctagctgatgaacctactggtaatttagattttaaaacttcacgaaatattttttcatacttcattaaattaaaaaaattaaaaaaagcagttttgtttgcaacccacaatagagagcttgctaataaagcggattacaagttgagtatttccaatggtcatataaaaagagttaatggctga

SEQ ID NO: 274788 - DNA, 303 bp, Unknown
  Bacterial polypeptide expressing nucleotide sequence isolated from the Sargasso Sea
tctggagcgccgttgcggtgttctatctgatcattacgctggtgctgagcttcattctgcgtcgtctggaaagaaggatgaaaatcctgtgattgaatttaaaaacgtttctaagcactttggtccaacccaggtgctgcacaatattgacctgaacattcaacagggtgaagtagtggtgattatcgggccgtcaggatccggtaaatctaccctgctacgctgcattaacaaactggaagagataacctctggcgatctgatcgtcgacggtctgaaagtgaacgatccgaaggtagacga

SEQ ID NO: 274789 - DNA, 418 bp, Unknown
  Bacterial polypeptide expressing nucleotide sequence isolated from the Sargasso Sea
gctgacggagcaaactaccgtgactcacaatcctcgtgccgtaccgcatatacagttaagcggaataagcaaagcctaccctaacggcgttcaggcgctgcagaatattaacctgacgctctatcagggcgagattttcggcattatcggccgcagcggcgccgggaaatcgacgctgttgcgtctgtttaatcgcctggaaaacgccgacagcggcgaaatcaccattcacggcgaacagacgttgcgctattcacgcagccagatgcgcgacctgcgccgccgggtggcgatgatctttcaacacttcaacctgatgtcgaccaaaacggtggcgcaaaacgtcgaactgccgcttaagatggccggcgtcccgcgggctgaaaggcaacgccgggtcgatgagatgctggaactg

SEQ ID NO: 274790 - DNA, 388 bp, Unknown
  Bacterial polypeptide expressing nucleotide sequence isolated from the Sargasso Sea
tatggcaattattaaaaaatttagaattaaatcatttaaaaaagtaaaaccaataattgagtttaaaaatgtatcattagcttatggtaaaagaaaagttctagatgaaattgattttaatataaatgaaaaaactattcatggattacttggccctaatggtgctggaaaatcaactctttaccatttaatgacgggtctattagttccaaaaaatggtaaagttttaattaatggtgatgacgttacacatctgccggtttatttaagaacaaaaagatatgggattgggtatgttccccaacacggtggtgctttcgcagatctttcacttcatgataatttaaaggcaatcagtgaaattgtaatagataataaaaatttaaga

SEQ ID NO: 274791 - DNA, 248 bp, Unknown
  Bacterial polypeptide expressing nucleotide sequence isolated from the Sargasso Sea
aaaaaccgacatacttttagcagatgagccagttgctagtttggatcctaaggcagcggatttaattatgtcattattaaaaaaaattaataaagaatttaaaataactgttgtatgcaatttacatcaggttgggcttgcatctcaatattcagatagaatagttggtttattggatgggacaattatgtttgacaatttaccatcaaatattaataaaacgatcattaatcaaatatataaataaa

SEQ ID NO: 274792 - DNA, 408 bp, Unknown
  Bacterial polypeptide expressing nucleotide sequence isolated from the Sargasso Sea
aaaacaataatttacttttggattttaccgctgtcgaaaatgttgccatgcctttgataattagaaacaaaaattacaacagttcaattaaagaagcagaaagttacttaaaaaaggttaatttaggtcatagacttaaccattttccatctgatttgtcaggtggagaacaacaaagagttgcaatagcaaggtcattaatttcggatacaaaaattattctggcagacgaaccaactggtaatcttgacaataaaaattcatctgaagttttatcttattttttaaaattaaaacaaaaaaataaaatagttttaattgcaacccataatagagaaattgcaaaaagagctgattatactttaagcattagggatggtattataaaatcatcaaatgagaaatgaa

SEQ ID NO: 274793 - DNA, 533 bp, Unknown
  Bacterial polypeptide expressing nucleotide sequence isolated from the Sargasso Sea
tatgaataatttgatcgaacttttgaatattagcaaatcttttgacaatttaaataaattgaaagtcttaaaaaaaatttcgtataaatttaaaaaaggtaaaatttactctttgatgggtccatctggctcaggtaaatcaacactcttaaatttgttatcattaattgataggcctactagtggtgcaattaaaattgaaaacttggatataaattttaatgaagctgaaaaaaatgatattttaagagcaaacaaaattggcatcatttaccaacaagataatttactttctgattttactgctatagagaatatatatttagccagcctagcaagtggaaaggaaaaagaattatcaattttaaaagctaaagatttattaaaaaaagtaggactattaaataggtcaaatcattatccatcacaactatctggtggagaaagacagagagtatctattgctagagcattaataaacgacccccaaataattttagccgatgaaccaactggaagtttagattttgata

SEQ ID NO: 274794 - DNA, 573 bp, Unknown
  Bacterial polypeptide expressing nucleotide sequence isolated from the Sargasso Sea
gagattcactctctatatccggaccttctggtgctggaaaatctacattattaaatatcatatcaggcctagatgatgctaataagggagaaatatattatggtaatgtatgtttttcaaatttaaaagctactgataaaacaaaatttagattacaaaatatttcactagtgtttcaatcatttaatttattaaaagactttaatgtaatggaaaacattatgttaccactaagctataaaggattatcaagaaaagattctgaaaaacatgcattatctgctttagataatgtagatttatctaatttgaaatcatcacccgttgcaactttgtcaggcggtgaggcacaacgagtaggaattgcaagagcactagctatgaattctaaagttattttagctgatgagcctactggaaaccttgataaagaaacatctaacattattgtaaataatttagtcgatatatgtaatattaaccaaatctcactagtggtagtctcacatgatgattctgttctctctaaattaaatactaatagaaaaataattgatggaaggtttatttagc

SEQ ID NO: 274795 - DNA, 676 bp, Unknown
  Bacterial polypeptide expressing nucleotide sequence isolated from the Sargasso Sea
atgagtaaacttttaaaattatctaacgttaatttaaattataccatagacagcaagtctataaatattctaaaaaatattagtttcgaggtagattataaagaaactatttcagtggtcggagaaagtggttcaggcaaaacaagtttaattatgttaattggaggtcttgaaaaggtatcctcaggaaacattttttttagagacctagaagtatccaagatgaatgaagatgaaatttctgaaattagaagaaaaaatattggtatagtgtttcagtcgttttatttaataccaaattatactgcactcgaaaatgtgagcctttctttagaaataaataaatttgataaaccaacagtgaaagcgaaagaaattttagataggtttggtttaagtaatagatttaataattttccaagtcaactttcaggaggtgagcagcaaagggttgccattgcaagatcagttgcaatgaaaccagagctaattttagcagatgagccaacaggtaacctagatagtgaaaatacagataaaatttctagtttactttttaattatataaaagacgaaaatgccagtttaataatggttactcacgataataatttagcaaatttaacaaaaagaaaaatcatcattaaagacggagaaattactgaaaatgaatgac

SEQ ID NO: 274796 - DNA, 316 bp, Unknown
  Bacterial polypeptide expressing nucleotide sequence isolated from the Sargasso Sea
attaaggataaggtatatgatatagttgaaaaagttggattaaaaaaaagaattaataattatccaagtgagctgagtggtggagagaagcagcgagtctctatagcaagagcattagtaaaagaaccccttgttattttagctgatgaacccacaggcaatttagatccaaatgtatctgatgaaatattagatctattagaaatagcgactgattctggagcagctgttctaatgtcaactcataatttccccctaattcaaccaagaaagaagcgttttatagaattaaataaagggagattggttgtataat

SEQ ID NO: 274797 - DNA, 670 bp, Unknown
  Bacterial polypeptide expressing nucleotide sequence isolated from the Sargasso Sea
atgaataatttaattgaactatcaaatattagtaaatcttttaataattttaaaaagattaaagttttaaaaaaagtatcttttagatttaataaaggaaagatttattctttaatgggaccatcaggatctggaaaatcaactcttttaaatttattatctttaattgacagacctagctcaggaacaattctaattaacagaaaaataattaattttgacgaatctaataagaatgacattttaagagcaaataaaattgggataatttatcagcaagataatttacttcctgattttacagcattagaaaatatttatttagcaagtctcgcagctggaaataataaaaaattatcagtttctatggctaggacattattgaaaaaggttaaactttccaatagatcagatcattatccatctcaactctcaggaggtgaaaagcaaagagtgtcaattgctagagcattaattaataatccacaaataatcctagcagatgaacctacaggaagtttagactcagaaactgcaaaagaaatttttgaaattttaaaaaatcaaataaatcctaatagattgatagtatttgcaactcataatagattttttgctgataagtcagattgcttattggaaatggttaatggtaatataaaaaccatta

SEQ ID NO: 274798 - DNA, 538 bp, Unknown
  Bacterial polypeptide expressing nucleotide sequence isolated from the Sargasso Sea
ggcgatgtgatcctcgccgacgaaccgacgggcgccttagatagtcacagcggcgaagaaatgatgcggctgttgcaggagctgcaccgcgagggccagaccatcatcatcgtgacccacgatatgcatgtagcccagcatgccgaccgtattatcgagattaaggacggggtgattatcagcgatgagcctaatcccgcctcaaatatcgcggctgcgcctaagaccgaagtgatccccgccaagactaaggcgcgcgcccgcgtggcagcctgggacagatatgccgaagccctgaaaatggcgctgctagcgatgtcgacccatagattgcgcacctttttaactatgctcgggattattatcggtatcgcctccgtggtctctgtggtggcgttgggggagggctcgcagcgggaaatcttaaagagcattagctcaatgggcaccaataccatagatattcgccccggctcaggctttggcgataggcgctcggcaagggtgcgaactttgaccgcaagcgatgccaacgcac

SEQ ID NO: 274799 - DNA, 271 bp, Unknown
  Bacterial polypeptide expressing nucleotide sequence isolated from the Sargasso Sea
caaatcaattatctcggcggccaacaacaaagagtatcaatagctagagctatagctggctgtcctaaattaattttagctgatgagccaactggagcattagatagtaagacgagtatagaaatcatgacaatattaaatgatttaaattctaaaggtataactgtagttttggttactcatgaagatgatatagctaaatatggctctagaattattaaaatgaaagatgggaagataattgaggataaaaaaaatgtccctaactgat

SEQ ID NO: 274800 - DNA, 307 bp, Unknown
  Bacterial polypeptide expressing nucleotide sequence isolated from the Sargasso Sea
ggtagatgaagctcttgagcttgtgggctttgaaggaaaaagagatcattatcccaatgagctgtctggcggagaaaaacaaagagtaacattagcaagagctatagtaaaagagcctgatcttattctcgcagatgagcctacaggtaacttagatcctgtagccgcttttgagcttgtacagttgttagatactatcaacggaaacggaactacaatattaatggcctcgcataattataatttgatcaaaggacgtggtagaagaatacttgaattaaaagatggaggcataaggggaagctaa

SEQ ID NO: 274801 - DNA, 685 bp, Unknown
  Bacterial polypeptide expressing nucleotide sequence isolated from the Sargasso Sea
atgaataattttattaaactttcaaatatttccaagtcttttactcaccaaaaaaatctaaaagttttaaaaaaattgacatataattttaaacttggaaaaatttattctctaatgggaccttctggctctggaaaatcaacattattaaacttgttgtcattaatcgatagaccatctggtggtataatgaaatacggaaataaacaaattgattttgaaaactctaaccataatgacattttaagagctaataaaattggaattatttaccaacaagataatttactttcagatttcacagccttagaaaatgtatatttagccaatctatcaattgaaaaaaataaaaaaatttctatgtcaaaatcaaaacaattattgagaaaagttggtttatcaaatcgaatttaccattatccttcagaactttctggtggtgaaaaacaaagagtatcaatagctagagctttgattaacgatcctcaagttatcttggccgatgagccaactggaagtttagatctaaaaacagcgaaaagtgtttttgatcttttaaaaaaacaaataaattcaaaccgactaataatctttgcaactcataatagattttttgctaaaaagtcagattgcatgttggaaatagttaatggtagtataaaaaccattaatgcaagagtctaat

SEQ ID NO: 274802 - DNA, 676 bp, Unknown
  Bacterial polypeptide expressing nucleotide sequence isolated from the Sargasso Sea
catgaataaacttttaaaattatctaatgttagtttaaaatataccatagataataactctataaatattttaaaaaatattagctttgaagtagactacaaagagactatttcaatagttggagaaagtggttcaggtaaaacaagtttaatcatgttaattgggggactcgaaaagatttcagcaggaaatattttttttaaagggtcagaaatatccaatatgactgaggatgaaatttctgaaatcagaagaaaaaatattggaatagtatttcaatcattttatttgataccaaattacaccgcactagaaaatgtgagcctatctcttgaaataaataaacttgataatgcaacacaaaaagcaaaagaaattttagatagatttggattgagcaatagatttaacaatcttcctagtcaactatcaggaggtgaacaacagagagtagctattgcaagatctgttgtaatgaaaccagagcttattttagctgatgagccaactggcaatttagatagtgaaaatacagagaatatttctagtttactttttaattatataaaagatgaaaacgctagcttaataatggtcactcacgacaataatttagctaatttaactaaaagaaaaataactattaaagatggagtgattagtgaaaatcaatga

SEQ ID NO: 274803 - DNA, 1651 bp, Unknown
  Bacterial polypeptide expressing nucleotide sequence isolated from the Sargasso Sea
atgtataaaaatattgcgccgcaattaaagagcaatttagatcttgattcagatacttttctgaagaataaagaaatgatgttagaaaagatagatcatttaaattcccttcttgatgaagctgaattgggtggtggacaataccatcttgatcgtctagcagctagaggaaagatgcctgttcgccaaagaataaaaaatttattagatcctgatactccttttcttgaaatatctccttatgccgcatacgggacgacttataccgttggaggcgggtgcgttgctggcataggcttagttgctgataaagagtgtgtcatctttgctaatgatccatctgtattaggtggagcaatgacagtatatgtgcaagaaaaatggatgagatgcattcagatagctagagaaaatagaattccatttataaattttgttgaatcagccggtgctgatcttcgtggtgcaactgcagatacaagtcaaaatttagttagacaattacaataccctcactttgctgaatcaggcaggtctttttacgaaatgacagaattatctaaattaaaaattcctgtaatatctttggtgtttggctcctcaacagctggtggagcttaccagcctggaatgtctgattacaacatcttcattaaaaaccaatctaaagtttttcttggtggccctcccctagtacaaatggcaacaggagaaatatcagatgatgagagtttaggtggagcaaagatgcattcagaagtttctggtttttcagattatcttgctgaagatgaaatggatgctctcagaatatgtagaaatgttgttaatcatttgaacttagtaaaaagaagtgattttgacctaagaaaatacagagaaccaaaatatgcatctgaaggtttgcttggtttatttagcgaagacttaaaagaacaagttgatataagagaagtaatcatgagattcgtagatgattcaaggttcgaagaatttaagcctttatatggatcaacaatggtctgtggatgggcaaatgtatttggatatccagttggaatacttggcaataatggcccaatttatccagaaactgctgaaaaatctgcatcatttattcaattatgcaatcaaacaaatactcctttagttttcttgcataacgtaactggatttttggttggaaaagattatgagagacaagcaataattaaaaaaggatctcagatggttaatgctgtttctaattcaacagtacctcatattacttttgtggtcggtgcatcctatggagctggaacttatgcgatgtcaggtagagcttttaataatagatttatatttacatggccaactgccaagatagctgtaatgggtccaaaacagtttgcgggagttatgtctttagttagaagagctaaggcaaaaagaaaaggcgaaaaatttgatgagaaattagacaagcaattggtagagcttattgaagctgctgctgaaaaagaatctcttgctttatctgcaagcagtatggtgactgatgatgggatcatagatcctagagatacaagaaatgttttaggcttctgtttatctgttgtagataacaatgaaataaagggagctaaaggttatggagtatttagactgtgaa

SEQ ID NO: 274804 - DNA, 937 bp, Unknown
  Bacterial polypeptide expressing nucleotide sequence isolated from the Sargasso Sea
aatgattaaatctattcttggttctgataaactccaatcaactctattcaatccacctgatgacgtgcttccagaaacacttccattaataattttaatatttaaaccagcttccttaagattgttttctaaaactgttgataaatggtgttctttaggtaatccatatccagccatcaaactatcaccgaacaaaactaccttttctattgcacttgcgtttatgtgcactagaaagatgatcaaaatttttataaatatagttttattcatgaatactcttcttaaattaaaaaaaataaatctcaaataccaaactggtaaagatagtatcaatgttttaaagaatattgatttaaatataaagaaaaaagaaaccgtttctgttgttggggaaagtggctcagggaaaacaagtttaatcatgttaattggggggttggagaaacctaactctggtaaaataattttccaagatcaagaaattacaggccttagtgaagatgaggtatctgagataagaaagaaaaatattggaataatttttcagtcgttttatttaattcctaattacacagcggttgaaaatgttgcgcttacacttgagctcaataattttaaaaatccagaaaaagaggcaaaaattttattagatcgttttggtttgaaacatcgttttaataatctaccaagtcaattatcaggtggtgaacaacaaagggtttctatcgctagagcaattgcaatgaaaccagaattaattttagctgatgagccaaccggaaacttggatactgaaaattctatcatgattgcaaatattctatttaagtatgtaaaagaagaaggctcttctttaatcatggtaactcatgacactaaacttgctgacaaagctaaaagaaaaataaaaattaaagatggaaaaattaaataa

SEQ ID NO: 274805 - DNA, 655 bp, Unknown
  Bacterial polypeptide expressing nucleotide sequence isolated from the Sargasso Sea
tatgattcaaatggaaaatgtaacctattcatacgataaaggttacggtattaaaaatgttaattttaccattgatgattcagagtttacatttttaattggacctacaggctctggcaaaacaactataatgaaattaatatatatggctttgattcctcaaagtggagttgtgactacaggaaagtttcgatcagataaaattaaaaaaaggaaaattccttttttgagaagaaaaattggtatgatttttcaagattatcatcttcttcgagacagaagtttatttgaaaatattgctttaccactatatgtaataggaactaggcataatgatattcctgaacgtgtggaagaagtaattgatcaagtaggtctcactggaaaagaagaccattcaccagatgaactatctggaggagagcaacaaagagcatgtatagcaagagctttggtaaaagaacctgaaattatacttgctgatgagcctacaggaaatcttgacccgataacttcatttgaattattaaaattactagaatctgtaaatcatgatggcacggctgtactaatggcatctcataattataatctcattaaaggtcgaggtcatagaataatggaagttcaacaaggaattcttcgtaacaactga

SEQ ID NO: 274806 - DNA, 664 bp, Unknown
  Bacterial polypeptide expressing nucleotide sequence isolated from the Sargasso Sea
tatgaaaattaaatgtaaagaaatttttaaaaaatatagaagctataatactaaaagcgtgatcaatggtgcatcttttgaattggaatctggaaattcactatcaatctcaggaccatctggtgtcggaaagtcaacattacttaatgtattagctgggatagatgaaatagacaagggcgaaatcttttttgacgatatatctttcacaaatttatcagactcaaataaaacattatttagactaaataatatttctcatatctttcaatctcctaacttgctaatggattttaatgtaactgaaaatattatgattcctctcatttatcaaggaaacacaaaacatagatctaagtcacttgctatacagtgcctggaagaggttaatcttattgaacatttaaattctcctgtttcaattctatctggcggtgaagcgcaaagagtaggaatagcacgtgccatggcgatgaaatctaaaattatattagctgatgagccaactggaaatcttgattcaacaaattctcaactagtcatgaggaatcttgttgagatatgtgaatcacgtatgatcacattaattgttgtttctcatgacaatgatgtcataaataaaatgaggaataaaaaaacaatgattgatgggaagctaatctag

SEQ ID NO: 274807 - DNA, 667 bp, Unknown
  Bacterial polypeptide expressing nucleotide sequence isolated from the Sargasso Sea
atgactaaacttcttaaactaacagatgtgaacttaaactataatactgataacaatcttataaatgttttacaagatgtaagctttgaagttgattataaggaaacaatatctgtagtaggagaaagtgggtcaggaaagacaagcttaataatgttgataggtggtttggaaaaagcatcttcaggaaaaattgaatttaaagactttgagatttcgagtttaaaagaagatgagatttcagagataagacgaaaggatattggcattgtttttcaatcgttttatttaatacccaattatacagctatagaaaatgtcagtttagcattggaaattaataaaattaaagatccgattaataaagcaaaagaaatcctagataaatttggccttggaaaaaggctaaataatttacccagtcaattatctggaggagaacagcaaagagtagcaattgcacgctcaattgttatgaagcctgaattaattttagcagatgagcctactggaaatttagatagtgaaaattctgagctaatatcaaatattctttttgattatgtgaaagaggaaaatgcaagtttaattatggttacgcacgataataaattggcaaatctttctaagagaattattaaaataaaggatggtaaaattgaataaa

SEQ ID NO: 274808 - DNA, 664 bp, Unknown
  Bacterial polypeptide expressing nucleotide sequence isolated from the Sargasso Sea
tatgaaaattaagtgcaaagaaatttttaaaaaatatagaagctataatgctaaaagtgtgatcaatggtgcatcttttgagttggaatctggcaattcactatcaatctcggggccatctggtgtgggaaagtcaacattgctgaatgtactggctggaatagatgaaatagacaagggcgaaatcttttttaatgatatatctttcacaaatttatcaggctcaaataaaacattatttagattaaataatatttctcatatctttcaatctcctaacttgctaatggattttaatgtaactgaaaatattatgattcctctcatttatcaaggaaacacaaaacataaatctaagtcacttgctatacagtgcctcgaagaggttaatctaattgaacatttaaattctcctgtttcaattctatctggtggtgaagcgcaaagagtaggaatagcacgtgctatggcgatgaaatctaaaattatactagctgatgagccaactggaaatcttgattcaacaaactctcaactagtcatgaggaatctcgttgagatatgtgaatctcatatgatcacattaattgttgtttctcatgacaatgatgtcataaataaaatgaggaataaaaaaacaatgattgatggaaaaatcatctag

SEQ ID NO: 274809 - DNA, 568 bp, Unknown
  Bacterial polypeptide expressing nucleotide sequence isolated from the Sargasso Sea
atgaataaacttttaaaattatctaatgttaatttaaattataacatagataacaaatctataaatattttaaaaaatattagctttgaggtagattacaaagaaactatttcaatagttggtgaaagtggttccggcaaaactagcttaatcatgttggttggtggccttgaacatgtgtcatccgggaaaattttttttaaagattctgaaatttctagtatgaatgaggatgaaatttcagaaattagaagaaaaaatattggaatagtatttcagtctttttatttgatcccaaattatagtgcccttgaaaatgtaagtttagcattagaaataaataaacttaacaatccaataaaaaacgcaaaagaaattttagatagatttggtttaagtaatagatttaataatttaccaagtcagctttcaggtggtgaacagcagagagttgctattgcaagatctgttgtaatgaaacctgagcttattttagcagatgagccaactggtaatttagatagcgaaaatacaaaaattatttctaaactactttttaattatgtaa

SEQ ID NO: 274810 - DNA, 685 bp, Unknown
  Bacterial polypeptide expressing nucleotide sequence isolated from the Sargasso Sea
tatgaataattttattaaactttcaaatatttctaagtcttttactcaccgaaaaaatttaagagttttaaaaaaattaacttataattttaaacttggaaaaatttattctttaatgggaccttctggttctggaaaatcaacattactaaacttgttgtcattaatcgatagaccatcaagtggtataatgaaatatggaaataaacaaatagattataaaaattctaactataatgacgttttaagagctaataaaattggaattatatatcaacaggataatttacttccagatttcacagctttagaaaatgtatatttggctaatcttgcaattgaaaaaaataaagaaatttcagaaataaaatcaaaaaaattattaaaaaaagttggtttatcgaatcgaatttaccattatcctgcagaactctccggaggtgaaaaacaaagagtatcaatagctagagctctaattaatgatcctcaagttatcttagctgatgaaccaacaggaagtttagatttagaaactgcaaaaagtgtttttgatcttttaaaaaaacaaattaatgcaaaccgtttaataatctttgcaactcataatagattttttgctaaaaaggctgattgcatgttggaaatagttaatggtaatataaagaccattaatgcaagagtctaa

SEQ ID NO: 274811 - DNA, 667 bp, Unknown
  Bacterial polypeptide expressing nucleotide sequence isolated from the Sargasso Sea
catgaataatcttcttaaattaactgatataaatttaaattataaaacagataataacttaataaaagttttacaagatataaatctagaagttaagttaaaagaaacactatctatagttggggaaagtggttcaggtaaaactagtttaattatgttaattggtggcttagagaaatcttcatctggaaaaattttttttgaaaataatgaaattacaaatatgagtgaagatgaaatttccaatattagaagaaaaaacattggtatagtctttcaatcattttatttaatacccaactataccgctttagagaatgtaagtttaacattagaaataaataaaatttcgaacgctgaaataaaagcgaaagagattttagagcgatttggattaagtgaaagattttataatttaccaagtcagttgtctggtggagaacagcagagagttgcaattgcacgatctattgtgatgaaaccaaaattaattttagcagatgagccaacaggcaatcttgatagtgagaattctgaattaatttcaaaaatattatttgattatgtgagtgaagaaaaagcaagtttgattatggttacccatgacaataatttagcaaatcgaacaatgaaaaaaataaaaataaaggatggtagaattgattag

SEQ ID NO: 274812 - DNA, 685 bp, Unknown
  Bacterial polypeptide expressing nucleotide sequence isolated from the Sargasso Sea
tatgagtaattttattaaactttcaaatatttcaaagtcttttacccaccaaaaaaatttaagggttttgaaaaaactttcttataattttaaacttggaaaaatttactctctaatgggaccttctggttcaggaaaatcaacattactaaacttgttgtcattaattgatagaccatcaagtggtttaatgaaatatgaaaataaacaaattgatttcaaaaattccaactataatgacattttaagagctaataaaatcggaattatataccaacaagataatttactttcagatttcacagctttagaaaacgtatatttagcaaatcttgcaatagagaagaataaagatatatctgtgttgaaatcaaaacagttattaaaaaaagttggtttatcaaatcgaatttaccactatcccgctgagctttctggaggtgaaaaacaaagagtatcaatagctagagctttaataaacgatccccaagttattttagccgatgaaccaactggaagtttagatctagttacagcaaaaaatgtttttgatcttttaaaaaaacaaataaatgcaaacagaatgattatctttgcaactcataatagattttttgctaaaaagtcagattgcatgttggaaatagttaatggtaatataaaaaccattaatgcgagagtctaa

SEQ ID NO: 274813 - DNA, 265 bp, Unknown
  Bacterial polypeptide expressing nucleotide sequence isolated from the Sargasso Sea
tttccaaatgaattgtctggaggagaacaacaaagagttgcaatagccaggtccttaattgccgaaactgatttaatactggcagatgaaccgacaggaaatttagattataaaacttcccaagatgtgttttcttattttcttaaattaaaaaaacttaaaaaaactattatttatgcaactcataatagagagcttgctaacaaagcggattataagttgagtatttctagtggtaatataaaaagagttaatggcaaatgac

SEQ ID NO: 274814 - DNA, 688 bp, Unknown
  Bacterial polypeptide expressing nucleotide sequence isolated from the Sargasso Sea
tatgaataaaaatagtattaaggttgagaaattatcaaaaaattttgtaaacaataaagtagtagtaaaggttttaaacaatcttaatcttaatcttgaaacaggaaagattatagcacttgtaggtccatctggttcgggaaaatcgactttgcttcatttgcttgccttattagataaacctactgagggaaaaattactatattaggtgaaccaacacaaaatataaccgaaaataaaagaaatcatttaattagagatcacatatcaataattttccaaaacaataatttacttttggattttactgctgtcgaaaatgttgctatgcctttaataataagaaataaaaattacaacagttcaattaaagaggcagaaagttacttaaaaaaagttaatctaggtcatagacttaaccattttccatctgatttgtcaggcggagaacaacaaagagttgcaatagcaaggtcgttaatttcagatacaaaaattattctagcagacgaaccaactggtaatcttgacaataaaaattcttctgaagttttatcttattttttaaaattaaaacaaaaaaataaaattgttttaattgcaacccataatagagaaattgcaaaaaaagctgattatactttaagcataagggatggtattataaaaacatcaaatggaaaatga

SEQ ID NO: 274815 - DNA, 685 bp, Unknown
  Bacterial polypeptide expressing nucleotide sequence isolated from the Sargasso Sea
tatgaataattttattaaactttcaaatatttcaaagtcttttactcaacaaaaaaatctaagagttttaaaaaaattgacgtataattttaaacttgggaaaatttattctctaatgggaccttctgggtctggaaaatcaacattattaaacttgttgtcattaatcgataggccatcagatggtataatgaaatatggaaacaaacaaattgattttgaaaattctaactataatgacattttaagagctaataaaattgggattatttaccagcaagataatttacttccagatttcacagctttagaaaatgtgtatttagccaatctggcaattgaaaaaaataaagaagtttctttaataaagtcaaaacaattgttaagaaaagttggtttatcaaatcgaatttatcattatccctcagaactttctggtggtgaaaaacagagagtatcaatagctagagctttgattaatgatccgcaagttatcctagccgatgagccaacaggaagtttagatttaaaaacagcgacaagtgtttttgatcttttaaaaaaacaaataaattcaaaccgattaataatctttgcaacccataatagattttttgctaaaaagtcagattgcatgttggaaatagttaatggtagtataaaaacaactaatgcaagagtctaa

SEQ ID NO: 274816 - DNA, 676 bp, Unknown
  Bacterial polypeptide expressing nucleotide sequence isolated from the Sargasso Sea
atgagtaaacttttaaaattatctaatgttaatttaaattataccatagacaataagtctataaatattttaaaaaatattagtttcgatgtagattataaagaaaccatttcagtagttggagaaagtggttcaggcaaaacaagtttaatcatgttaattggaggacttgaaaaagtatcgtcaggaaatattttttttagagattcagagttatctaaaatgaatgaggatgaaatttctgaaattagaagaaaaaatattggaatagtatttcaatccttttatttaataccaaattacactgctcttgagaatgtatgcctatctttagaaataaataaatttgataatccaacagcgaaggcaaaagaaattttagataggtttagtttaagtaatagatttaataattttccaagtcaactttcaggaggagaacaacagagggttgccattgcaagatctgttgcaatgaaaccagagattattttagcagatgagccaaccggcaacctagatagtgaaaatacacacaaaatttctgatttactttttaattatattgaagatgaaaacgccagtttaataatggttacacacgataataatttggccaatttaacaaaaaggaaaatcactattaaagatggagtaataagtgaaaataaatgat

SEQ ID NO: 274817 - DNA, 197 bp, Unknown
  Bacterial polypeptide expressing nucleotide sequence isolated from the Sargasso Sea
tatgattgaatttaaaaacgtaagtgttacatacccgggtggagtaaaagcattaaataatgtttctttggatatagctgaaggtgactttgtaatcattgtaggtatgtctggagcgggtaaatcaactttattaaggactgtaaataacttagtaaaacccactgaaggaaatgtaattgtagattctcgaaacg

SEQ ID NO: 274818 - DNA, 661 bp, Unknown
  Bacterial polypeptide expressing nucleotide sequence isolated from the Sargasso Sea
ctatcaaatgtaataaaaagttttttaagtttaaaaaagataaacgttttaaaaaaaatttcgtataaatttaagtctggaaaaatttattctcttatgggaccctcgggctcaggtaaatcaactttattaaatttattgtcattaatagatcgacctagttctggctctattactattggtaataaaaagattaatccaaacaattctcaagaaaatgatctattaagagctaataaaattggtataatttatcagcaagacaatcttctgtctgattttacagcaatagaaaacttaaccttagctagtttagcaagtggtaacactaaagaggacgccttgaataagtcaaaaattttgcttaagaaagttggtcttacaaaaagagtaaatcactatccctcacaattatccggaggagagaaacaaagggtgtctatcgcaagagctttgataaacgatccacaaattatccttgcagatgagccaactggaagtctagatattaagactgctataggaatctttgatcttttaaaaaatcaaataaagcccgatagaataataatatttgcaactcataatagattttttgctaataagtcggattgcttattggaaatagttaatggtaatataaaaaccattaatggctgaa

SEQ ID NO: 274819 - DNA, 493 bp, Unknown
  Bacterial polypeptide expressing nucleotide sequence isolated from the Sargasso Sea
actttaaaactttttactaaagaagagagaacagaggctcttattaatcttgataaattaggaatggcagaaactgctttacaaagagcagaaactctttcaggcggtcaacaacaaagagtagctatttgcagagccttaatgcaaaacccttccatgattctggctgatgagcccatagcatcattagatccgtataatgcaagattagtaatggagtcattgcaaaaaatacataaagaaaagaatattacggttatatgtaatttacatacattggatacagcgaaaaaatattgcgatagaataattggtatgaaaacaggaaacatagttttcgatgaccaacctgaattacttaaagatgaaactgcaagagatatttacggcgccgaagctgaagaagcttttgaagccgctattacctctacgtctttgggtgataatcaagaaaggctaattggtaacaaaaagggggaaggtcttgattgat

SEQ ID NO: 274820 - DNA, 529 bp, Unknown
  Bacterial polypeptide expressing nucleotide sequence isolated from the Sargasso Sea
atgaataaaacaattctagagataaaaaatttaagcaaatcattttctcacaaagatggtaaaattgaattatttaaaaatataaatttcacaataaaaaaaggtgagttagttgcgctgacagggccctcaggttcaggtaaatctactctgttacatatgattgctcaactagataaaccttcatcaggaaaaatcattttaaaaaaaaaaaatcttaaagacctaaatcaagttgaggaaaatttacttagaagaaatgatatttcaattatttttcaaaacagtaatttgttttctgattttacagcacttgaaaacgtaatgtttccaatgcttattaaaagtgaaaatcaaaatgcatcaattgaaaaatctaaaaaagttttaaaaaaagttaaattaaataataggttgaaccattttccttacgaattatctggtggagagcaacaaagggttgcaatagctagatctcttatatcagaaactgacctaattttagcagatgagccgactggaaattaga

SEQ ID NO: 274821 - DNA, 484 bp, Unknown
  Bacterial polypeptide expressing nucleotide sequence isolated from the Sargasso Sea
tattttttttagagattcagagttgtctaaaatgaatgaggatgaaatttctaaaattagaagaaaaaatataggaatagtatttcaatccttttatttaataccaaattatactgcacttgaaaacgtaagcctatccttagaaataaataaatttgataatccaacagtgaaagcaaaagaaattttagataggtttggtttgagtaacagatttaataattttccaagccaactttcaggaggcgaacaacagagggttgccattgcaaggtctgttgcaatgaaaccagagctaattttagcggatgagcctactggtaacttagatagtgaaaatacagacaaaatttctaatttactttttaattatattgaagatgaaaatgcaagtttaataatggttactcacgacaataatttggctaatttaacaaaaagaaaaatcattattaaagatggagtaataagtgaaaataaatga

SEQ ID NO: 274822 - DNA, 1651 bp, Unknown
  Bacterial polypeptide expressing nucleotide sequence isolated from the Sargasso Sea
atgtacaagaacatcgctccacagctaaagagtaatttaaatctggattcagatagctttctgaagaataaggaaatgatgttagaaaagattgagcatctaaatactctacttaatgaagctgaattaggaggtgggcagtaccaccttgatcgtcttgcagctcgaggaaaaatgccagtgcgtcaaagaataaaaaatttacttgatcctgatacgccttttttagagatctccccatatgcagcatatggaaccacttataccgtcggtggtggttgtgttgcaggtataggtttagtggctgacaaggaatgtgtcatttttgctaatgatccatcagtactaggtggagcaatgacagtatatgtacaagaaaaatggatgagatgcatagaaatagctagagagaatagaattccatttataaattttgttgaatcagcaggtgccgaccttcgaggagcgactgcagatacaagccaaaatttagttagacaattacaatatcctcactttgcagattcaggcagatctttttatgaaatgacagaactgtctaaattgaaaatacctgtaatatccttggtgtttggttcctcaacagctggtggagcgtatcaaccgggaatgtcagactacaacatttttattaaaaaccagtcgaaagtttttcttggtggccctccccttgtacaaatggcaacaggagagatatctgatgatgaaagtttaggtggagcaaaaatgcattcagaagtttcaggattttctgattaccttgctgaagatgagatggatgcgctaagaatatgcagaaatgttgtgaatcatttgaatttagtaaagagaagcgattttgatttaaggcaatataaggaacctaagcatgattctgaagctttgcttggattgtttagtgaagatttaaaagaacaagttgacataagagaggtcatcatgaggttcgtagacgattcaaggtttgaggaatttaaacctttgtatgggtcaacaatggtctgtgggtgggcaaatgtttttgggtatccgataggaatacttggcaataatgggcctatctatccagaaactgcagagaaatctgcatcatttatacagctatgcaaccaaacaagcactcctttagttttcttgcataatgtcactggatttctagttggaaaggaatatgagagacaagcaataattaaaaaaggctcacaaatggttaatgctgtttcaaattcaacagtgccacatattacttttgtagtgggtgcatcctatggtgctggaacttatgccatgtcaggtagagcttttaacaatagatttatatttgcatggcctactgccaaggtagcagtaatgggtcctaaacagtttgcaggggtcatgtctctagtaagaagagctaaagcaaaaagaaagggagaaaaatttgatgaaaaattagataaacaactagtagaactaatcgaagctgctgctgaaaaagagtctctcgctctatctgcaagcagtatggttactgatgatggaattatagatcctagggatactaggaatgttttagggttctgtttgtctgttgtggataacaatgaggtaaagggagcaaaaggttatggggtatttagactgtgaa

SEQ ID NO: 274823 - DNA, 688 bp, Unknown
  Bacterial polypeptide expressing nucleotide sequence isolated from the Sargasso Sea
tatgagtaaaatattaatagaaactattaatcttaagaaaacatatcgacattttaatgggagcataacattatttaacaacctcaatctgaaaataaaaaaaggtgatctagtagcattagtcggtccatctggatccggcaaatcatctttacttcatttattggctttattagatgagccaacaatgggagagattaaaataaatgatgttgatacaaagaaatttagtgatgaaaaaaaagatgaaactcgaagaaaaaatatttcaattattttccaggacaataatttattaaatgattttactacaattgaaaatgtaatgatgcctttaattattaaaggagaaagtgtgtcaaatgctaaaaaagaggctctaaaaatacttcaagctgtcagaatttttgatagatctcaacattttccaaatgaactttctggtggagaacaacaaagggttgctattgctagagctttaatagccaatacaaatttaattttagcagacgagcctactggcaatttagattttaaaacatcaaaagaaatattttcatattttttaaaattaaaaaaattaaaaaaaactataatttttgcaactcataatagagaacttgctaacagggcagattacaagttgtttatttctaatggtgatataaaacgagttaatgctcgttaa

SEQ ID NO: 274824 - DNA, 567 bp, Unknown
  Bacterial polypeptide expressing nucleotide sequence isolated from the Sargasso Sea
catgagttccctacttcgcttcaccaatatacacttacaatatcaaaatggaacactcttaactaaagtaatcaagggaatagattttactatccatcaaaatgaaaaacttgcaattgttggtaagagcggatcaggtaaaacatcgttgttgatgttgatggcaggtttagaaaagcctacgtcagggaatattacatacaaagatcaggacataacgacttatagcgaagatcaattaaccgaatatagaaaaaagaatattggtattgtatttcaatcgttttatttaattcccaattatacagctgtagaaaacgtagcactcccattagaaattaattttcaaaaagacgcattaagccaagcaaaagaaattttagttgatttaggattagaagatcgtcttcaacactttccaagtcaattatctggtggtgaacaacaacgcgtcgctattgcaagagccatgattaaaaaacctgaattaatccttgccgatgagccaacaggcaacctagatgatgaaaatacagaagtaattactgaattaatatttaatatcgc

SEQ ID NO: 274825 - DNA, 517 bp, Unknown
  Bacterial polypeptide expressing nucleotide sequence isolated from the Sargasso Sea
atgttaaaattagaaaatttgacaaagagatataatactggtgatcttgccttgcaaggtattgatttaagcattcctagtggacaagtacttgcactcattggtccatcaggcgctggaaaatctaccttaataagatgcattaatagattagttgaacctacaaatggctctgctattctaaatgaattaaatttaacaaaattatcttctagagccttaagaaaatctcgtagaaaaatgggcatgatttttcaagaatatgccttagttgaaaggctaacagtaatggaaaatgttttgtcaggacgtttgggatatgttggattttggaagagttttcttagaaaatttccaaaaaaagatgtgaatgaagccttcagactcttagatagagtaggccttctagaaatggcagataaaagagctgacgaattgtctgggggacaaagacaaagagtagggatttgtagagcattaattcaggacccagatcttctactagtagatgaaccaa

SEQ ID NO: 274826 - DNA, 679 bp, Unknown
  Bacterial polypeptide expressing nucleotide sequence isolated from the Sargasso Sea
atgaatagtttctttgaattaaaaaaaatttttaagacttttggaactgaaaaaacgattaaagtattaaaaaatctttctcaaagatttgataaaggtaaaagctattctataatggggccatctgggtcaggtaaatcaactctattaaatttaatttcattgatcgatagaccatcatctggttcaatccattttgataaaattcctgtaaatttcaatgaatctgaaaaaaatgatgtttatagatccaaaaaaataggaattatttatcaacaaaataatcttcttccagattttactgctttagaaaatatatatttggcctcacttgcaattaatgacaataaagaattagcaatatctaatgcagaaaagttactcaaaaaaattggtctttccaatagggcagatcactttccatctcaactatcaggtggtgaggctcaaagagttgctatagcaagagcaattgtaaatgatcctgaaattattttagcagatgagccaactggaagtttagatatggaaactgcaaaagatgtttttgaacttttatataaacaaaaaaggtcggatagacttattatatttgcaactcataatagattcttcgctaataaggcagattgcctattggagatgatagatggtagtataaaatcatctaatgtctgag

SEQ ID NO: 274827 - DNA, 340 bp, Unknown
  Bacterial polypeptide expressing nucleotide sequence isolated from the Sargasso Sea
aaaaagctatactttgatgcaaagaaattaattaaaaaactaggattatcaaatagagaaaaccatttatcatccgaactttctggtggtgaaatgcaaagggttgctatagcaagagcattaattaattcacctgatattatacttgctgatgaaccgactggtagtttggacatgaaaaatgcaaaggaagtttttaaaattttacttaaacttaaaaacaaaaatagattaataatatttgcaactcataatagattttttgctaacatggcagattgcaaaattgaactaattagtggtaagataaaaaaatccactaatgcaagaatcaaataat

SEQ ID NO: 274828 - DNA, 268 bp, Unknown
  Bacterial polypeptide expressing nucleotide sequence isolated from the Sargasso Sea
cctcagagttatcaggggcggggaaattcagagagttgcaattgcaagggctttaattaacaagccacaaattatacttgcggatgaaccaactggtagtttagaccagactacagcaaaagatgtatttaatgttttgcataaacttaaaaattcaaacagaataattatttatgcaactcataatagatattttgctaataaggcagattgcaaactagaaatggttgatggtaatatcaaaaccatcaatgcaagaatcaaataa

SEQ ID NO: 274829 - DNA, 685 bp, Unknown
  Bacterial polypeptide expressing nucleotide sequence isolated from the Sargasso Sea
tatgaataaaaaaattttagaaattaataatttatcaaaacatttcgaaaacaatgggtcaaaaatttctgttttaaacaatataaatcttaaaattgagaccgggaaggtcatcgctataattggtccatctggatcaggtaaatcaacttttttacatttgatatctctattagatgtgccgtcaaaaggaaaaattaagattctaggaaaatcaatcaacgatctttccgataatgaaaaaaacaaattaataagagagcatatttcaataattttccaaaataataatttattatctgactttacagcacttgagaatgtagctcttccattaattatacgtgataaagattataaaacttctaaaaaattagcggaaaagttcttaaaaaaagttaatttaggacacagattaaatcattttccttcagatttatctgggggtgaacaacaaagagttgcaatagcaagagctcttattgcagaaactaaaataattcttgctgatgaacccacgggaaatttagacaataaaaattctaaagaagtattctcttattttttaaagcttaaagagaaaaacaaaataatacttattgcaactcataatagagaattagcaaaaaaagccgattatactttaagcatattaaatggtaatataaaaagagttaatgtctga

SEQ ID NO: 274830 - DNA, 337 bp, Unknown
  Bacterial polypeptide expressing nucleotide sequence isolated from the Sargasso Sea
atgacaaaaaaattagcattatctaaagctgaaaaattattaaaaaaaattggactatcaaacagattaaatcattttccttcgcaactttctggaggtgaagctcaaagagttgcaatagcaagagcgattattaataatcctcaaattattttggctgatgaaccaactggtagtttagacatgaatactgctaaagatatttttaaacttttaaacaatcaaaaaagatcagacagaataattatatttgcaactcataatagattttttgcaaaaaaagcagattatctattggagatgagagatggtagtataaaatcatctaatgtctgaa

SEQ ID NO: 274831 - DNA, 528 bp, Unknown
  Bacterial polypeptide expressing nucleotide sequence isolated from the Sargasso Sea
tatgattcaattacaacaattacagcgggtgtttcgcacagcagatatcgaaaccacggcactgaacaatattcatcttgagattaagtcaggtgatttcgtcgccattatggggccttccggttgtggcaaatcaactttattaagcattttaggcatgctggacagcccaagctcaggccgctacctgtttgaaggcactgatattgcgggttttaatgaaaaccaactggcagctttgcgtaaaactcacctcggttttgtgtttcagagttttaacctgattgatgagttatcggtgtatcaaaatgttgaattgccactgcaataccagggagtacccaaagcagaaaggcggcaaagggtgtctgccattttaaagcggatgcagattgaacaccgggccgatcaccggcctttacagttgtccggtggccagcaacaaagggtggccgttgccagagccctggttataaaccctaaactcattctggccgacgaacccacaggcaacctggactccaccaa

SEQ ID NO: 274832 - DNA, 385 bp, Unknown
  Bacterial polypeptide expressing nucleotide sequence isolated from the Sargasso Sea
actgcaattgaaaatgtaaaaatgcctttaataataaaaaatgataataatgagattatctcaaaaaaagcagaaaaaattctaaaagatgtaaaaatatttgatagatcaaatcattttcctaaccagctttctggaggagaacaacaaagagtagcaatagctagagcattaatatctgaaacaaatataattcttgccgatgaaccaactggaaatttagattataaaacctcaaaggaaatattttctcttttccttaaattaaaaaaacttaaaaaaacaattatttttgcaactcataatagagaacttgctaacagggctgattacaagttgtttatttctaatggtattataaaacgagtaaatgctcgtttctgat

SEQ ID NO: 274833 - DNA, 631 bp, Unknown
  Bacterial polypeptide expressing nucleotide sequence isolated from the Sargasso Sea
attgatacagactaaagatttatcaattaaatatgaaaataagagaatcaatttccctgatttagatataagtccaggaaatcattttctaattcttggccgaagtggatctgggaaaacctcttttttaaacctcataggaggactattatctccaagcagtggtcagattaaaattaacaataataatattgcattactttctagtaatgaactagataaatttagaggcttaaacataggttttatttttcaaactccacatttcataaaatccctaaatattaatgataatttattgctttctcagtattttcttggaaatagagatcaaaatcatattaatactttattagaaaaagttgaattattaaatcgcaaagaagatccattacatgagcttagtgagggtgaaaaacaaagaatttctattgtaagagctttaattaataagcctaaaattattttagcagacgagcctacatcagctttggatgattattcatgtaatatcgttattgatttattaaaaaatttatctaaggagaataattctgttttaataattgttactcatgataaaagattaaaagataaattcaaacaatttatagatttagatgcttcttaa

SEQ ID NO: 274834 - DNA, 373 bp, Unknown
  Bacterial polypeptide expressing nucleotide sequence isolated from the Sargasso Sea
tttagaaaatatatatttggcctcacttgccattaatgacaataaagaattagcaatatctaatgcagaaaaattactcaaagaaattggtctttctaagagggcagatcactttccgtctcaactatcaggtggtgaggctcaaagagttgctatagcaagagcaattgtaaatgatcctgaaattattttagcagatgagccaactggaagtttggatatggaaactgcaaaagatgtttttgaacttttatataaacaaaaaaggtcggatagacttattatatttgcaactcataatagattctttgcgaataaggcagattgcctattggagatgatagatggtagtataaaatcatttaatgtctga

SEQ ID NO: 274835 - DNA, 427 bp, Unknown
  Bacterial polypeptide expressing nucleotide sequence isolated from the Sargasso Sea
tcagaaatcagaaagaaaaatattgggaataatatttcaatctttttatttaattcctaattatacagctgttgaaaatgttgcacttacacttgagctaaataattttaaaaatccagaaaaagaagcaagaattttgttagatcgttttggtttaaaacatcgttttgataatttaccaagtcaattatcaggtggtgaacaacaacgggttgctatcgctagagcaatcgcaatgaagccacaattaatcttagctgatgaaccaactggaaacctagatacagaaaattctattatgattgcaaatatattatttaaatatgttaaagaagaaggttcgtcattaatcattgtaactcatgaccctaaacttgctgacaaagctaaaagaaaaataagaattaaagatggaaaaattaaataa

SEQ ID NO: 274836 - DNA, 604 bp, Unknown
  Bacterial polypeptide expressing nucleotide sequence isolated from the Sargasso Sea
atgagtattcttcttaaattaaataaggtaaaccttaaataccaaactggtaaagataatatcaaagttttaaaaaatattaacttaactaccaagaaaaaagaaacaatttctattgtaggggaaagtgggtcaggaaaaactagcctaattatgctaattggaggtttagaaaaagcttcgtccggaaaaattttttttaaaaatcatgaaataacaaaattgagcgaagatgatgtctcagaaataagaagaaaggatattggaattatatttcaatcattttatttaattccaaattatacagctgtagaaaatgtagcattaaccctcgaactgaataaatttaagaacccagaaaataaggcaaaacaattattagatagatttgggcttagtcatagatttaataatttaccgagccaactatcaggaggtgaacaacaaagagtcgctatagctcgagccatagcaatgaaaccagaattaattttggcggatgaacctactggaaatctagatactgaaaattcagtaatgatttctgatatattatttaaatatgtaaaagaagaaggttcatcattaattatggtaactcatg

SEQ ID NO: 274837 - DNA, 475 bp, Unknown
  Bacterial polypeptide expressing nucleotide sequence isolated from the Sargasso Sea
tttaaccggtttgcttggtcatgtgccacgatggcgcggaacctttgggctttttcttcgctctgaacgtgtaaaagctcttaatgccctcgatcgagtaggaatactctcacagtcccgtcagagggcttcgacactctcaggggggcaacagcaacgagcagctattgctcgggctcttgttcaaaatgcagatataattcttgcggatgagcctgttgcatcgcttgaccccgctgccgccgatagagtgatgcaaacactagaaaacatcaatcaggaagatggatcgacagttctcgtatcacttcaccagattgaatatgcattaaaatattgtggtcgcataatagcgcttaaagatggaaaactcatatttgatggaactgcatcagatacaacccctgaattctttacagagttgtacggaagatctattgacggagacgaagatcatcaggttcagagtcgttaa

SEQ ID NO: 274838 - DNA, 688 bp, Unknown
  Bacterial polypeptide expressing nucleotide sequence isolated from the Sargasso Sea
tatgagtaaaattttaatcgaaacaattaatcttagaaaaacttaccaacattttagtggtaatattacattatttaacaatctaaatttgaaaattaaacggggagaccttgtagcattggtcggtccatctggatctggaaagtcttcactacttcatttattggctttgttagatgaaccaacaagaggagatataaaaataaatgatatctttacaaaaaaatttacagatgaaaaaaaagacgaaactagaaggaaaaatatatcaattatttttcaggaaaataatttattaaatgactttactgctattgaaaatgtaatgatgccactaattataaatggagaaaatttacataacgccaaaaagaacgccctgaaaattcttaaagcagttaaaatatttgatagatctcaccattttccaaatgaactttctggtggagaacaacaaagagtagctattgcaagagctttaataggtgaaacaagtttgatattagcagatgagccgactggtaatctagattataaaacctcaaacgaaatattttcatattttttaaaattaaaaaaattaaaaaaaactataatttttgcaactcataatagagaacttgccaacagggcagattacaagttgtttatttcaaacggtgatataaaaagagttaatgctggctaa

SEQ ID NO: 274839 - DNA, 319 bp, Unknown
  Bacterial polypeptide expressing nucleotide sequence isolated from the Sargasso Sea
aaagtaaataaaattattcagagtgtaaaactatctggtcgtgcaaatcattttcccaatgagctctccggaggagagcaacaaagagtagctattgccagagcactaatagcggaaaccaatttaattcttgcagacgagcctacaggaaacttggactttaaaacttcaaaagaaatattttcaattttcttaaaattaaaaaaattaaaaaaaacaattatttttgcaacccacaatagagaacttgctaacagggctgattacaagttgtttatttctggtggtactataaaacgtgtaaatgcccggcagtgat

SEQ ID NO: 274840 - DNA, 583 bp, Unknown
  Bacterial polypeptide expressing nucleotide sequence isolated from the Sargasso Sea
atgatagaattaaaaaacatccataaatcgtatatatcaggttgtgacaccaccaatatcttaaccaatcagtcacttattattgacaaccaatcgtcagtggttattacgggcccctccggaagtggaaaaagtactattttgagaatcatagcagggcttgaagcaccaaatagcggaagtgtgctttacaataaaaaaaacatctataatttaaccgatgaaaaacgtgcaaaaataagaagcgataagatgggatttatatttcaatcgtttcgattgtttccatcattaacggtttttgaaaacgttcaattatcttgtgaaatatccaatataccaaactcagaatcagtggcattaaaatggattgaggaagtcaatttaattaagcaaaaaaatcaaatgcctgatacattatcgggtggagaacaacaacgggtagcaattgccagagcgctcgcaacaaacccaagtgttattttggcggatgaacccaccggaaatctagatcaaaccaatagtaacaatataaagcaattgcttcagcattgtttggatataaccaaagcaacccattgat

SEQ ID NO: 274841 - DNA, 691 bp, Unknown
  Bacterial polypeptide expressing nucleotide sequence isolated from the Sargasso Sea
atgactaatatcattgaattaaaaaacattgaaaaaaattataatacaaaaaaaagaattaaagtattaaataagattaatttttcatttaaagcaggtaaaatatattctttaatgggcccctcaggctctggtaaatctacacttttaaacttactatctttaattgacacacctaattctgggattttaaaaatcttaaatcatacaattaattataaatctaaatcttataatgataaattaagagctaataagatcggtattatttatcaagataataatttgttatctgattttacaactatagaaaatatttatctatcaagattatcaatagatgaaaataaaaataaggcattagctgatgcaaaaaaattaattaaaaagcttggcttaactaatagagaaaatcacttagcctcagagctttccggaggtgaaatgcaaagagttgctattgcacgtgcactaattaattcacctgaaattatacttgctgatgaaccaacgggtagtttagatataaaaaatgcaaaagaagtttttaggattttacttaaactaaaaagtaaaaatagattaattatatttgcaactcataatagattatttgctaatatggcagattgcaaaattgaactaattagtggtaagataaaaaagtccactaatgcaaaaatcaaataaa

SEQ ID NO: 274842 - DNA, 724 bp, Unknown
  Bacterial polypeptide expressing nucleotide sequence isolated from the Sargasso Sea
tatgagcgaaaatgatgaatctattctaagcgcaaatgcactatatcacgtttacacttctaaagcagaagatggaaacgttgtcgctttgcgaggattacatgtcgacgtaaagaagggtgaggctgtggctgttgtagggccctctggttcaggaaaatccacattgctgaagtgtcttggcggtttgatgaaagcaagtgcaggaaatgtttctctagatgggaaaaatatgactagattgaccggacaagaattggttgaattgcgacaaaagacggtttcatttatcttccaagaaggaaatctgttacctaacctaaatgcattagacaatgttgctcagccattgcgccatcaaaatgtatctcctaaagaatctaaaagaagggccatggaactactagaagaactaggtatagcacatcgtgctaagggattaccatcgatgttatctggtggagagcaacaacgtgttgcaatcgctcgtgcattgattaccaatcctagattgatactagctgatgagccaactggcgctttagatccaattactagcagggaagtactagcattgttcaaggaattacatgaagagaaaggagtagcgtttttgatagtgacacacagtgctgaagtagcagcattctgtgaccgcagtttagaattgcgtgatggtagatttgttgctcaacacggtactgatttggaaagtgcagacttg

SEQ ID NO: 274843 - DNA, 580 bp, Unknown
  Bacterial polypeptide expressing nucleotide sequence isolated from the Sargasso Sea
atgcaaaagatattatcagcgaaaaatatttctaagagttttgatagttcaaaagttctagattctgttgacctttcgattaatcaaggagaaattattgtgattaccggctcttcaggtgctggaaagactaccctacttaatatacttggaacaattgaaaccccagactttaaagataagtcttctcttaaaatatgtaacgcagatatttttacattagacgatagagaactttcaaaatttagaaataaaaatattggatttgtatttcaatttcatgaattgcttcctgaattcacatgtttagaaaatgtttgccttccaggttggatagataatagtaaaaatatcagtgaaatagaggatagagctattagtttatttgagatattgggtcttaaagacaaggttaagatgaaaccagcaactttatcaggaggtgagaaacaaagagtatctattgcaagatcactaattaataatcctgagattattctagcagatgaaccaagcgggaacttagactctaaaaataccgagaatatttataatattttttggaattatagaaagcgtt

SEQ ID NO: 274844 - DNA, 617 bp, Unknown
  Bacterial polypeptide expressing nucleotide sequence isolated from the Sargasso Sea
gttaagtttttcatttaaatctggaaaaatatattcattagtaggaccatcaggttcaggaaaatcaactcttttaaatctaatttctttaattgaccctcccacatcaggaaatttaaaaatatctaaacaggttatagatttttctgataaaataaataatgacaacctaagagcatcaaaaattggtattatttatcaagataataatcttttacctgattttactgccatagaaaatatttatctagccagattatctatagatgaaaataaaaataaagctctacacgatgcaaaaaaattaattaataaactaggaatatcaaacagatctaatcacttatcttcagagctttcgggtggtgaaatgcaaagagtagctatagctagagcattaatcaactcgcctcaaattatactagccgatgaacctactggtagtttagattttaaaaatgcaaaagaagtttttaaaattttacttagattaaaaagtaaaaatagattaattatttttgcaacccataatagattttttgcaaatatggcagattgtaaaattgagttaaatagtggtaaaataaaaagatccactaatgcaagaatcaaataaa

SEQ ID NO: 274845 - DNA, 433 bp, Unknown
  Bacterial polypeptide expressing nucleotide sequence isolated from the Sargasso Sea
ggtataatatatcaagataataatttactgtctgattttacagctattgaaaatgtttatttatctagattggcagtagatgagaataaaaataaagcattgattgatgcaaaaaaaataattagaaaattaggattgtcaaatagagcaaatcacttggcatcagagctttcaggaggtgagatgcaaagagtagctattgctagagcgctgattaattcacctgaaattatacttgctgatgaaccaactggcagtttagatcttaaaaatgctaaagatgtttttaaaattttgtttaagctaaaaaataaaaatagattaataatatttgcaactcataatagattttttgcaaataaggctgattgcaaaattgaactaattagtggtaaaataagaaaaatcactaatgccagaatcaaatattaaa

SEQ ID NO: 274846 - DNA, 544 bp, Unknown
  Bacterial polypeptide expressing nucleotide sequence isolated from the Sargasso Sea
gatgaatattattggctgtttagatgttccttcaagtggagattattttttcaaggatgagaatatttcaaattttaatgcaaataaacttgctgaactacgtaatagagaaattggttttatttttcaaaatttcaatcttttacctagactgaatgccctagaaaatgttgtcttacctttattatattcaggtaaaaatcagaaagaaagaaataaccttgctttaaaagccctagaaaatgtaggtcttaaagatcgtattcatcatagaccaaatcaattatctggtggtcaacaacaaagagtatcaatagctagagctattgctggttctcctaaattaattttagctgatgagccaactggagcactagatagtaagacaagtatagaaattatgaaaatactaaatgatttaaatgctaaaggtataactgtagttttagttactcatgaagatgatatagctaaatatgcctctagaattattaaaatgaaagatggccagataattgaggataaaaaaaatgtccctaactga

SEQ ID NO: 274847 - DNA, 595 bp, Unknown
  Bacterial polypeptide expressing nucleotide sequence isolated from the Sargasso Sea
aaaattggaagagtttactctttaataggtccatctgggtctggtaaatctacgttattaaatttattatccttaatagacaaaccttcatcaggatcaattaaaataaaaaacaagattataaattatgataatcaaaacgaaaatgatttatatagatcttcatctataggtataatatatcaaaattataatttacttaatgattttacagcgttagagaatgtaagtttagcagagcttgcattaaataataattctaaaacttccgagataaatgcaaaaaaaacgttacataatttaggtctttccaatagagtttatcattatccaactgagctttccggaggagagaatcaaagagttgctattgcgagagctattataaataaacctaaaataattttggctgatgaaccaactggaaatctggatttaaaaaacgccaaaactgtatttaaaaatttgttaaatttaaaaaataaaaaaagattaataatttttgcaactcacaatagagaatttgctgaaatgtctgattgtaaaattgaaatgattgatggtaatatcaaatcaatcaatggaaagttataat

SEQ ID NO: 274848 - DNA, 626 bp, Unknown
  Bacterial polypeptide expressing nucleotide sequence isolated from the Sargasso Sea
tatgaatcctgatggttcaattctgaatgtgagtaacctctttaagtccttccgtcagggggaaaaagttatcgaggtcctaaacggattagatatagacgtaaagattggggagcgaatagggatcgtaggactttctggtagcggaaaaagtactctattgcatatcttaggaggtcttgagcatccagacgcaggcaaaattttgattcacggacagaatattgttcagatggaagaaactgaaattgaccatatcagaaatgctcacattggattcgtttatcagttccaccacttacttccagactttagtgccttagaaaatgtttccttaccaccgctgataaggggagcatcgaagtccgatgcaaaaatgctctctcgggagatcttatataaggttggattggagcaccgcgaagatcatttgcccgccgaattatcggggggtgaaaggcagagagtagctatagcaagggctcttgtgaataaaccatcatgcatccttgctgatgaacctacgggcaacctcgatgagaagactgcaagagacgtaaacgatttgatgatttcgttgagtgagagcttgggtacttcacttgttattgttactcacaattctg

SEQ ID NO: 274849 - DNA, 700 bp, Unknown
  Bacterial polypeptide expressing nucleotide sequence isolated from the Sargasso Sea
atgaatgatatatctaaagttgttttaaaaattgaaaatttatcttacttttatgaaagtgaatttaacaaaatagatatctttaaaaatttaaattttgagatgaaagaaggagaaattattgggttgcttgggccaagtggttcgggcaaaacaacattactaaattgtattggtttattagactccccaaaaggtggtaaaattaaaattttaaatgttgagtgcagtaatgctaatgattttgaaagaacaaaaattaggtcaaaacagattggttttgtttttcaaagccatagacttttaccagaattttcttctgtagaaaatattataattcctcaacttttgttaggtgtagacaaaaaaattgcatataaaaatgcttcagaacttttaaaattgctaaagttaaatcacagatcagaacataggcctgcaaaattatctggtggcgaggcccaacgtgttgcaatagcaaggtcggttgctaatgcaccaaagattattttagctgatgaaccaacaggaaatctggatatagaatctgctaaactagtttttgatttactatataaaattgccaaaatgtcaaaaattagttgtttaatagccactcataacatcgaattagcaaaaaaaatggataaaatttattctattaaggataaaaaattgaagttaacaaaaaatttttaat

SEQ ID NO: 274850 - DNA, 688 bp, Unknown
  Bacterial polypeptide expressing nucleotide sequence isolated from the Sargasso Sea
atgaataatttaattgaattaaaaaatattgttaaaaattataacgctaaaaaaaagataaaagtattaaacaaaattaatttttcgtttaaggctggtaaaatttattcattaatgggcccttctggttctggcaaatcaacactgttaaatttactttctttaattgacactcctaattcgggtatattaaaaatatcaaatcatgtaattaatcataaattgcaaactgataatgacaaattgagagcaaacaaaattggtattatttatcaagataataatttgttgtcagattttacaactattgaaaatatttatttatcaagattatcaatagatgaaaataaagataaagcacttgaagatgcaaaaaaactaattagaaaacttggaattgcaaatagagaaaaccacttggcatcagaactatcaggaggagaaatgcaaagagtagctattgctagagccctaattaattcacctgaaataattcttgctgatgagccaaccggaagtttagatatgaaaaatgccaaagatgtttttaaaattttacttaaattaaaaaataaaaacaggttaataatatttgcaactcacaatagattttttgctaatatggcagattgcaaaattgaattaattagtggtaagataaaaagatccactaatgcaagaaactagt

SEQ ID NO: 274851 - DNA, 460 bp, Unknown
  Bacterial polypeptide expressing nucleotide sequence isolated from the Sargasso Sea
aaggagcggagtgggctggattttccaagacttccacctcgtcgataggctcgacgcactggacaatgtcgccttcagcctggagctatctgggatgtcctcatcggaggctgagggcagggcgatggacgcgctgatgagggtgggtcttgcggatagggtgaatttcattcccgaccaactctcaggggggcagcagcagagagtcgctgtcgcgagggcgatttccgggtccagaccactaatcctagccgacgagccgacagggaacctggacgtcaagagcggccaggaggtcatcaagctgttcaaggacctgtgcgccaacgacggcctatcggtcctgatggtcacccacgacccgatgctcgcatccatggctgacaggatgctcctgctgaaagacggggtgaccgcggcttcggacatccgttcggcctggggaatagaggaggagtga

SEQ ID NO: 274852 - DNA, 893 bp, Unknown
  Bacterial polypeptide expressing nucleotide sequence isolated from the Sargasso Sea
catgtcagacgttgcaatttctgtcgatagactgtcgaagacctttggccgaaacaaggccctcgacgacgtcaacctaagcgtacagaacggcgaaatgatcgccctaatcggcgcctctggctctggtaaatccacgctaattcggcacattgctggtctcgttgcatcggatcgcgacaatgtctccaaggtcagtgtcttcggtagaactgtccagagcggcggccggatcacccgcgatgcacgccaactacgttctcggatcggcgtcatctttcaacagttcaatctggtcggccggctcgcgctgctgaccaacgtcgccattgggtttcttggccgcattccggcctggcgcggaaccgtcggctggttcacccgtgaggagaaaatggcggcgcttgaggcgctggcccgggtcgggatcgacccgtatgccgggcagcgcgcctccaccctgtctggcggccagcagcagcgcgcggctatcgcgcgggcgctcgtgcagcaggccgagatccttctggccgatgagcccattgcctcgctcgatcccgaatcagcgcgccgcgtcatggatgcgctggcggctatcaatcaggaagacaacatcaccgtcgtcgtctccctgcaccaggtcgcctacgcgaagaaatactgcgcgcgtacggtcgcgctgcgtgatggcaaggtcgtctatgacggcccgagcagccgtctcgatacgcagttcctgcgcgaactttacggcgcggatagcgaggaactcatcatggatgagatcataccgtcgccgtcccggcatgttcgggcggatgcggattcccgaacgccgcatcctcttcccgagctgtcacctgcgaacagtggatccccgttttccgcttatg

SEQ ID NO: 274853 - DNA, 353 bp, Unknown
  Bacterial polypeptide expressing nucleotide sequence isolated from the Sargasso Sea
gaatgtagctttaacacttgaacttaataaatttaaaaatcctgaaaagaacgcaaaagaattattggaaagatttgatctaaaacatcgtttcgataacttaccaagtcagttatcaggaggtgagcagcagcgtgtagcaattgcaagagcgattgcgatgaaacctgaattaattttagctgatgaaccaacaggaaatttagatacagaaaattctattatgatctccaagattttatacaattatgttaaagaggagggttcttcattaataatggttacccacgatttgaaacttgcaaataaagctgacagaaaaattaaaattattgacggaaaaattaaataat

SEQ ID NO: 274854 - DNA, 287 bp, Unknown
  Bacterial polypeptide expressing nucleotide sequence isolated from the Sargasso Sea
tagaataaatcatcgacccaatcaattatctggtggtcaacaacagcgtgtttctattgcgagagcaatatctggaacgcccaaccttatattagcagatgaaccaactggtgcattagatagtaaaacaagtattgaaataatgaaaatactaacatctttaaatcagcaaggcataacaataatattggttacacatgaaaatgatctagccgtctatgcaaatagaattattactatgaaagatggaataattattgaggataataaaaatgttattaactgat

SEQ ID NO: 274855 - DNA, 282 bp, Unknown
  Bacterial polypeptide expressing nucleotide sequence isolated from the Sargasso Sea
tttcaaacagattaaatcattttccctcacaactgtctggtggtgaagctcaaagggtggcaatagcaagagcaattattaacgatccccaaattatattagctgatgaaccaaccggtagtttagatatgaatacggctaaagatatttttaaacttttaaataatcaaaaaagatcagacagaataattatatttgcaactcataatagattttttgcaaaaaaagcagattatctattggaaatgagggatggggatataaaatcatcttatgcctgag

SEQ ID NO: 274856 - DNA, 320 bp, Unknown
  Bacterial polypeptide expressing nucleotide sequence isolated from the Sargasso Sea
aaatgccaaaaagatcttatcaaatttaggcctttctaaaagagtaaatcattttccgacagaattatcaggtggtgagaatcaaagagtagcaattgcaagagcaataattaataaaccaaaaataattttagcggatgaacctacgggaaacttagatttaaaaaatgctaaaagtgtatttaagactttattaaacttaagaaataaaaatagattaattatttttgcaactcataatagagaatttgctgaaatgtcagattgtaaaattgaaatgattgatggtaatataaggtccatcaatggaaaattataat

SEQ ID NO: 274857 - DNA, 667 bp, Unknown
  Bacterial polypeptide expressing nucleotide sequence isolated from the Sargasso Sea
catgaacactcttcttaaattaaaaaaaataaatctcaaataccaaactggtaaagaaaatattagtgttttaaagaatatagatttaattattaagaaaaaagaaacagtttctgttgttggtgaaagtggttctggaaaaacaagtttaataatgttaattggaggtttggaaaaacctacatctggtagaataattttccaaaatcacgaatttaatagacttaatgaagatgaaatatctgagatcagaaagaaaaatattggtataatttttcaatcattttatttaattcctaattatacagccaccgaaaatgttgcgcttacactcgaactaaacaattttaaaaatcctgaaaagaaagctaaaattttattagatcgatttggtttgaaacatcgttttaataatcttccaagtcaattgtcaggtggtgaacaacaaagagttgctatagctagagcaattgcgatgaaaccacaattaattttagctgatgaaccgacgggaaacttagatacagaaaattctttaatgattgcaaatattttgtttaattatgtaaaagaggaaggctcatcattaatgatggtaactcatgatcctaagctagcagataaagcaaaaagaaaaataaaaattaaagatggaaaaattaaataa

SEQ ID NO: 274858 - DNA, 658 bp, Unknown
  Bacterial polypeptide expressing nucleotide sequence isolated from the Sargasso Sea
catgagcgttcttcttaaattaaaaaaagtaaatcttaaatataaaactggcaaggctaatataaatgtattgaataatattaacttaattaccaaaaaaaaagaaactgtttcaatagtaggagaaagtggctcaggaaaaacaagtctaataatgctggtgggagggttagagcgagcaacatcaggtaagatatttttccaagatcgggatataactaaattgaatgaggaccaagtatcaaagattagaaaaaaaagtattggtataatttttcagtctttttatttaattcctaattatacagccgttgaaaatgttgcactaactcttgaacttaataaatttaaaaatcctgataggactgcaaaagaattattggatagatttggtctaaaacatcgattagacaatttaccaagccagttatcgggaggtgaacagcagcgtgtagccatcgcgagagcaattgctatgaaacctgaattaattttagctgatgaaccaacaggaaatttagatacagaaaattcaattatgatctccaaaatattatttaattatgtcaaagaagagggttcatcattaataatagtcacacatgattcaaaacttgcgaataaaaccgacagaaaaattaaaattaaagatgggaaa

SEQ ID NO: 274859 - DNA, 358 bp, Unknown
  Bacterial polypeptide expressing nucleotide sequence isolated from the Sargasso Sea
tttggcctcacttgcaattaatgacaataaagaattagcaatatctaatgcacaaaaattacttaaaaaaattggtctttttaagagagcagatcactttccttctcaattatcaggtggcgaggctcaaagagttgctattgcaagggctattgtaaatgatccagaaattattctagctgatgaaccgactggaagtttggatatggaaactgcaaaagatgtttttgaacttttaaacaggcaaaaacggtcggatagattaattatatttgcaactcataatagattttttgctaataaggcagattgcctattggagatgatggatggtagtataaaatcatctaatgcttga

SEQ ID NO: 274860 - DNA, 507 bp, Unknown
  Bacterial polypeptide expressing nucleotide sequence isolated from the Sargasso Sea
ttggaggcttagaaaaaccaacttctggtaaaataatttttaatgatcaagatataacaggcattagtgaagacgaagtgtcggagataagaaagaaaaatattggaataatatttcaatcattttatttaattcctaattacacagcagttgaaaatgttactttatctcttgaacttaataattttaaaaatccagagaatgaagcaaaaattttattagatcgatttggtttgaaacatcgttttaataatttaccaagtcaattatcaggtggtgaacagcaacgagttgctatcgctagggcaattgcaatgaagcctgaattaatcttagcagatgaaccaacaggaaacttagatactgaaaattctatcatgattgcaaatattttatttaaatatgtgaaagaagaaggttcgtctctaatcatggtaacccatgaccccaaacttgctgacagggctaaaagaaaaataaaaattaaagatggaaaaattaaataat

SEQ ID NO: 274861 - DNA, 715 bp, Unknown
  Bacterial polypeptide expressing nucleotide sequence isolated from the Sargasso Sea
atgaataaaattttattagaaacaaatgatttaacaaaaagttatgagcatttaaacggaactataactttgttcaagaattttaacataaagattaaaaaaggagatctagtagctttggtaggtccatcgggatctggtaagtcgtcgttacttcatttactagctttattagatgaaccatcaaaaggaaaaataattattgataaacaggagactaaaaatctatctaataataaaagagacgaattaagaagaaaaagtatctcagtaatttttcaagataacaatttattaactgattttactgctttagaaaatataatgatgcctctaatcattaaaggcgaaaaaagtaaaactatatcagaaaaagcctctaaaattatgaaagatcttaaaattcaaaatagatcaaaccattttccaaatgaactttcaggcggtgaacagcaaagagttgcaatagctagagcattgattgcagagacaaaattaatattagctgatgaaccaactggtaatttagattttaaaacctcaaaagaaattttttcactatttataaaattaaaaaaacttggaaagactgtaatctttgcaactcacaatagagaacttgctaacagggctgattacaagttgtatatttctgatggtattataaaacagagtgaatgctcgctaagaaaaaaaatcaatcatataaaaatac

SEQ ID NO: 274862 - DNA, 667 bp, Unknown
  Bacterial polypeptide expressing nucleotide sequence isolated from the Sargasso Sea
aaaatcaaaaacgttacaaaaaattttattaacaataagcttatagtaaaggttttaaaaaatttaaatcttgaattggaaatgggcaatattattgctttaataggtccgtcaggatcgggcaaatccacacttttgcatcttattgctcttttagacaagcctacaactggaaacatatcaattttaggaaaagaaactttgaatattgcagaggatgaaaaaaacaaaattattagagataatatatctattatatttcaaaataataacttgctatcagattttacagctatagaaaatgttgcgatgccacttataattagaaacaatagttattcagactcaatacaaaaggcagagaagtttttaaaaaaagttaatctcagtcatagactaagtcattttccatccgatttatcaggtggtgaacaacagagagttgcaatcgcaagatcattaattgcagacacaaaaattatattagcagacgaaccaacaggtaatcttgatgtcaaaaattctaatgaggttttttcatattttttaaaattaaaacaaaaaaacaaaataattttaattgcaacccataatagagaaattgcaaaaaaagcggattatactttaagcataagcgatggtaatataaaaagagttaatggatgat

SEQ ID NO: 274863 - DNA, 667 bp, Unknown
  Bacterial polypeptide expressing nucleotide sequence isolated from the Sargasso Sea
catgagtactcttcttaaattaaaaaaaataaatctcaaataccaaactggtaaagatagtatcagtgttttaaagaatattgatttaaatattaagaaaaaagaaactgtttcagtagttggagaaagtggctcagggaaaacaagtttaataatgttaattggaggtttagaaaagccaacttctggtaaaattatttttcaagatcaagaaattactggattaaatgaagatgaagtatcagaaattcgaaaaaaaaatattggaattatatttcaatcattttatttaattcctaattacacagcagttgaaaatgttgctttaacgcttgaacttaataattttaaaaatccagagaaagaagcaaaaattttattagatcgatttggtttgaaacatcgttttaataatttaccaagtcaattatcaggtggtgaacaacaaagagttgctatcgctagggcaattgcaatgaagcccgaattaattttagcagatgaaccaacaggaaacttagatactgaaaattctatcatgattgcaaatatattatttaaatatgtaaaagaagaaggttcctctttaatcatggtaactcatgaccctaaacttgctgacaaagctaaaagaaaaataaaaattaaagatggaaaaattaaataa

SEQ ID NO: 274864 - DNA, 445 bp, Unknown
  Bacterial polypeptide expressing nucleotide sequence isolated from the Sargasso Sea
atttttagattaaagaatataggatttgtttttcagtcttataatttaattcctgtacttacagcaaaagaaaacatcgagtttataatgctaatgcaaggatattcaaaagcaaaaagaaatgaacgggccttgggattattagatgcagttggtttaagcgatgaatctaaaagaaggcctggacaactatctggtggtcaacaacaaagggttgcagttgctagagcactcgcttcaaaaccaaagtttatacttgcagatgaaccaactgctaatttagattcaacttcaactaaaaatttactagatataatgtatgatcttaataggaaagaaaaaatgacatttatcttctccactcatgaccagcgagtcatagatagagcaaaaagagtaattaccttagaagacggaaaaattctttctgataagacaacttaat

SEQ ID NO: 274865 - DNA, 478 bp, Unknown
  Bacterial polypeptide expressing nucleotide sequence isolated from the Sargasso Sea
agatacaaaaattttaaaagatgaaaaaaaagatctaataagaagagaaaggatatcaattatttttcaagataataatttactctcagattttactgcctttgagaatgtaatgatgcctttaataataagaggagaaaaatctatttctgcaacaaaaaaaacaaataaaatttttaaagaagttaaaatttttaatagaatagatcactttccaaatgaaatgtcaggtggagaacaacaaagagttgctattgctagagccttggttgcagagactgatttaattttagctgatgagcctactggaaatttggattataaaacttcagaagatatattttcttattttttaaagttaaaaaaattaaataaagctataatttttgcaactcataatagagaacttgccaacaaggcagattataagttgagtatttctcgaggtaatataaaacgaattaatggcccttcctag

SEQ ID NO: 274866 - DNA, 277 bp, Unknown
  Bacterial polypeptide expressing nucleotide sequence isolated from the Sargasso Sea
tctaatcattttccaaaagaactttcgggcggtgaacaacaaagagtagcaatcgcaagagctttggttgcagaaactaaattgattttagcagatgaacctactggcaacttagattttaaaacttctaaagaaattttttcactttttttaaaattaaaaaaactaaaaaaaacaataatatttgcaactcacaatagagaacttgctaacagagctgattacaagttgtttatttctgaaggtaatataaaacgagctaatgctctcaagtgat

SEQ ID NO: 274867 - DNA, 324 bp, Unknown
  Bacterial polypeptide expressing nucleotide sequence isolated from the Sargasso Sea
ttaataatgaaaaaaaaaaagctacttcgcttctttcagatataggtctagatcatcgaaaagataatttaccttctgaattatcaggtggtgaacaacaaagagttgcgattgctagagcgatttcatttggtccagagattatcttggcagatgaacctactggaaacttagatacaaaaaatacaaaattagtatctgatttgctgttgaaatattctaagaaaaaaaaaattactttaattttagttactcataatatggaattggcaaaaaagtgtgatagaattttaaacatcattgatggtcgaataaaagtttaac

SEQ ID NO: 274868 - DNA, 448 bp, Unknown
  Bacterial polypeptide expressing nucleotide sequence isolated from the Sargasso Sea
gaagaaaaaacagttaataagagaggatatttcaataatttttcaaaataataatttgttatctgattttactgccttagagaatgtggctatgccattaattatacgagatgaaaaatataaaaaatctactctaattgccgaaaaatttttaaaaaaagtaaatttgggtcataggctaaatcattttccatccgatttgtctggtggtgaacaacaaagagttgcaattgcaagagctcttattgcggaaactaaaataatccttgccgatgaacctactggcaatctagataataaaaatgctaaagatatattctcctattttttgaagttaagagaaaaaaataaaataatattaattgcaactcataatagagaattagcaaaaaaagctgattatgctttaagcattagtgatggtgatataaaaagaatcaatgtctga

SEQ ID NO: 274869 - DNA, 481 bp, Unknown
  Bacterial polypeptide expressing nucleotide sequence isolated from the Sargasso Sea
aataaatataacgtaaattttaataatacagaaaaaaatgacatttttagatcaaaaaaaataggaattgtttaccaacaaaacaatctacttcctgattttacagcgttagaaaatatatatttggcttcacttgcagttaataaaaacaaagtatcagcaatttcaaatgctgaaaaattgcttaaaaaaattggtctttcaaaaagggcagatcattttccttctcaattatcagttggtgaggctcaaagagttgctatagcaagagcaattgtaaatgatccagaaattattttagcagatgaaccaactggaagcttagatatagaaactgcaaaagatgtttttgaacttctaaacaatcaaaaaaggtcaaatagacttattatatttgcaactcataatagattctttgccaacaaggcagattgcctattggagatgatagatggtagtataagatcagctaatggctgag

SEQ ID NO: 274870 - DNA, 550 bp, Unknown
  Bacterial polypeptide expressing nucleotide sequence isolated from the Sargasso Sea
gttggagaaagtggctcaggaaaaacaagtttaataatgttaattggaggcttagaaaaaccaacctctggcaaaattatttttaatgatcaagacataacaggacttagtgaagatgaagtgtcggagataagaaagaaaaatattggaataatatttcagtcattttatttaattcctaattacacagcagttgaaaatgttgctttaactcttgaacttaataattttaaaaatccagaaaaagaagcaaaaattttattagatcgttttggtttgaaacatcgttttaataatttaccaagtcaattatcaggtggagaacagcaacgggttgctatcgctagagcaattgcgatgaaaccagaactaatcttagcagatgaaccaacaggaaacctagatacagaaaattctatcatgattgcaaatattttatttaaatatgtaaaagaagaaggttcgtctttaatcatggtaactcacgatcctaaacttgctgacaaagctaaaagaaaaataaaaattaaagatggaaaaattaaataat

SEQ ID NO: 274871 - DNA, 639 bp, Unknown
  Bacterial polypeptide expressing nucleotide sequence isolated from the Sargasso Sea
tatgagtaaaattttattagagataataaatctaagaaaaacttataagcatgttaacgggaatataaatttatttaacaatcttaatttaaaaattaaacaaggagaccttatagctttagtaggtccatctggatctggcaagtcatcattacttcatctattggctttattagatgaaccgactaaaggtgatattaaaataaataacgactttactaaaaaatttgctgatcaagagaaagatgaagtaagaaggaaaaatatttcaattatttttcaagataataatttattaaacgatttcacagctattgaaaatgtaatgatgccgttaattattaaaggtgaagatatggaaaatgctaaaaataaagctaaaacaattcttaaaacaatgaaaatatttgatagatctcaacattttccaaaagagttgtcaggtggagaacagcaaagagtagctattgctagagctgtaatagctgagacaaatataattttagcagacgaaccaactggcaacttagattttaaaacttcaaaagaaatattttcttattttttaaaattaaaaaaattaaagaaaacaataatttttgcaactcacaatagagaacttgctaacagggctgatta

SEQ ID NO: 274872 - DNA, 448 bp, Unknown
  Bacterial polypeptide expressing nucleotide sequence isolated from the Sargasso Sea
gcttgtcggtttagtaatagaaaaaatcatatgccttatgaattatcaggaggagagcaacaaagaattgctatagcagttgcattatcaaataatccacccttaatattagccgacgagccaactggcgaattagacgatgaaacatctcaaaatatactggatttacttaataaattaaatcaaaaactaaataccacaattgttatagttacccatgaccctaaaatttctaatgatgttagtaggagtattactattaaagatggaaaaactagtttagaaacacaaataattaataatgaaaaaaatgaatatttactaatagattctattggttctttacaaataccaaaaaaaatattagatagtaataatattgataaaagagttaaaatttataatgaaggcggagtaataaaaatagaggcggataatgaaaaatgaa

SEQ ID NO: 274873 - DNA, 573 bp, Unknown
  Bacterial polypeptide expressing nucleotide sequence isolated from the Sargasso Sea
catgagtgctcttattaaattaaaaaaaataaatctcaaataccaaactggtaaagagagtatcagagttttaaagaatattgatttaaatattaagaaaaaagaaactgtttctgttgttggagaaagtggttcaggaaaaacaagtttaataatgttaattggaggcttagaaaaaccaacttctggtaaaataatttttaatgatcaagaaataacaggtctgagtgaggacgaagtatctgagataagaaagaaaaatattggaataatatttcagtcgttttatttaatccctaattatacagcagtcgaaaatgttgcacttacacttgagcttaataattttaaaaatccagaaaaagaagcaaaaattttattagatcgttttggtttgaaacatcgttttaataatttaccaagtcaattatcaggtggcgaacaacaaagggttgctattgctagagcgattgcgatgaaaccagaactaatcttagcagatgaaccaacaggaaacttagatactgaaaattctattatgattgcgaatattttatttaagtacgttaaaga

SEQ ID NO: 274874 - DNA, 562 bp, Unknown
  Bacterial polypeptide expressing nucleotide sequence isolated from the Sargasso Sea
tggtccatctggatcaggcaaatcaacttttttacatttaatatcattattggatattccatcgaaaggaaaaattaagattttaggaaaatcaattacagatctttctgataatgaaaaaaataaactaataagagagcatatttcaataattttccaaaataataatttgttatcagactttacagcacttgaaaatgtagcttttccattaataatacgcgacaaagattataaaacttccacaaaattagcagagaagtttttaaaaaaagttaatttaggacacagattaaatcattttccctcagatttatctggaggtgaacaacaaagagttgcaatagcaagagcacttattgcagaaactaaaataattcttgctgatgaacccacaggaaatttagacaataaaaattccaaagaagtattctcttattttttaaagcttaaagagaagaataaaataatacttattgcaactcataatagagaattagcaaaaaaagctgattatactttaagcatatttgatggtaatataaaaagagttaatgtctga

SEQ ID NO: 274875 - DNA, 469 bp, Unknown
  Bacterial polypeptide expressing nucleotide sequence isolated from the Sargasso Sea
aggaattttaaagacgaaaaaaaagatgaaataagaagaaataatatatcaattatatttcaagataataatttattgacagattttactgctattgaaaatgtaatgatgccattactcataaaaggtaaaaacaaaaaaaatgccagggaaatagcagaaaaaattttaaagtcagtgaagattttacaaagatctaaccattttcctaacgagctttcaggcggagagcaacaaagagtcgctattgctagagctttaatagcggaaacaaatctaattttagccgatgaaccaacaggaaatttagaccgcaaaacatctatagaaatattttcgtatttcttaaaattgaaaaaattaaaaaaaacaattatttttgcaactcacaatagagaacttgccaacagggctgattacaagttgtttatttcagatggtattataaaacgggtgaatgttaaataat

SEQ ID NO: 274876 - DNA, 634 bp, Unknown
  Bacterial polypeptide expressing nucleotide sequence isolated from the Sargasso Sea
actggaaaaaaaaattaatgtattaagaagtctatctagaaaatttaagccaggtaaaatctacgcaataatgggcccatcaggttcaggaaaatcaactttattaaatttaatttctttaattgataagccaacatctggtacggttaagtataataaagttgagattaattttgatcaaaatgaaaaaaacgatttatttagagcaaaaaaaataggtattgtttaccaagaaaataatcttctttctgattttacagcgctggaaaatgtttattttgcttctttatccttaaataacgacaaaaaattagcaatttctaaagctgaaaaattgttgaaaaaaattggactttcaaacagattaaatcattttccctcacaactgtctggtggtgaagctcaaagggtggcaatagcaagagcaattattaacgatccccaaattatattagctgatgaaccaaccggtagtttagatatgaatacggctaaagatatttttaaacttttaaataatcaaaaaagatcagacagaataattatatttgcaactcataatagattttttggcaaaaaagcagattatctattggaaatgagggatggggatataaaatcatcttatgcctga

SEQ ID NO: 274877 - DNA, 674 bp, Unknown
  Bacterial polypeptide expressing nucleotide sequence isolated from the Sargasso Sea
attggaaacaactaacttaaaaaaaagctttgaccatgttaacggttcaattactttattcaataatttcaatattaagtttaaagagggagagcttgtagctttagtagggccctcaggttctggaaaatcatcattgctccatttactaggacttcttgatcaaccaactaaaggaaacataacgttaaatagagaggtaacaaaaaaactttctaacactcaaaaagatgagataagaaaaaaaaatatttcaattatatttcaagataataacttattaaatgatttcactgctatagaaaatgtgatgatgcctttgattattagagaggacaacaagcaagccatacaaaaaaaagcagagaaaatattaaatgagttgaagattttaaatagatctaatcattttccaaatgaattatctggaggagaacaacaaagggttgctattgctagagctcttatcgcagaaacaaatttaattctagctgatgaaccaactggaaatttagattttaaaacttcaaaagaaatattctcacttttcttaaaattaaaaaaactcaaaaaaacaattatatttgcaactcacaatagagaacttgctaacagggctgattacaagttgtttatttctgaaggtactataaaacgagttaatgctcgttaac

SEQ ID NO: 274878 - DNA, 793 bp, Unknown
  Bacterial polypeptide expressing nucleotide sequence isolated from the Sargasso Sea
atgatagatgataaaatagacaaggatgcaattcttcaagctatagcattgtatcatgtctattcttcaacggccgaggatgggaatgtagtagcattaagaggattaaatgtctctgtcaaaaagggtgaagctgttgccatagttggaccttctggctcaggaaaatctactttgctaaaatgtctgggagttttgatgaaaccgtcggccggtggagtcattctaaatggaatctcaacaacaagaagaacgggtattgaattagtcaaaatgcgtcaagagactgtctcatttatctttcaagaaggtaatcttctcccagatttaagtgctatagacaatgttgctcaagctttacgccataaagacgtaaggccatcagaagcaaagagtaaagctaaggaaattttagttgaactaggtttagaggagcgtatcaacagtatgcctgaaacgctttctggaggtgaacaacagcgggttgccattgcacgagctcttgtcactgaacccaaattaatactagctgacgagcccactggagcacttgaccccattactagtagagaagttttagaattatttggaaagctccacagagacaaaggtgttgcgttcttaatcgtaacacacagtgatgaggtggctgcattttgtgatcgcagtcttgaactacgtgatggaagatttgtagcagagcatggaactaatcttgatgttgatgacttagaaggaacaagagaattaattgtagatgaactagggactgtttccttcccacctgaagtat

SEQ ID NO: 274879 - DNA, 346 bp, Unknown
  Bacterial polypeptide expressing nucleotide sequence isolated from the Sargasso Sea
ctgggtattcaaatcagaaagaaatgaacgtgccacagaagttttaactcaagttggtttagcagacagaatggatcacaaacccaaccaactttctggaggacaacgtcagcgtgtggctgttggacgtgctttggtcaacaaaccttctatcattcttgccgatgagccaactggaaacttagacagtaaaacttctgtagaaatcatgggcctttttgatgaaattcatgccaatggaaatacggttatacttgtaacacacgaagaagacattgcagaacatgcacatagaattatccgtttaagagatggagtgattgaaagtgataagaaaaataaataa

SEQ ID NO: 274880 - DNA, 646 bp, Unknown
  Bacterial polypeptide expressing nucleotide sequence isolated from the Sargasso Sea
atgtctacgcttctaagattaaaaaaaataaatcttaaataccaaactggcaaagataatatcagagttttaaataatatagatttaaatattgagaagaaagaaactgtgtcagttgtaggtgaaagtggttcaggaaaaactagtttaataatgctagttggtggattagagaaaccaacctctggaaagattattttccaaaatcaagaaattacaagccttaatgaagatgaagtgtcagaaattagaaaaaaaaatattggaattgtatttcaatctttttatttaatcccaaattatactgcagttgagaatgttgctttaacacttgaactaaataattttactaatcctgagaaagaagcaaaaattttattagatcgttttgctttaaaacatcgttttaataatcttccaagtcaattatcaggtggggaacaacaaagagtagcaatagcgagagctattgctatgaaacctcaattaattttagctgatgaaccaacaggtaatttagataccgaaaactctatgttgatctcaaatatattatttaaatatgtgaaagaagaaggttcttcattaattatggcaactcatgatcctaaacttgcagataaagcaaaaagaaaaattaaaatta

SEQ ID NO: 274881 - DNA, 499 bp, Unknown
  Bacterial polypeptide expressing nucleotide sequence isolated from the Sargasso Sea
tctggggtcaatccattttgataaaattcctgtaaattttaatgaatccgaaaaaaatgatgtttatagatccaaaaaaataggaattgtttatcaacaaaataatcttctcccagattttactgctttagaaaatatatatttgtcctcacttgcaattaatgacaataaagaattagcaatatctaatgcggaaaaattactcaaaaaaattggtctttctaagagggcagatcactttccatctcaactatcaggtggagaggctcaaagagttgctatagcaagagcaattgtaaatgatcctgaaattattttagcagatgagccaactggaagtttggatatggaaactgcaaaagatgtttttgaactattatataaacaaaaaaagtcagatagacttattatatttgcaactcataatagattctttgccaataaggcagattgtctattggagatgatagatggtagtataaaatcatctaatgtctga

SEQ ID NO: 274882 - DNA, 592 bp, Unknown
  Bacterial polypeptide expressing nucleotide sequence isolated from the Sargasso Sea
acttagaacaattaatggacttgagacctcaagtggaggagaaattttttttgataacaaaaaaatagataataacagcattccagaagttcaaaaaaagactggaatgatttttcaagaatttaatctagtaaataatctatcagcaataaataacgttcttacaggtcttttaaatactagtaataaatttttgtctttattttatttatttaaaaaagatcaaaaaattgaagctttaaaatctttaaaaacagttggtttacttgagaaatcttataacagatctgatgaattatctggaggccaaagacaaagagttggaatagcaagagctataattaaaagaccattattattgttagctgatgagcctgttgcaagcctagatcctaaagccgcaaatttgattttatctctattaaagaaaattaataaagaatttggcacaactattctttgtaaccttcatcaagttgatttagcaaaaaaatactcagatagattagtaggtcttttggacggaaagatcatatttgatgaaaaatctgaaaatattaataaatctaatttagaaaaaatatacgtataa

SEQ ID NO: 274883 - DNA, 543 bp, Unknown
  Bacterial polypeptide expressing nucleotide sequence isolated from the Sargasso Sea
gttcagggaagactacattgctaaatattttagcatgtttagatagaccaactagcggtgtatataatttttttggtgaagatgtttcatctaagactaatgatcaaatgtctgaaataagaaacctacgaattggttttattttccaaagctttaatcttataccaaggcatactgctttagaaaatgttatgatgcctcttcattattcagatagacataaaagttcaaactttaaagaaatgggcctgaatgctttagatttggttgggttatctgacagaactgggcattaccctaatgaattatctggtggtcaacaacaaagagttgcaatagctagagcattagtaactaatcctgaaattattttggcagacgagccaactggaaatctagactcaaagaccagcgatgatattatgtcattgttaaaaaatttaaattcgaatggtaaaactgtaataacaattactcatgacaatgaaatagcttcacaggcttctgaaattataaaaattaaagacggtagggttctatagg

SEQ ID NO: 274884 - DNA, 601 bp, Unknown
  Bacterial polypeptide expressing nucleotide sequence isolated from the Sargasso Sea
gaacgtcagcgtgatctttcagcagttcaatctggttgagcgtttgtcggtcatgacgaatgtgctaacgggatacctcgggcagatcaacggtctgcgcgggacgttcggcttcttttcgcgagacgagaagcacgcggccatgcgcgcgcttgcccgcgtcggcatagccgagaccgcgccccaacgcgcatcgacgctgtccggcgggcaacaacagcgggcagccatcgcgcgagcacttgtgcaagggtcggagatcatactggcggacgagccgattgcttcactcgacccggcgtcctctaaacgtgtcatggagacgctgcaggagataaaccaaacggacaaaaagacggtcgtcgtctctctgcaccaggtcgattacgcgatgcgatattgctcgcgcgccgtcgctcttcgcgaaggtgaaatcgtctatgatgggccaagcgcggccttcaattcggcaatgctacgggacctttatggcgccgactgcgacgaacttctcagcgaaaatgccgaacccgcaatgcaaaatatccgcccgctaccaacgccgcaattggatgcatccattaaggcggtgacggcctaa

SEQ ID NO: 274885 - DNA, 251 bp, Unknown
  Bacterial polypeptide expressing nucleotide sequence isolated from the Sargasso Sea
accaagtcaattatcaggtggtgaacaacaaagagttgctattgcaagggcaattgcaatgaagcctgagttaatcttagcagatgaaccaacaggaaacttagatactgaaaattctatcatgattacaaatattttattcaaatatgtaaaagaagaaggttcctctttaatcatggtaactcatgaccctaaacttgctgacaaagctaaaagaaaaataaaaattaaagatggaaaaattaaataat

SEQ ID NO: 274886 - DNA, 601 bp, Unknown
  Bacterial polypeptide expressing nucleotide sequence isolated from the Sargasso Sea
tatgaataatataattgagctaaaaaatattgttaaaaattatcataaaaagaaaaaaattagagtactaaacagagttaaattttcttttaaagctggtaaaatatattctttaatgggtccctctggatcaggtaaatcaacacttttaaatttactttctttaatagatataccaacttcaggtactattaaaattttaaataattcaattgatttttcattaaaatctcagaatgataaattaagggcaaaaaaaattggaataatttatcaagataacaacttattaaatgattttactgtaattgaaaatgtttatctagcaagattatgtttagaggaaaataaggaaaaagctatccttgatgcaaagaaattaattaaaaaactaggattatcaaatagagaaaaccatttatcatccgagctttctggtggtgaaatgcaaagggttgctatagcaagagcattaattaattcacctgatattatacttgctgatgaaccaactggtagtttggacatgaaaaatgcaaaggaagtttttaaaattttacttaaacttaaaaacaaaaatagattaataatatttgcaact

SEQ ID NO: 274887 - DNA, 631 bp, Unknown
  Bacterial polypeptide expressing nucleotide sequence isolated from the Sargasso Sea
atgaataatttaattactcttaacaaaatatctaaatctttcataacgagtaaaaagattaatgttctaaaaaaaattagctttaagtttaatttaggaaaaatgtattcaatagttggaccatctggttcaggaaaatctacattattaaatattttatctttaatcgacaaacctacttcaggaataatttcaattaatggaaacaatataaattttcttaactcttctacaaatgatagaataagagctgaaaaaataggaattatttatcaacagaataatttactcccagactttacagctttagaaaacatttatcttgccaaattatctttaataaataacaaaaaaaaagctgttcagtctgcaaatgacattattaaaaaaatgggtctaattgatagaataaatcattatccctcagagttatcaggcggggaaattcagagagttgcaattgcaagggctttaattaacaagccacaaattatacttgcggatgaaccaactggtagtttagaccagactacagcaaaagatgtatttaatgttttgcataaacttaaaaattcaaacagaataattatttatgcaactcataatagatattttgctaataaggcagatt

SEQ ID NO: 274888 - DNA, 384 bp, Unknown
  Bacterial polypeptide expressing nucleotide sequence isolated from the Sargasso Sea
attttacagcattggaaaatgtttattttgcttctttatcggttaataacgacaaagaattagcaaaatctaaagctataaaattattaaaaaaaattggactttcaaacagattaaatcattttccatcacaattatctgggggcgaggctcaaagagttgcaattgctagagcaattattaatgatcctcaaattattttagcagatgaaccaactggtagtttagatttaaatactgctaaagagatttttaaacttttaaataaacaaaaaagatcagacagaataattatatttgcaactcacaatagattttttgctaaaaaagcagattacctattggagatgagagatggtagtataaaatcatctaatgtctgag

SEQ ID NO: 274889 - DNA, 625 bp, Unknown
  Bacterial polypeptide expressing nucleotide sequence isolated from the Sargasso Sea
tctgaaagacgagaatttagaagagaagttcaacctatctttcaagacccatatggatcctacaatcccttttataaagtagatcatgttcttttcacaccaataaagaattttaaaatggctgaatcacgtgatgaagcagtggatatggttgaaaaagcattagagcttgttggtttagttccagctgaaactcttggcagacttccgcatcaattaagtggtgggcaaaggcaaagggttatggttgctagggcattgcttttaaaacctagagtgattttagctgatgagccagtatcagctgtagatgcctctttgagagctacaatattagatgcagtttcaaagttaaataaagatcttggaatagcgcttgtttatgtaacccatgatttaactactgcgtaccaaataagtgatgaaataatgatcttatttaaaggtaatttggttgaagcaggagatgttgaaaccgtaataaaagacccaaagcacccttacactcaacttttaattgattctattccagaagcagatccaggtaaaaaatggggtaagcttgatatggaaaagacacaaaataaaatattaacttcaccttctgttggctggagaaaataat

SEQ ID NO: 274890 - DNA, 667 bp, Unknown
  Bacterial polypeptide expressing nucleotide sequence isolated from the Sargasso Sea
atgactacacttcttaaattacaaaatgttaaccttaaatatcaaaacgataaaaagaatttaaaagttttaaacaatattaacctaactgttaaaaaaaaagaaactatatcaattgtaggggagagcggatcaggaaagacaagtttgataatgcttataggtggattagaaaaagccacttctgggaaaatatattttaataataatgatttaacgaatttatcagaggataaaatctcagaaattagaagaaaaaatataggaatagtatttcaatctttttatttaatacctaattattctgctttagaaaatgtagcattaactttagaattaaataagttcagaaaccctaacagtcaagctaaagaattattatacagatttggattaaaaaatagatttaacaacctgccaagtcaattgtcagggggggaacagcaaagagttgccattgcaagggcaatagctatgaaaccagaattaattttagctgacgagcctactggcaacttagatagtgaaaattctctgatgatatcaaaaatactatttaattatgtagcagaggaaggatcatctttaattatggtaacacacgatcataaacttgcaaataaatcaaaaagaaaaatcaaaattatagatggtaaaatttcctaaa

SEQ ID NO: 274891 - DNA, 502 bp, Unknown
  Bacterial polypeptide expressing nucleotide sequence isolated from the Sargasso Sea
actgttttccaaaatgttttaactggtcgacttggatttcattcactatttagaagcattttacctcttccaaaatttgatcaagaacttgctctcgattgcatagatagagttagcctcttagacaaagcgcttgtaaaagtaaaagaattaagcggaggacaacaacaaagagtaggaattgctagagctttagctcaaaatccttcgttgattttggcagatgaacccatagctagtcttgacccaaaaacttcccatcaagttttatcgatgctgaaagatatttgtaagaaagataatatatccgcattaactagtcttcaccaagttgattttgctaaagaatatggagatagaattattggcttaagtcatgggaaaatagtttttaatggtaaatcagatcaactttcagacgagattttaaaaaatatttattcatcttcaccaataacagaagaagcaaattttacctcaaatgaagtggtaatggtttaaa

SEQ ID NO: 274892 - DNA, 554 bp, Unknown
  Bacterial polypeptide expressing nucleotide sequence isolated from the Sargasso Sea
ggaaatttattttgataatcaaatagtaaataacaatactattccagaagtccaaaaaaaaactggaatgatctttcaagaattcaatctagtaaacaatttatctgcaataaacaacgtcttaactgggctattaaattcaagtaataaattcttatctttattttatctatttaaaaaaactcaaaaaattgaagctttaaaatccttaaaaacagttggtttacttgaaaaatcttataatagatctgatgaattatccggtggtcaaagacaaagagttggaattgcaagagccatcactaagagaccattgttattattagctgatgaacctgttgctagtttagatcctaaggctgcaaatttaatcttatctttgttaaagaaaatcaataaagagttcggaacaacaattctgtgcaatcttcatcaagtagatctagcaaaaaaatactcagatagattagtaggtcttttggatggtaaaatcatatttgatgaaaaatctgaaaatattaacaaatctaatttagaaaaaatatacgtttaaa

SEQ ID NO: 274893 - DNA, 685 bp, Unknown
  Bacterial polypeptide expressing nucleotide sequence isolated from the Sargasso Sea
atgaaaaaaaagatactcatccaaactactgatttaagtttatcatttccatcagcatctggtaaactacaaattttaaattcagtaaatttttcactatttgaagaagaaactgtggcacttgttggaccatcaggttcaggaaaatcttctttattaatgttattgggtggtcttgaagatagtgaatctggttcaattattgttaatggtagtgaaatcactaaattatctgaagaccaattaactaacttaagaaaaaatacaattggaataatatttcaatctttccacttaattcccacaatcacagcccttgataatgtatctattcccttagaattagcaggttatttaaatgtaaaaaatagagcaattgaaattcttaatgaagttggcttagaaaaaagattaaaccactttccttctcagttatctggaggagaacaacaaagagttgcaattgcaagagccttggcaataaaaccaaaaattattttagcagacgaacctactggaaatttagatcaaaatactgggttaaaaattattgatcttctttttagtttaaataaaaaaaataaaagtagcctagttatagtaactcactcaactgaacttgcaaaaaaatgtcaaaggcaagttaaattagagaatggaaaaacattagaaagtcaccggtaac

SEQ ID NO: 274894 - DNA, 292 bp, Unknown
  Bacterial polypeptide expressing nucleotide sequence isolated from the Sargasso Sea
aaaatttctaacagagctaatcattttccaaatgaattatctggaggtgaacagcagagagttgcgatagcgagagctttagttgctgaaacagatttaattttagcagatgaaccaactggaaatcttgattataaaacatcagaggaaatattttcatattttttaagattgaaaaaattaaaaaaaacaataatttttgcaactcataatagagaacttgctaacaaggcagattacaagttgagtatttctaagggtgatataaaacgagttaatgctcgctcataaa

SEQ ID NO: 274895 - DNA, 688 bp, Unknown
  Bacterial polypeptide expressing nucleotide sequence isolated from the Sargasso Sea
tatgaataaaattttaattgaaactgtaaatctcaaaaaaacacataagcattttaatggcgacataactttatttaataatctcaatttaaaaatcaaacagggagatctcgttgcattagtaggtccttctggatctggaaaatcttcattgcttcatttattagctttattggatgaacctactaaaggtgatattaaaataaatgatattttaacaaaaaaatttacagacgaaaaaaaagatgaaactagacgaagaaatatatcaattatttttcaggataataatttattgaatgactttactgctattgaaaatgtaatgatgccgttaattattaaaggtgaaaatttagtcaatgctaaaaaagaggctcaaaaaattcttaaagctgttaaaatttcagataggtcacaccattttcctaatgaactttctggcggagaacaacaaagagttgctatagctcgagcacttatagctgagactaatttaatattagcagatgaaccaaccggcaacttggattttaaaacttcaaaagaaattttttcttattttctaaaattaaaaaaattaaaaaaaacaattatttttgcaactcacaatagagaacttgctaacagggcagattacaagttgtttatttcaaatggtgatataaaacgagttaatgctcgttaa

SEQ ID NO: 274896 - DNA, 625 bp, Unknown
  Bacterial polypeptide expressing nucleotide sequence isolated from the Sargasso Sea
attaaagaagattaatttttcgtttaaagctgggaaagtttattcattaatgggtccttcaggttctggtaaatcaacactgttaaatttactctccttaattgacactcctaattcgggtacattaaaaatatcaaatcatgtaattaatcataaattgcaaactgataatgataaattaagagcaaacaaaattggtattatttatcaagataataatttgttgtcagattttacaacaattgaaaatatttatttatcaagattatcaatagatgaaaataaaaataaagcactggaagattcaaaaaaactaattagaaaacttggacttactaatagagaaaatcacttagcatcagaactttcaggaggagaaatgcaaagagtagctattgctagagctctaattaattcacctgaaatcattcttgctgatgagccaaccggaagtttagatatgaaaaatgctagagatgtttttaaaattttacttaaactaaaaaataagaacaggttaataatatttgcaactcacaatagattttttgcaaatatggcagattgcaaaattgaactaattagtggtaagataaaaaggtccactaatgcaagaatcaagtaa

SEQ ID NO: 274897 - DNA, 363 bp, Unknown
  Bacterial polypeptide expressing nucleotide sequence isolated from the Sargasso Sea
tatgttaattggaggtcttgaaagagcaacttcaggtaagattttttttcaaaatcatgaaattactaaattgaatgaagatgaagtttcagaaataagaaagaaaaatataggaattatttttcaatccttttatttaattcctaattatactgcggtagagaatatagcattaactcttgaactgaataaatttaaaaaccccgaaagagaagctaagcatttattagaacgtttcggtttaaaagatcgatttaataatcttccaggccagttatcaggtggagagcaacaaagagttgcaatagcaagagcaattgcaatgaaaccagaattaatcttagctgatgaacctacgggtaa

SEQ ID NO: 274898 - DNA, 814 bp, Unknown
  Bacterial polypeptide expressing nucleotide sequence isolated from the Sargasso Sea
catgcttcgaatagaagatttaaataaaaaatatcctactggtgatgaagctcttaaggacgtcaaacttgaggtgccaaaaggccaggtgatggccttgattggaccttcgggtgctggtaaatcgaccctaatccggtgcgtaaaccgtttggttgaaccaacaaagggcaaggttttcctaggagaactagaactaactcagttgtcacgatggaaacttcgtcaggctagaaggcgaatgggaatgatttttcaggaatatgcccttgtcgaacgcttgacggtaatggaaaatgttttgtccggtcgattgggctatgtaggtttctggcgcagttggtttcgcagatttccagggaaggatgtgcgagaggcttaccgtttgttagatcgcgttggactgatagaaatggctgacaaacgcgctgatgagctttcaggaggtcagagacagagggttggaatctgccgtgcattaatacaaaatcctgatctacttcttgtagacgagccaacagcaagcctcgatcctaaaacatcgaggcagattatgcgattgataaacgaactttgcgatgaacggagtctggcagcaataataaacatacatgatgtattgttggcccaaatgttctctaaaaggattgtcggacttgagcagggatcaatagtttacgacggtcctcccgaggatcttactcctgaggttctgactcgtatatatggtgaagaaaattgggaggcaaccataggtaaagtggaagaagaaaacgaggaagaagattcgacaaattccgaggctgcttcatga

SEQ ID NO: 274899 - DNA, 667 bp, Unknown
  Bacterial polypeptide expressing nucleotide sequence isolated from the Sargasso Sea
catgagcgtactacttaaattaaaaaaaataaatctcaaataccaaactggcaaagataatattagcgttttaaagaatatagatttaataattaagaaaaaagaaaccgtttctgtagttggtgaaagtggttcaggaaaaaccagcctaattatgttaattggaggtttagagcgtccaacttcaggaaagatcttttttcaaaagcaagagataactagtttaaacgaagatgaggtctctgaaattagaaaaaaaaacattggaattatttttcagtctttttacttaattcctaattatagtgctgttgaaaatgttgccttaactttagaacttaatagatttaaaaatcctgaaaaagaagcaaagttattattagagcgatttggtctgaaacatcgttttaataatcttccaagtcaattatcaggtggagaacaacagcgtgtagcgattgcaagagcaatcgctatgaaaccagatttgatactagcagatgagccaactggaaacttggatactgaaaactcattaatgatttctgatatattatttaaatatgtaaaagaagaaggctcctctttaatcatagtaactcatgatccaaaacttgcaaataaagctaaacgaaaaataaaaattaaagatggaaaaatcaaataa

SEQ ID NO: 274900 - DNA, 1666 bp, Unknown
  Bacterial polypeptide expressing nucleotide sequence isolated from the Sargasso Sea
atggcccaatacgtcttcaccatgaaccgggtcggcaaaatcgtgccgcccaagcgtcaaatcctgaaagacatctcgctgtcgtttttccccggcgcgaaaatcggtctgctcggcctgaacggctcgggcaagtcgacgctgatccgcatcatggcgggtgtggacaaggacattgaaggcgaagccacgccgatgccgaacctgaacatcggctatctgccgcaggaaccgcaactcgatccgaacaaaaccgtgcgtgaagcggtcgaggaaggtctcggcgacgtcttcggcgcgcaaaagaagctcgacgaaatctacgcggcttatgcggagccggacgccgacttcgacgcgctcgccgccgagcaagccaagtacgaagcgattctcgccaccaccgacggcagcgcggaacaacagatcgaaatcgctgccgacgcgctgcgcctgccgccatgggacgcgaagatcgaacacctgtcgggcggcgaaaagcgccgcgtcgcgctgtgcaagctgctgctcgaaaaaccggacatgctgctgctcgacgaaccgaccaaccacctggacgcggaatcggtcgactggctcgaacagttcctgacacgcttcccgggcacggtcgtcgccgtcacccacgatcgctacttcctcgataacgccgccgagtggattctcgaactcgaccgcggccacggcattccgtggaagggcaactacagcagttggctcgatcagaaggaagagcgcctgaagcaggaagagtcgtcggaatcggcgcgccagaaggcgatcaagaaggaactggagtgggtgcgccagaacccgaagggccgtcaggcgaagtcgaaggcgcggattgcccgcttcgaggaactgaacagccaggactaccagaaacgcaacgaaacccaggaaattttcattccggtcggcgaccgcctgggtaacgaagtgatcgagttcaagaacgtcagcaagtcgtacggcgaccgtctgctgctcgacaacgtcagcttcaaggttccgccgggcgcgattgtcggcatcatcggcccgaacggcgccggtaaatcgacactgttccgcatgctcaccggccgcgaacagccggattcgggcgagatcgtgcaaggcccaacggtcaagctcgcatacgtggaccaaagccgcgatgcgttggacggctccaagaccgtgttcgaagaaatctccggcggcgcggacgtgctgacggtcggcaagtatgagacgccttcgcgtgcgtacattggccgcttcaacttcaagggcggcgatcagcagaagaccgtcggcaacctgtcgggcggcgagcgcggccggctgcacctggcgaaaacactgatcgcgggcggcaacgtcctgctgctggacgaaccgtcgaacgacctggacgtcgaaacgctgcgcgcgctggaagacgcgttgctcgagttcgccggctcggtgatggtgatctcgcacgatcgctggttcctcgaccggatcgcgacgcatatcctggcattcgaaggcgattcgcaaatcacgttcttcgacggcaactaccaggaatacgaagcggacaagcgcgcacgtctcggtgaagaagctgcacgtccgaagcgcttgcgttacaagccgatcgcgcgataaa

SEQ ID NO: 274901 - DNA, 712 bp, Unknown
  Bacterial polypeptide expressing nucleotide sequence isolated from the Sargasso Sea
atgagtggcaaaggcattcgcatcgaaggtttgagaaaacgttatggcgagggcgataccgcggtcaatgccttgaaaggcgtggacatgcaggtggcacccggcgaggtggtgggcctgattggcccttccgggtccggcaagagcacgctgctcaaatgtctgggcgcggtgattgatccgaccgccggtcgcatgacgctgggcgatgaagtgatctacgacgatggctggaaagtccgcgacttgcgcgccttgcggcgcgacaagatcggtttcgttttccaggcaccatacctgattccgtttctcgatgtcaccgacaacgtggcgctactgccgatgctcgcaggcgtcgcgaatggggagtcgcgcgcgaaggcactggaactgctcaccgcgctcgatgtgcaacaccgggctcgcgccatgccctcgcaactctccggtggcgagcagcaacgggtcgccattgcgcgaggtttggtcaatcgccctccggtgatcctggctgatgagcccacagctccactagacagtgagcgcgccatggctgtaatccgcatcctcaatgacatggctcggaagttcgagaccgccatcatcgtcgtcacccatgacgaaaagatcatccccactttcaagcgcatctaccacatccgcgacggtgtgacccatgaggaagctggcgaagggcgggagttcgaatgag

SEQ ID NO: 274902 - DNA, 652 bp, Unknown
  Bacterial polypeptide expressing nucleotide sequence isolated from the Sargasso Sea
ctgcaaaaatcttttgagaaaggtgatctttccgtcgatgttattaaaggcgttgatttcattattcaatctggcgaaacagtcgcgataacagggccatcaggcagcggtaaaaccacgttattgcagatcattggtttactcgattctcccacaagcggttcagtgagtatagatggaaaaaatgaaaccatatccaaagaaagcagaaaagcgtccctcagaaatcaatattttggtttcgtttatcaatttcaccatctaattcctgaattcactgcgattgaaaatgtgatgatgcctttattggtcaggaatcaatcaatctcaaaatcaggaaaaaagagcgaagaaattcttaaagaaattggaatggaccatcgcctaaaccataaaccccatgaactttcaggaggagagtgccaaagagtagcgatagcacgtgcattggttacagagccccaatttattttagccgatgagccaacaggaaatctggatccaaaagcatccttaaacatattcaatcaattcatggatttaagagacaccattggctctgccttgattctggttacacacgatcaaacgttggccgaaaagatgtcgacggtttataaaatagatggaggaacccttatcagaaaataaa

SEQ ID NO: 274903 - DNA, 691 bp, Unknown
  Bacterial polypeptide expressing nucleotide sequence isolated from the Sargasso Sea
tatgcaaaagatattatcagcgaaaaatatttctaagagttttgataggtcaaaagttctagattctgttgacctatcaattaatcaaggggaaattattgtgattaccggctcttcaggtgctggaaagactaccctgcttaatatacttggaacaattgaaagcccagactttaaagataaatcttctcttaaaatatgtaacacagatatttttacattagacgatagagaactttcaaaatttagaaataaaaatattggatttgtatttcaatttcatgaattgcttccagaattcacatgtttagaaaatgtttgccttccaggatggatagataacagtaaaaatatcagtgaaatagaggatagagctatgagtttatttgagatattgggccttgaagacaaggttaaaatgaaaccagcaactttatcaggaggtgagaaacaaagagtatctattgcaagatcactgattaataaccctgaaattattcttgcagatgaaccaagcgggaacttagactctaaaaacaccgagactatttataatattttttggaattatagaaagcgttttggaggaacctttataatagtcactcatgatcaatctttagctaagggagcggataaacactttataattaatgatggtaaaatctcattaggaaaaaacgctaaatga

SEQ ID NO: 274904 - DNA, 652 bp, Unknown
  Bacterial polypeptide expressing nucleotide sequence isolated from the Sargasso Sea
tctgcacaaagtttttcagaaaggagacagcactgtcgatgtcctcaagggtgttaattttgatattgattcgggcgagacagttgctataactggaccatctggtagtggaaaaacaacattgctacaaatcatcggcctgcttgactcaccttctgatggttcagttaatatcaatgatgaggatgaatcaaaatcaaaagagagtagaaaatctaaactgaggaatcaatattttggttttatatatcaatttcatcatttgattcctgagtttactgcactcgagaatgtcatgatgcctctactggtaaggaatcaatcaatcacagaatgtagaaaaaagagtgcaggcattttggaaaaaattggaatgcatcatcgactcaatcataaaccaaatgagctttcgggaggagaatgccaaagggttgcgatagcaagagccttggtcactgagccacaattcatacttgccgatgaaccaacgggaaatctggatccaaatgcatcaacaaacatatttaatcagtttatggaattgagagacactgccggctctggtttgatacttgttacacatgatcaaacattggctgaaaagatgtccatggtttataaacttgatggaggtattctggtcagaaaataa

SEQ ID NO: 274905 - DNA, 676 bp, Unknown
  Bacterial polypeptide expressing nucleotide sequence isolated from the Sargasso Sea
aatgattaagtttgactctatctcaaaagaatatttaatgggagataacaaacttttggctctcaataatataaatgtttctatttcagatggtgagttcgtttcaattatggggtcttctggctccggtaaatccacattgatgaatattataggctgtttagatgttccttcaagtggagattattttttcaaggatgataatatttcaaaatttaatgccaataaacttgctgaattacgtaataaagaaattggttttatttttcaaaattttaatcttttaccacgacttaattcacttgaaaatgttgtcttacctttattatattcaggtaaaaatcagaaagaaagaaataacctagctttaaaagccttagaagatgtaggtcttaaagatcgtattcatcatagaccaaatcaattatctggtggacaacaacaaagagtatcaatagccagagctattgcaggttcacctaaattaattttagctgatgagccaactggagcattagatagtaagacgagcatagaaatcatgacaatactaaataaattaaatgctaaaggtataacggtagttttagttactcatgaagatgatatagctaaatatggctctagaattattaaaatgaaagatggtcagataattgaggataaaaaaaatgtc

SEQ ID NO: 274906 - DNA, 601 bp, Unknown
  Bacterial polypeptide expressing nucleotide sequence isolated from the Sargasso Sea
aatgaaagagggtgagataataggtttacttggtccaagtggttcaggtaaaacaactttacttaattgtataggtttattggactctccaaaaagtggaataattaaaattttaaatgtaaattgtaatcatgccaatgactttgaaagaacaaaaattagatcaaaacaaattggatttgtttttcaaaaccatagattatttccagaattttcttctattgaaaatatcataatccctcaacttttgctgggtattgataaaaaaattgcgtataaaaatgcttcagaacttttaaaattactaaatttaaaacataggtcagatcacagacctgctagattatctgggggagaagctcaacgcgtagctattgcaaggtctgtagccaatgctccaaaaattattttagctgatgaacctacaggtaacttggatatagaatctgctaaattggtttttgatttactttacaaaattgttaaaatgtcgaaaatcagttgcttgattgctactcataatgtcgatctggcaaaaaaaatggataaaatttattctattaaagacaaaaaattaaagttaacaaaaaattttaattag

SEQ ID NO: 274907 - DNA, 667 bp, Unknown
  Bacterial polypeptide expressing nucleotide sequence isolated from the Sargasso Sea
atgagtgctcttcttaaattaaaaaaaataaatctcaaataccaaactggtaaagatagtatcagtgttttaaagaatattgatttaaatattaagaaaaaagaaactgtttcagtagttggagaaagtggctcagggaaaacaagtttaataatgttaattggaggcttagaaaaaccaacctctggtaaaataatttttaatgatcaagaaataacaggccttagtgaagatgaagtatcagagataagaaagaaaaatattggaataatatttcagtcgttttatttaattcctaattacacagcagttgaaaatgttgctttaacgcttgaacttaataattttaaaaatccagaaaaagaagcaaaaattttattagatcgttttggtttgaaacatcgttttaataatttaccaagtcaattatcaggtggtgaacaacaaagggttgctatcgccagagcaattgcgatgaagcctgaattaatcttagcagatgaaccaacaggaaacttagatactgaaaattctatcatgattgcaaatattttatttaagtacgtcaaagaagaaggttcttctttaatcatggtaactcatgatcctaaacttgctgacaaagctaaaagaaaaataaaaattaaagatggaaaaattaaataat

SEQ ID NO: 274908 - DNA, 655 bp, Unknown
  Bacterial polypeptide expressing nucleotide sequence isolated from the Sargasso Sea
atgatagaatttcagaatgtatcatatacccatagtaagggaaaaggagttacgaatttaactttttcaatagatgatggtgaatttgtttttttgattggtccaactggatctgggaaaaccactttaatgaggcttatctattttgacctatggtgtgatacaggaaaaataattgttggaacacatatttctgaattaatgaagaaaaagcatgtaccgcaaattagaagaaacataggaatggtttttcaggattatcatcttcttaatgatcgaaatgtctttcacaatgtagctctaccattgcacgtaatgggctacagcgccaatgaaataccctatagggtagatgaggctctcgaacttgtaggatttgaagggaaaagagatcattatcctaatgagctgtctggcggagaaaaacaaagagtcacattagctagagcaatagtgaaagagcctgatcttatattagcagatgagcctacaggcaacctagatcctgtagccgcttttgagcttgtacagttgttagatactataaacagtaacggaacaacaatattaatggcttcacataattataatttaattaaagggcgcggtagaagaatactcgagctaaaagatggagctataaggggaagttaat

SEQ ID NO: 274909 - DNA, 688 bp, Unknown
  Bacterial polypeptide expressing nucleotide sequence isolated from the Sargasso Sea
tatgaataatataatagaaataaataatttagaaaaatcatacaataaaaaaaaaataaaagttatagataaagtaaattataaatttaaaaatggaaaaatatactctctaataggaccttctggatcaggaaaatctacactcttaaaccttttatctttgattgacattcctaattcaggaacaattttaataaataatcaaaaaataaacttcaaagaaaaaaataaaaacgatcaaatcagatcaaataaaattggcattatatatcaagataaaaacttgttgtcagatttcacagtattagaaaacgtctatcttcctagattagctataagcaataataagattgatgctataaaagactctaaaagtttattaaaaaaattttttctacttaaaagacaaaatcattttacctcagaattatcaggtggagaaatgcaaagagttgctattgcaagagctttaataaatacaccgagcataatattagctgatgagccaactggaaatttagattttaaaaatgcaaagatagtttttaaaacgttatttaaacttagatcaaaaaataggctaattatttatgcaactcacaatagatattttgctaatttagctgattgtaaaatagagttatttaatggtaaaataaaaactatttctaatgttagaaaaaaataa

SEQ ID NO: 274910 - DNA, 766 bp, Unknown
  Bacterial polypeptide expressing nucleotide sequence isolated from the Sargasso Sea
aatggaagagctgttgaatgtcaagcaattatcggttttatttggcgaaaataatttcgccgttcgagacataaatttttcactccaagatggagaattcgtggtgcttctgggctcctccggagctggaaaatcaacgctgcttcgctccctgaatgggttggttcagccctgttcgggaagcatccgatcacgccaccacggagagatcagcgcgagcaccaaccgccaactccgcgcccatcgacgggacaccgcaatggtgttccagcagcaccagctgattgaccgcttatcggtcctcgacaacgtgctgatggggcgcttgggataccactctttcctgcgttcactgcttccacttccgcagagcgatcgccaaaaagccctctcagccctggaacgcgtgagtttgatcgataaagcactggcccgcgtcaaagacctcagcggcggccagcagcagcgcgtcggcatcgcgcgggcccttgttcaggaaccccgtctgattctcgcggacgaaccgatcgccagcctggatccggaaagttcagcgcagattctttcactgttgaaagacatctgccaacgcgaccgaattgccgttctggtgagccttcaccaggtggaattcgcacgccagtttgctgatcgaatcattggcatggccgctggtcggatcatttgcgaccaacactcggtgacgctggaagaaagcgaaattcacgccctatatcgccacaagctcgaggcagcggtcacctaa

SEQ ID NO: 274911 - DNA, 685 bp, Unknown
  Bacterial polypeptide expressing nucleotide sequence isolated from the Sargasso Sea
atgataaatattaatgctattactaaagaatacattatgggagataataaacttttagctctcaatgaagttgatgtatcgataaaagaaggagaatttgtctcaataatgggctcctctggctctggtaaatctacccttatgaatattattggttgtcttgatgttccaactagtggcgattatttttttagaaataaaaatatatccaattacaattctaatatgcttgctgaattaaggaataaagatatcggatttatctttcaaaattttaatttattacccagattgaatgctttagaaaatgttactttacctcttttatattcaggaaaaaatataaaagaaagaactaaactttcaatggaagcattagaaaatgtcggtttaaaagatcgaacacatcacaaaccaaatcagttatctggtggacagcaacaaagagtttcaattgcaagggctatagctgggaatcctaaattaatattagcagatgaacctactggtgcattagatagttatactagtttagaaattatgaaaattttaaatgatttaaattctaatggaattacaataattctagtaacacatgagaaagatatagctcaatatggctcccgtattataaagatgaaagatggtaaaattatagaggataaaaaaaatgtctctaattgat

SEQ ID NO: 274912 - DNA, 409 bp, Unknown
  Bacterial polypeptide expressing nucleotide sequence isolated from the Sargasso Sea
tcttttctggctcctcaaaattctagatcaagggcaatggattgccttcggaaagtaaatttatctcatcttgccatgaaacgagttgatagcctttctggaggacaatctcaaagagttgcgatagctagagctctcatgcaaagacccaagttattacttgctgacgagcctgttgctagccttgacccagtggctgcaaaaacggttatggagcttctcacagaactatgtaaaaaagaaaaaataacagttatatttacctcgcataatgttgaagatgccgtaaaatattccgacaaagttttagctttaaaagagggtgaaataagcttcttgaaagcaagtaaagcgatagatccaacagaattaattgagcaatacgacagctctgtaagaaatgtttaat

SEQ ID NO: 274913 - DNA, 538 bp, Unknown
  Bacterial polypeptide expressing nucleotide sequence isolated from the Sargasso Sea
catgagggaaccactgttgcaactgagcgggatccgccgccattttggtgacggggagcgacgcgtcgaggtgctcaaggggatcgacctgaccatagcgcggggcgagatggtggcgatcgtcggcgcctccggctccggcaaatcgaccctgctcaatattctgggctgcctggatcagccgagcgagggtagctaccgggtggccggacgggagacgggccggctgacggccgatgcgctggcgaccctgcgccgcgagcacttcggcttcatctttcagcgctatcacctgctgggggatctcagtgcccgcgacaacgtggcgctgcctgccctctatgccgggttggccggcgacgcgcgcaaggcgagggccgagagcctgctgcagcggctcgggctcggcagccggctcgactacaagccgagccagctctccggcggccagcagcagcgggtcagcatagcccgcgcgctaatcaatggcggtcaggtgatcctggcggacgaaccgaccgggccctcgacagtcaga

SEQ ID NO: 274914 - DNA, 955 bp, Unknown
  Bacterial polypeptide expressing nucleotide sequence isolated from the Sargasso Sea
tctgacatccaaacttctcccaactgtcaaagcactgtcatgccccacaaccacacttcggttgtctagacgacttaaccctcaggaggctgccatgaccgccgcactgcacatccaccaactgaacaagcatttcgccaacggcaaacacgccctgcgcgacatcaacctcaccgtgcagcgcggcgagatggtggcgctgattggtgcctcgggatcgggcaagtccaccctgctgcgtcatgtggcgggcctggtggtggccgatgcatccagcgattcgctgatcgaggtggatggccgctgcgtgcagcaggcggggcgcattcacagtgacatccgcaaggtgcgttcgcaggtgggctttgtgttccagcagttcaacctggtggaccgcttgcccgtgctgatgaacgtgctggtgggcctgctgcaccgtacgccctggtggcgcggctggctgcgcatgttcaagccgcacgagcgtgcgttggcgctggaggcactgcaccgcgtgggtattgccgagtgccacgcgcagcgcgcatccaccctgtcaggcgggcaacagcagcgcgcggccattgcccgcacgctggtgcagggcgccaaggtggtgctggccgacgagcccatcgcgtcgctcgacccggagtcctcccgcaaggtcatggacatcctggcacgcatcaaccgcgaagaccgctgcaccgtcatcgtctcgctgcaccaggtggatgtggccatcaaatattgcccgcgcgtggtggccttgcaccatggacaggtggtttacgacggcccttcagccgcactcacgcccgcattgctgcggggcctgtatggcgtgcaggccgatgaaatcctctcggatgcatccagcgcccaccctgcacctgcgcatacccccatgcctgcgccgcagtggtcgcccgccatggtgcaggccgcttga

SEQ ID NO: 274915 - DNA, 796 bp, Unknown
  Bacterial polypeptide expressing nucleotide sequence isolated from the Sargasso Sea
atgctgcaacttgccgaattaaccaagaaatataatactggagagttagctcttaaaggagttactttggagattcccaaagggcaggttttggcccttatcggaccatcaggtgcaggaaaatctactttaattcgctgtgtaaatcggcttgtacaaccaacctctggaagtgtcgtcctgaaaggaacagagctaacaaaattgtcttcgtcagctttgcgaaaagcaagacggagaatgggtatgattttccaagagtatgctttggttgagcgattgacagttatggaaaatgttttgtcaggccgtcttggttatgttgggttttggcgcagctatttcagaaaatttccaagtgcagatattcaggaagcttatcgcctattagacagagttggcttaaaacatatggcagataaacgtgcagatgagctttccggtgggcaacgccagcgcgtgggcatctgtcgtgcactaatacaaaatccagatctgttgcttgttgatgagccaaccgcaagtcttgatccaaaaacatcgcggcaaatcatgagattgattcaagagctatgttccgaaagaggacttacggctataataaacattcacgacgttttcctcgctcagatgttttctcagcgtgttgtaggcttagaattaggttcggttgtctatgatggaaaacccgaaggtcttacacccgaagttttaacaagaatttatggtgaggaagattggtctgcgactatcaagtcaacagacgaagatgacgaagatgaggaagagttttaaa

SEQ ID NO: 274916 - DNA, 667 bp, Unknown
  Bacterial polypeptide expressing nucleotide sequence isolated from the Sargasso Sea
atgtccacacttctaagattaaaaaaaataaatcttaaatatcaaactggcaaagacaatatcagagttttaaaaaatatagatttaaatattaagaaaaaagaaactgtttcagttgttggtgaaagtggttcaggaaaaactagtttaataatgctagttggtggattggagaagccaacctctggaaagattatttttcaaaatcaagaaattacaagccttaatgaggatgaagtatcagaaattagaaagaaaaatattggaattgtatttcaatcattttatttgatcccaaattataccgcagttgaaaatgttgctttaacacttgaactaaataattttaaaaatccagaaaaagaagcaaagattttgttagatcgttttggtttaaaacatcgttttaataaccttccaagtcaattatctggtggcgagcagcaaagagtagccatagcaagagcaattgctatgaaacccgaattgattttagctgatgaaccaactggtaatttagataccgagaactctacattgatttcaaatatattgtttaaatatgtaaaagaagaaggttcttctttaattatggtaacccatgatcccaaacttgcagataaagcaaaaagaaaaattaaaattaaagatggaaaaatcaaataac

SEQ ID NO: 274917 - DNA, 667 bp, Unknown
  Bacterial polypeptide expressing nucleotide sequence isolated from the Sargasso Sea
atgagtgcacttcttaaattaaaaaaaataaatctcaaataccaaactggtaaagaaaatatcagtgttttaaaggatattgacttaataattaagaaaaaagaaattgtttctgtagttggtgaaagtggttcaggaaaaactagcttgattatgctaattggaggtttggagcgtccaacctcaggtaagatcatttttcaagatcaagaaataacaaatttaaatgaggatgaagtctctgaaattagaaagaaaaatattggaactatatttcagtctttttatttaattccaaattatactgctattgaaaatgttgctttaaccttagaacttaataaatttaaaaatcctgaaaaagaagcaaaacttttattagagaggtttggtctaaagcaccgatttaacaatcttccaagtcaattatctggtggggaacaacaacgggtagcgattgcaagagcaattgctatgaaaccagaattaatcttagcagatgaaccaacgggaaacttagatactgaaaactcaataatgatttctgaaatactatttaaatatgtcaaagaagaaggttcttctttgataattgtaacccatgatccaaagcttgcaaataaagctaaaagaaaaattagaattaaagatggaaaaattaaataac

SEQ ID NO: 274918 - DNA, 697 bp, Unknown
  Bacterial polypeptide expressing nucleotide sequence isolated from the Sargasso Sea
atgaaaaaaatattagaaattaataaccttttgtttagatgggacaaaaatgatgatttttatttaaaaataaatagtttttctatagaaaaaaacaaaaaaattgttctattcggaaaaagtggagttggaaaatcaactttattaaatctaataagtggaatattagaacctgaattaggtagtattaaaattaataatactatagttaataaactttctcaaaccaagaaagataattttagagcaaataatataggagttatattccaacaatttaatattttggactatatgtcacctcttaaaaatattcttttaccttgttactttacgggttttaaaaaggaagatactaattttttttatcaaagagcccatagtttagctgaaaaacttaatctaaataaaaaaattctaactcaagaaaaatcaaaggaattatcagtcgggcaaatacaaagaatatcgataattaggtctattataaataaaccaaaattaatactagcagatgagcctacatctgcattagataacataaataagaaaaaattcttagatatgctattcaatatttgtaatattgaaaaaattactatcttaatggtaagtcatgacacttcattaagaaaaaattttgatacgaccctacatctagaagaaattttaaaaaaaaatgaaaatattatttaac

SEQ ID NO: 274919 - DNA, 575 bp, Unknown
  Bacterial polypeptide expressing nucleotide sequence isolated from the Sargasso Sea
ttccggctgcggtaaatccaccttactcagcattctgggcatgctggacagcccaagttctggtgcttatttgtttcaaggcactgacattgctcattacagcgaaaagcaattggcagagctgcgtaaaacccagctgggttttgtgtttcaaagctttaacctgattgatgagttaacagtatttcaaaatgttgagctgccgctgcagtatcagggcgtagccgcctctgaacgcagaagccgggtggaagccatcttaaaacgcatgcaaattgaccacagggccgatcatttgccattgcagctctccggcggtcagcaacaacgggttgccgtcgcccgtgctttggtgattaacccagcgcttattttagccgacgaacctacagggaatttagactctaaaaacagtgaagaagtgatgcagatgctgcgccagctcaaccgcgaaggcacctctgtggtgatggtgacccactctgaacatgaatcacgttacgccagccgtatagtgcgaatgctggatggtcagatcattaccgagcgcgcgctggaggccaaatatgcttaac

SEQ ID NO: 274920 - DNA, 667 bp, Unknown
  Bacterial polypeptide expressing nucleotide sequence isolated from the Sargasso Sea
atgaacacacttcttaaattaaaaaaaataaatctcaaataccaaactgggaaggacaatatcaatgttttaaaaaatattgatttaactataaaaaaaaaagaaactgtatctgtggttggagaaagtgggtcaggaaaaacaagcttgattatgcttattggtggactagaacgtccaacctcagggaaaattatatttcaagacagggaaataacaaatcttaatgaagacgaagtatctgaaattagaaagcaaaatataggaattatatttcaatctttctatttaattccaaattatacagctgttgaaaatgtagctttaacacttgaacttaatgaatttaaaaatccagagaaagaagcaaaaagtttattagatcgatttggtctaaaacatagattcaataatcttccaagtcaattatctggcggagagcaacaacgtgtggcgattgcaagagctattgcaatgaaaccagatttgattttagctgatgaaccaactggtaatctagataccgaaaactcaataatgatctctgaaattttatttaaatacgtcaaagaagaagggtcttctttaataatggtcacacatgatccaaaattagcagacaaagcaaaacgaaaaattaaaatcaaagatggaaaaattaaataat

SEQ ID NO: 274921 - DNA, 556 bp, Unknown
  Bacterial polypeptide expressing nucleotide sequence isolated from the Sargasso Sea
tatgaataattttcttgaattaaaaaaaatatttaaaacttttaaaactgaaaaaacagttaaagtattaaaaaatctttctcaaaaatttgataaaggtaaaagctattctataatggggccatctggttctggtaaatcaactctattaaatttaatttcattgattgatagaccatcatctgggtcaatccattttgataaaattcctgtaaatttcaatgaatctgaaaaaaatgatgtttatagatccaaaaaaatagggattgtttatcaacaaaataatcttctcccagattttactgctttagaaaatatatatttggcctcacttgcaattaataacaataaagaattagcaatatttaatgcagaaaaattactcaaaaaaattggtctttctaagagggcagatcacttcccgtctcaactatcaggtggtgaggcacaaagagttgctatagcaagagcaattgtaaatgatcctgaaattattttagcagatgagccgactggaagtttagatatggaaactgcaaaagatgtttttgaactt

SEQ ID NO: 274922 - DNA, 688 bp, Unknown
  Bacterial polypeptide expressing nucleotide sequence isolated from the Sargasso Sea
tatgattaattcaatagtagaaactttaaacttaaaaaaaacttataagcattcaaacggaaatatcactctttttgataaattaaatattaaaataaaaagaggagaacttgttgctttagttggtccatctggatcaggaaagtcatctctacttcacttgctagctttattagatgagccgtctaaaggcagcataaagattaatgatatctctacgaataaactaaatgatgaagaaaaagataaaattagaagagaaaagatatcaataatttttcaagataataatctattaaatgatttcacagctatcgaaaatgtgatgatgccattattaataaaaaatattaagagagatgaggccaaaaaaagagcacaaaaaatcttaatgtcagtaaaactatttgagaggtcccaacattttccaaatgaattgtctggtggtgagcaacaaagagttgccatagcaagagctttgatagcagaaacaaatttaatattggcagacgaaccgacaggcaatcttgattataaaacttcttcagaaatattttcttattttctaaaactaaaaaaaatcaaaaaaacaattatttttgcaactcataatagagaacttgctaacagggcagattacaagttgtcaatttctaatggtggtataaaacggattaatgtccgttag

SEQ ID NO: 274923 - DNA, 814 bp, Unknown
  Bacterial polypeptide expressing nucleotide sequence isolated from the Sargasso Sea
catgcttcgtatagaggacttagataagaaatattcaacaggcgacgaagcccttaagggcgtcaaacttgaggtacctaaaggtcaggtgatggcattgattggcccttcgggtgctggtaaatcgaccctaatccgatgtgtaaatcgtttggtagagcctaccaaaggaaaggttttcctaggagaactggaactaacacagttgtcacggtggaaacttcgtcaggctcgtaggcgaatggggatgatctttcaggaatacgcactcgtcgaacgcctaactgtcatggaaaatgttttgtctggtcgattgggctatgtaggtttctggcgaagttggtttcgtagattcccaggagaagatgtttgtgaggcttaccgccttttagatcgagtaggactgatggaaatggcagacaaacgtgccgatgaattgtcaggagggcaaagacagagggtcggaatctgccgagcattaatacaaaatcctgatcttcttcttgttgatgagcccacagctagtctcgatcccaaaacatctaggcagatcatgcgattgataaatgaactttgtgaggaacgtggtctggctgcaattatcaacattcatgatgtattgctggcccaaatgttttccaaaagaattgttggtttagaacaggggtcaattgtctatgacggtactccagaagatctgaccccagaagttctgactcgtatctatggtgaagaaaattgggaggcaacaataggtaaagtggaagatgaagaaatggatgaagattcaacaactcttgaggctaattcatga

SEQ ID NO: 274924 - DNA, 298 bp, Unknown
  Bacterial polypeptide expressing nucleotide sequence isolated from the Sargasso Sea
gctcttgcacaaaaacccaaagtgatgttagcagatgaaccggtagcatcattggatcccataacctctagggttgtaatgaagtacttaaaagagataaaccaggaactaggcattacgacaattgttaatttacatttcttagacctcgcaaaagaatttggtgaaagattaatcggtctcaaagatggagaacttgtgtacgacggtaaagttaacgatgttagcgataaagattttgaaaatatttatggtagagcaataaaatcttcggatttattaggagatgatgattaaa

SEQ ID NO: 274925 - DNA, 703 bp, Unknown
  Bacterial polypeptide expressing nucleotide sequence isolated from the Sargasso Sea
atgctccgagtttcgaatctcagaaaaggattcggttctggctctaggaggctcgaggtcctaaaaggcatcaatatggaggtcaagcctggggaactggtcagcctgatggggccgagcgggtgtgggaagagtactctgttgaacataatcggagggctcctcgaggcggactccggggagatatcactgggctcattcaactacggaaccaaatcccccaacagggtcgttgacgttagaaggagcggagtgggctggattttccaagacttccacctcgtcgataggctcgacgcattggacaatgtcgccttcagcctggagctatctgggatgtcctcatcggaggctgagggcagggcgatggacgcgctgatgagggtgggccttgcggataggatgaatttcattcccgatcaactctcaggggggcagcagcagagggtcgctgtcgcgagggcgatatccggttccagaccactaatcctagccgacgagccgacggggaacctggacgtcaagagcggccaggaggtcatcaagctgttcaaggacctgtgcgccaacgacggcctatcggtcctgatggtcacccacgacccgatgctcgcatccatggctgacaggatgctcctgctgaaagacggtgtgaccgcggcttcggacatccgttcagcatgggggatagaggaggagtgaa

SEQ ID NO: 274926 - DNA, 553 bp, Unknown
  Bacterial polypeptide expressing nucleotide sequence isolated from the Sargasso Sea
gggtcaggtaaatcaactctattaaatttaatttcattgattgatagaccatcatctgggttaatccattttggtaatattcctataaatttcaatgaatctgaaaaaaatgatgtttatagatccaaaaaaataggaattgtttatcaacaaaataatcttctcccagattttactgctttagaaaatatatatttggcctcacttgcaattaatgacaataaagaattagcaatttctaatgcagaaaaattactcaaaaaaattggtctttataagagggcagatcactttccatctcaactatcaggtggtgaggctcaaagagttgctatagcaagagcaattgtaaatgatcctgaaattattttagcagatgagccaactggaagtttggatatggaaactgcaaaagatgtttttgaacttttatacgaacaaaaaaggtcggatagacttattatatttgcaactcataatagattttttgctaataaggcagattgcctattggagatgatagatggtagtataaaatcatccaatgtctgag

SEQ ID NO: 274927 - DNA, 679 bp, Unknown
  Bacterial polypeptide expressing nucleotide sequence isolated from the Sargasso Sea
tatgaataattttcttgaattaaaaaacatatttaaaacttttaaaactgaaaaaacagtaaaagtattgaaaaatctttctcaaaaatttgataaaggtaaaagctattctataatgggaccctcagggtcaggtaaatcaactctattaaacttaatttcgttgattgatagaccaacatctggatcaatcaattttgataaaattccaataaattttaatgaatctgaaaaaaaagacgtttatagatccaaaaaaataggaattgtttatcaacaaaataatcttctcccagattttaccgctttagaaaatatatatttggcctcacttgcaatcaatgacaacaaagaattagcaatatctaatgcagaaaaattactaaaaaaaattggtcttacaaagagggcagaccactttccatcacaactatcaggcggtgaggctcaaagagttgctatagcaagagcaattgtaaatgatcctgaagttattttagcagatgagccaactggaagtttggatatggaaactgctaaagatgtttttgaacttttatataaacaaaaaaggtctgatagacttattatatttgcaactcataatagattctttgccaataaggcagattgcctattggagatgatagatggtagtataaaatcatctaatgtctga

SEQ ID NO: 274928 - DNA, 475 bp, Unknown
  Bacterial polypeptide expressing nucleotide sequence isolated from the Sargasso Sea
aattttttttcaaaataatgaaattacaaaattaagtgaagatgaagtctctgaaattagaagaaaaaatattggaattatattccagtcattttatttaatcccgaattatacagcagttgaaaatgtagcattaacacttgaacttaataaatttaaaaacccagaaaaagaggcaagagaattattagatagatttggtcttagtcatcgatttaataatttgccaagccaattatcaggaggagaacaacaaagagttgctatagctcgagccattgcaatgaaaccagaattaatcttagcagatgagcctactggaaatttagatactgagaattctgtaatgatttctgatatattatttaaatatgtgaaagaggaaggttcatcactaattatggtaactcatgatccaaaattagctaataaagcaaaaagaaaaattaaaattaaagatggaaaaattaaataa

SEQ ID NO: 274929 - DNA, 712 bp, Unknown
  Bacterial polypeptide expressing nucleotide sequence isolated from the Sargasso Sea
gatgagtggcaaagggatacacatcgaaagtttaagcaagcggtatggcgatggtgacaccgctgtctttgccttgagagacgtgaatatgcatgttgcgcctggtgaagtggtgggactgatcggcccttccgggtccggcaagagcacgctgctcaagtgtctgggtgcggtgatcgaaccgaccgccggtcgcatgacgctgggcgatgaagtgatctacgccgatggctggaaagtccgcgacctgcgcgccttacggcgtgacaagattggtttcgttttccaggcgccgtacctgattccgtttctcgatgtcaccgacaacgtggcgctgctgccgatgcttgcaggcgtcgcgaatggagagtcgcgcgcgaaggcactggaattgctcacagcgcttgatgtgcaacaccgagctcgcgcaatgccctcgcaactctccggtggcgagcagcaacgggtcgccatcgcgcgcggactggtcaatcgtccgccggtgatcctggccgatgaacccactgcgccgctggattccgagcgcgccatggctgtaatccgcatcctcaacgacatggcccggaagttcgagaccgccatcatcgtcgtcacccatgacgaaaagatcatccccacattcaagcgcatctaccacatccgcgacggcgtgacccatgaggaagctggcgaagggcgggagttcgaatga

SEQ ID NO: 274930 - DNA, 407 bp, Unknown
  Bacterial polypeptide expressing nucleotide sequence isolated from the Sargasso Sea
atataggaattgtatttcagtcatttatctcattcctaattatactgctgttgaaaatgtggccctaactctagaattaaataaatttaaaaatcctcaacaacaagctaaagaattattagatcgatttggacttaaaaatagatttaacaatcttccaagtcaattatcaggaggagaacaacaacgagtagctattgcaagagcaattgcaatgaagcctgatcttattttagctgatgaaccaaccggaaatttagatagtgaaaactcagttatgatttcaaatatattattcaaatatgttaaagaagaaggttcatcgttgatcatagtaactcatgattcaaagcttgccaataaagcaaaaagaaaaattaaaattaaagatggaaaaattgtttaaa

SEQ ID NO: 274931 - DNA, 667 bp, Unknown
  Bacterial polypeptide expressing nucleotide sequence isolated from the Sargasso Sea
atgagtactcttcttaaattaaaaaaaataaatctcaaataccaaactggcaaagatagtataagtgttttaaaaaatattgatttaaatattaagaaaaaagaaactgtttcagtagttggagaaagtggctcagggaaaacaagtttaataatgttaattggaggcttagaaaaaccaacctctggtaaaataatttttaatgatcgagacataacaggccttagtgaagacgaagtatctgagataagaaagaaaaatattggaataatatttcagtctttttatttaattcctaattacacagcagttgaaaatgttgctttaactcttgaacttaataattttaaaaatccagaaaaagaagcaaaaattttattagatcgttttggtttgaaacatcgttttaataatttaccaagtcaattatcaggtggtgaacaacaaagggttgctatcgctagagcaattgctatgaaaccggaactaatcttagcagatgaaccaacaggaaacttagatactgaaaattctatcatgattgcaaatattttatttaaatatgtaaaagaagaaggttcgtctttaatcatggtaacccatgaccccaaacttgctgacagggctaaaagaaaagtaaaaattaaagatggaaaaattaaataat

SEQ ID NO: 274932 - DNA, 679 bp, Unknown
  Bacterial polypeptide expressing nucleotide sequence isolated from the Sargasso Sea
atgaataattttttagaattaatcaatgtaagaaaaagttttactgcagaaaaaaaaattaatgtattaagaggtctttctagaaaatttaagttaggtaaaacttacgcaataatgggaccctctggttctggaaaatcaactttacttaatttaatttcactaattgataaaccaacatccggtacaattaagtttgataatcttgagattaatttcaatcaaaatgaaaaaaatgatttaattagagctaaaaaacttggcattgtttaccaagaaaacaatctcctttctgattttacagcactcgaaaatgtttattttgcgtctttatctgttaataatgacaaaaaattagcattatctaaagctgaaaaattattaaaaaaaattggactttcaaaaagattaaatcattttccctcggaactttctgggggcgaagctcaaagagttgcaatagcaagagcaattattaatgatccacaaattattttagctgatgaaccaactggtagtttagacatgaatacggctaaagatatttttaaacttttgaacaatcaaaaaagatcagacagaataattatatttgcaactcataatagattttttgcaaaaaaagcagattatctattggagatgagagatggtagtataaaatcatctaatgtctgaa

SEQ ID NO: 274933 - DNA, 532 bp, Unknown
  Bacterial polypeptide expressing nucleotide sequence isolated from the Sargasso Sea
atgaataattttttagaattaaaaaatatacaaaaaaactttactacagaaaaaagaattagagtcttaaagggtttgtctaaaaaatttaagttaggtaaaatttatgccattatgggaccttctggttctggaaaatcaactttgttaaatttaatttcattaattgataaaccaacatatggttcaattaaatttgagaatttagagatagatttcatcgaaaaggaaaaaaatgatttatttagggcaaaaaaaataggaattgtttatcagcaaaataatttattatcggattttacagcattagaaaatgtttatctcgcttctttagcagttaatattgataaaagattagcgatatctaaagctgaaaaattattaaaaaagattggacttgcaaacagattaaatcattttccaccacaattatcgggaggagaggcacaaagagttgcaattgcaagggcaataattaatgatccacaaattattttagcagatgaaccaacagggaagtttggattttaat

SEQ ID NO: 274934 - DNA, 801 bp, Unknown
  Bacterial polypeptide expressing nucleotide sequence isolated from the Sargasso Sea
catgtcgttagcacctaagcctataataactaaatcaattcctggttcagataaactccattcagctctattcaatcctcctgaagatgtgcttccagaaacacttccattaatcacagtaatattaaatccatctttttttaaactattttccaaaattaatgataaatggtgctcttttggtaacccgtatccagccattaaactgtcgccaaataagattaccttttcaatagcatgtgccttaaagtgtactagaaaaactattaaaatttttataaataaacttttactcatgagcactcttcttaaattaaaaaaaataaatctccaatacaaaactggtaaggaaaatattagtgttttaaaggatatagatttaaatatacaaaaaaaagaaacagtttctgttgttggagaaagtggttcgggaaaaactagtttaatcatgctaattggtggattagaaagaccaacctcaggaaaaatcttttttcaagatcaagaaattaccaatcttaaagaagatgaaatatcaaaaataagaaagaaaaatattggaattatatttcaatccttttatcttattcctaattatactgcagttgaaaatgttgctctaatccttgagcttaataattttaataatccagacaaagaagcaaaatatttattagatcgttttggtctaaaacatcgttttaataatctaccgagtcaattatcaggtggagaacaacagcgtgtagcaattgctagagctattgcgatgaaaccagagctaattttagctgatgaacc

SEQ ID NO: 274935 - DNA, 589 bp, Unknown
  Bacterial polypeptide expressing nucleotide sequence isolated from the Sargasso Sea
ttggtccttaccattaagaaaaaagagacagtttctgtcgtggtgaaaagtggatcaggtaaaactagtttaatcatgttggttggaggactagaaaaaccaacttcaggtaaaattatttttcaagataaagaaattacacggcttaatgaggatgaagtttccgaaattagaaagaagaatattggaattatatttcaatccttctacttaattccaaattatacagcagttgaaaacgttgctttaaccttagaattaaataattttagaaatcctgaaagtgaagcaaaaagtttattagatagatttggtttaaagcaccgatttaataatttaccgagtcagttatcaggtggagagcaacaaagagttgcaattgcaagagctatagcaatgaaacctgaattaatattagctgatgaacccactggaaacttggatactgaaaactctttaatgatttcaaatattttatttaaatatgtaaaagaggaaggatcttccttaatcatggtaacgcatgatccaaaacttgctaataaagcaaaaagaaaaatcaaaataaaagatggaaaaattaaataat

SEQ ID NO: 274936 - DNA, 421 bp, Unknown
  Bacterial polypeptide expressing nucleotide sequence isolated from the Sargasso Sea
tatatcaataatttttcaaaataataatctgttaagtgattttactgcactagaaaatgttgcattaccactaattatacgtgaaacaaactatcaaacatctatgaaaaaagctgaaaaatttttaaaaaaagttaatttgggtcatagattaaatcattttccatcagatttatctggtggcgaacaacaaagagttgcaatagcaagagcgctcatagcagaaacaaaaataattcttgctgatgaaccaactggaaatttggacaacaaaaactcgaatgatgtattttcttattttttaaaattaaaagaaaaaaataaaataatattaattgcaactcataatagagaattagcaaaaaaagctgattatactttaaccataagtgatggtattgtaaaaaggactaatgtctga

SEQ ID NO: 274937 - DNA, 691 bp, Unknown
  Bacterial polypeptide expressing nucleotide sequence isolated from the Sargasso Sea
tatgaataagataattttagaaacattgaatttgaaaaaaacttttgagcatagaaatggcactattgaactttttaaagatgtaaatataaaaattagaaaaggagatttaattgctcttgtaggcccttcgggatcaggaaagtctaccttattacatttacttgccttgttggaaaatccctctaaaggaaaaattttattatttaatagagacaccaaagatattagagaagacaaaaaagacaagataagaagagaaaaaatatctattatatttcaagataataatttactttcagattttacagcatttgaaaacgtgattatgccattaataattaaaggtgaaaaatctaaaactacaatagaaaaaacttacaagattctaaaagatgtaaaacttttaaaaagaaagagtcattttccaagtgaaatgtccggaggagaacagcagagagttgctattgctagagctttggtagctgagacagacttaattttagcagatgaaccaactggcaatttggattataaaacttcgcatgaaatattttcttattttgtaaaattaaaaaaattaaataaagcagttatttttgcaacccataatagagaacttgccaacaaggcagattataagttgagtatttctaaaggtaatataaaacgtgttaatgcaagttcgtga

SEQ ID NO: 274938 - DNA, 676 bp, Unknown
  Bacterial polypeptide expressing nucleotide sequence isolated from the Sargasso Sea
atgaataattttcttgaaataatcaatttatcaaaaacttatgagggtgtggaaaaaataaatattttaaataatataaattttaaattgccagacaatgtgttagttgcattaacaggaccctcaggatcaggaaaatccactttgttacatatactttcattattagatagcaaagtagatggtgaatatcacttgaacggtaaaagattagatatttctaaccaaaatgaaaaaaataaatatagaagagataacatttcaattttatttcaaaattttaatttgataaatgatctcaatgcaattgagaatgttatacttccattgttaaataataataattttgaatacgatttttgttataataagggtaaggagcttttaagtaaatttaatttatctgaaagaacaaattattttccttcgcaactatcaggtggtgaacaacaaagagtagctatagccagagcattgattaacgaaccacaacttattttagcagatgaaccaacaggtaatttagataacgaaaatagtatgatagttattaattatcttaaagaattaaaaaaagaaaacagaactataatttttgcaactcataatagagaccttgtgaataaatgtgatttagaactaacaattaaaaataaaactgttatttctaattagt

SEQ ID NO: 274939 - DNA, 685 bp, Unknown
  Bacterial polypeptide expressing nucleotide sequence isolated from the Sargasso Sea
tatgattagagaaattattcaaataaacaatttatcaaaacattttgaaaacggtaattcaaaaataacagttttaaagaatgttaatctaaaaattgaaacagggaaggtcgttgctatagttggtccctcaggatctggtaaatcaacatttttacatttaatgtctttattagatactccatccaaaggtaaaattataatttcaggtaaatctatatcagagctaaatgaagatgaaaaaaataaaatggttagagaaaatatatcaataatttttcaaaataataatttgcttaacgattttacagcgttagaaaatgttgctcttccactaattatacgtgaaacagactataaaacatccatcaaaaaagctgaaaaatttttaaaaaaagtaaatttgggtcatagattaaaccattttccatcagatttatccggtggtgaacaacaaagagttgcaattgctagagcgcttattgctgaaacaaaaataattcttgctgatgaaccaactggaaatttagacaacaaaaactcaaatgatatattttcttattttttaaaattaagagaaaaaaataaaataatattaattgcaactcataatagagaattagcaaaaaaagctgattatactttaaccataagcgatggtattgtaaaaagagctaatgtctaa

SEQ ID NO: 274940 - DNA, 988 bp, Unknown
  Bacterial polypeptide expressing nucleotide sequence isolated from the Sargasso Sea
ctaagggaaaatcaaacaataggtgattttgtattagtaaatgctcttttgatgcagctatccattccattaaatttctttggttttatctacagagaaatttcacaagggatgattgatcttagatcattattttctgttttaaaaattgaacctgagattaaagataaaaagaatgcaattgatatgagttttgaaaaaactgatatagaatttaaaaatgtttctttttcatatgataataaaagaaacgttttaaataaaataaatttcaaaataccatcggggtcgtcacttgcaatagttgggcctacaggcgctggaaaatcaacaatatcaagattattgtttagattttatgatgtttctagtgggagcatattagtaaatggaaaagatgttagagatataactcagatttctctcagaaaaaatataggagtagtcccacaggacactgttttgtttaatgatacaatttactataacttaagctatggaaaaataaatgctgatgaaaaagagatttgggaagttgcaagaagggcaaaactaagtgaacttatcaaaacattacccgatggcatgaatactgttgtaggtgaaagaggcttaaaactatcaggaggagaaaagcaaagggtggccattgctagaactcttttaaaaaatcctccaatcctaattttagatgaagccacgagttctttggatactcttacagaaaaagagataaaggtttcattaaataatttagcaaaaaaaagaacatctataatcatcgctcacagactatcgactattgtagatgcagataaaattcttgtatttgaaaaaggtaaaattattgaacaaggtacacatattcagcttttaaaaaagaaaggtctttatgcagatatgtggaacacacaacaaacaatcgaaaaagttgaagagacacttcagaatataaaacctgaatataaaaaattacttcgaaaataaa

SEQ ID NO: 274941 - DNA, 769 bp, Unknown
  Bacterial polypeptide expressing nucleotide sequence isolated from the Sargasso Sea
aatgcttaaaacaataaacctgaaaaaggtttatccaaatggcgaagaagctcttaaaggaataaatctagatatccctaatgggcaagtagtagctcttattggtccctcaggtgcgggtaagagtacatttattagaacaataaatagattagttgagcctacttcaggaaaagtatattttgcagatgaaaaaaatgatattacttcattaaataaatcgaaattaagaaaaacaagaagacaaattggaatgattttccaggaattcgccttggtagaaagattaagtgtaatggaaaatgttctttccggcagattaggctacgtaggattttggaatagtttttttaggaaatttcctcaaaaagatatcgaagaagcattccggttgcttcaaagaattggactagagcatatgcttgataaaagagccgatgaattatcaggaggtcagaggcaaagagtaggaattgctagagctttgatacaaaacccaatgttacttttagtagatgaacctacagctagtttagatccaaaaaattccagacaaattatgcgattaatatgtgagttatgtaaggaaagagatcttgctgcgattataaatattcatgatgtttttcttgctcagaattttgcagaaagaataataggtttaaaagctggagaaattgtttacgatggcaagcccagtggcttatcagaaacaatacttacaaatatatatggagaagaagactggtctaaaaccgtagcaaattag

SEQ ID NO: 274942 - DNA, 201 bp, Unknown
  Bacterial polypeptide expressing nucleotide sequence isolated from the Sargasso Sea
agccgggtggacaaactgtccggtggccagcagcagcgggtaggcatcgcgcgtgcgctagcgcaacagccggcgatcattctggccgatgagccggtagccagtctcgacccggccacttcggtccgtgttctcggattgctgcgcgacatctgcaaggaagacggcatcaccgccatcgtttcgctgcatcaactcgaa

SEQ ID NO: 274943 - DNA, 649 bp, Unknown
  Bacterial polypeptide expressing nucleotide sequence isolated from the Sargasso Sea
tatgattgatttagaaataaaagatttaaaaaaaagttttggtagtgagtttgtattaaaaggtctttcttttagtgttaattcgcaaagtttattagcaatcatcggttctaatggagcaggtaaatctaccttgctgagatgctgcagccgcttaattgaaccatcgagtggaagtattaaaatttttgacaaggaaataacaactttaaatagtcataagctaggtcaaatacgaagagacgtagcgtttatttttcaacggcataatttagttcctcgactaagtgtgttatcaaatgttattcatggagattttggaaatatcactagcggtataattcgagtaacacgatggtttcattttctggctcctcaaaattctagatcaagggcaatggattgccttcggaaagtaaatttatctcatcttgccatgaaaagagttgatagcctttctggaggacaatctcaaagagttgcgatagctagagctctcatgcaaagacctaagttattacttgctgacgagcctgttgctagccttgacccagtggctgcaaaaacggttatggagcttctcacagaactatgtaaaaaagaaaaaataacagttatatttacctcgcataatgttgaagatgccgta

SEQ ID NO: 274944 - DNA, 793 bp, Unknown
  Bacterial polypeptide expressing nucleotide sequence isolated from the Sargasso Sea
cgcatgatcaaccgcctggaagaacccagcggcggccggctgctgatcggtggcgaggatgtcaccgcactggacgcggacggcctgcgcgcgctgcgccggcgcatcggcatgatcttccagcacttcaacctgctgtcgtcgcgcacggtggccggcaatgtcgccttcccgctggagctggccggcacgccgaaggcggagatcgacgcgcgcgtggccgagctgttgcagaccgtgggcctggaggcgcatgcgcagaagtacccggcacagctgtccggtggccagaagcagcgcgtcggcattgcccgcgcgctggcgacgcgcccgcagatcctgctgtgcgacgaagctaccagcgcgctcgacccgcagaccaccgcctcggtgctgtcgctgctgtcgaagatcaaccgcgagctgggcctgaccatcgtgctgatcacccacgagatggacgtgatccgtcgcgtctgcgaccgcgtcgccgtgctcgatgccggccagatggtcgagaccggaccggtcacccgggtgttcctgcacccgcagcacccgaccacgcgccgattcgtcagtgaatcggagcatgtcgacgaaggcgcgctgcaccgtgatttcgacgccgtcggtggccgtatcgtgcgcctgactttcctcggcggcgacacctacgagcccctgctcggcagcgtcgcgcgcgagaccggcgtcgattacaacatcctgtccggccgcatcgaccggatcaaggacaccccgtatggccagctggtggtcgccctggtgg

SEQ ID NO: 274945 - DNA, 586 bp, Unknown
  Bacterial polypeptide expressing nucleotide sequence isolated from the Sargasso Sea
catgggtccatctgggtctgggaaatcgaccttgatgaatattataggttgtttggatacccctacgcatggcacttatcaatttgaaggggaacttgtccaccaaatggatgatgatcaacttgcatcaatacgtaatagaaaaataggatttgtttttcagacctttaatcttttgccaaaatctaccgctctgcgaaatgttgaagttcccttgatctactcaaacatacctaaggtcaaacggttagaaatggcacgaaattccttaatttctgttggtcttgaagacagactagatcacaaaccaaatgagctgtcagggggtcagaggcaacgcgttgcaatagctagagctttagttaacaatccatcaatcattcttgctgatgagcctactggcaatcttgattcaaaaagtggaatagaaattatgaaaatcctgaacgatcttcatcataagggcaataccataatccttgtaacacatgaaaaagaaattgccatgcatgctaatcgcattattactatttttgatggtaaaatcaaagaagacagatccaacattaaaacagttgctgtataa

SEQ ID NO: 274946 - DNA, 685 bp, Unknown
  Bacterial polypeptide expressing nucleotide sequence isolated from the Sargasso Sea
ataagttttgatgtggctgagaatgattttgtggcgattattggtccaagtggggcaggtaagtcaaccctgatacgttgtatcaataggcttgtcgaaccctcatctggatcgataatttttaagggtcaaaatattactaatatgtctaaaagtgaattacgaagagttagaagagatattggaatgatttttcaagaatttaatctgataaatcgtatgagtgtcatggacaatctattatcaggtcgtttgggctacattggtaacataaggaccttgtttaaagcttaccctcgtaaagatatagatcgtgctattgaactcctcgaacgtgtaggtttaatagatcacattgacaaacgtgcagatgagctttccggaggacaaaggcaaagggttggaattgcaagagcattgatgcaggagcctgaattgttacttctcgatgagcctacatcttcattagatcctaagatatcacgtgaaataatgacccttgttaaagaaatggcttttgaattaagagttccatgtctttgtaatattcatgatgtacaattggccactgaattctgtaataaaattgtagggattcaagaaggcacgaagatgtttgaaggtgatcctaataaacttagtgaagaaaagctgaatgagatttatgcgatggaagtgttataga

SEQ ID NO: 274947 - DNA, 640 bp, Unknown
  Bacterial polypeptide expressing nucleotide sequence isolated from the Sargasso Sea
atgaagttggagaaggaccgagacgttctgagtctcaagggagtttccgtccgctacgttgactcgaccgtggccttgcacccgacgagtctggatgtgaagcagggagagtttttggtgcttctgggcgcctcgggcgcagggaagtccaccttgttacgaagcatcaatggactggtgctgcccacaaaaggcgaggtatcgatacctggcctggcaggtggggtagtcaacgcaaagacgctgagagagcaccgcaagcgctgtgggatggttttccagcagcatcatctgattggacgtcagtcggtcctcaggaatgttctgatgggaaagctcggtgacaggggtgcattcgcttcgctatggccgtggagcaagaaggacaagctggaggcgctcacagtgattgagcgtgtcgggctgctcgaaaaggcgctctcccgggctgatgccttgtctggggggcagcagcagcgcgtaggcatagctagggcgctaatacagaagccacgaatcctgctggccgatgagcctgttgccagcctggacccggcaaccgcacatagcgtgctcaccttgttgcatgagatctgcaaaaaggaccacctcaccgcaatcgtgagtcttcaccaggtgg

SEQ ID NO: 274948 - DNA, 293 bp, Unknown
  Bacterial polypeptide expressing nucleotide sequence isolated from the Sargasso Sea
gatgaagtcggattggcccaatagatttgatcattttccagcacaattgtcgggtggtgagcagcaaagagttgcaatagcaagagccctagctgttgaacctaaaataatcctggctgatgaaccaacaggaaatctagatcaaaacacaggctctaaaatcattgaacttcttttcaggttaagtgagaaaaataaaagtagtctagttgttgtaactcattccgttactctagctaggcaatgtgaccggatagtggagctaattgatggcaatactgttgaaaaataag

SEQ ID NO: 274949 - DNA, 540 bp, Unknown
  Bacterial polypeptide expressing nucleotide sequence isolated from the Sargasso Sea
actgaccgtgattgtatttgaccaggtacagaagtcgtatcaggtggccggccgggcgatccccgcgctgcatgccaccagtatgaccatagaaaccggcgaagtattcggcatcgtcggccattccggtgcgggcaagtcgacccttgtccgcctgatcaatatgctcgagccagcgaccggcggccgcatcctgatcgataacgaagacatcacccgctacagcgccgccgagctcagggctttccgccgcaaagtgggcatgatcttccagcacttcaacctgttgtcgtccaaaaccgtggccgataacatcgccttccccatgaagctggcgggtatctactcgaaaaccgagatccgggaacgggtggaagaactgctggcccgggtcagcctgagcgaacatgccaacaaatacccgtcccagttgtccggcggccagaaacagcgcgtgggcatcgcccgggccctggcctgccgcccgaccatcctgctgtgtgacgaagccaccagcgccctggacccgcaaaccaccca

SEQ ID NO: 274950 - DNA, 576 bp, Unknown
  Bacterial polypeptide expressing nucleotide sequence isolated from the Sargasso Sea
gatcgataatttttaagggtcaaaatattactaatatgtctaaaagtgaattacgaagagttagaagagatattggaatgatttttcaagaatttaatctgataaatcgcatgagtgtcatggacaatctgttatcaggtcgtttgggctacattggtaatataaggaccttgtttaaagcttaccctcgtaaagatatagatcgtgctattgaactcctcgaacgtgtaggtttaagtgatcacattgacaaacgtgcagatgagctttccggaggacaaaggcaaagggttggaattgcaagagctttgatgcaggagcctgaattgttacttcttgatgagcctacctcttcattagatcctaagatttcacgtgaaataatgaaccttgttaaagaaatggcttttgaattaagagttccatgtctttgtaatattcacgatgtacaattggccactgaattctgtaataaaattgtagggattcaagaaggtacgaagatgtttgaaggtgatccgaataaactcagtgaagaaaagctgaatgagatttatgcgatggaagtgttataag

SEQ ID NO: 274951 - DNA, 343 bp, Unknown
  Bacterial polypeptide expressing nucleotide sequence isolated from the Sargasso Sea
taagaaagaaaggcggcttgaaatggcatcgaatgcgctaattattgttggccttggagatagaatgcatcatcgccccaatgaattgtctggaggacaaaggcaacgagttgcaatagctcgtgctttagtgaacgaaccttcaataatactagcagatgaaccaaccgggaatctcgattcaaaaagtggacatgaaataatgaaaatctttgacgaattacataaatcaggaaatacaataattcttgttactcatgaagatgatattgctaaatactctaatcgtatagtgcgattattagatggtaaggttgtttctgataaaccagtaaaaaaataa

SEQ ID NO: 274952 - DNA, 657 bp, Unknown
  Bacterial polypeptide expressing nucleotide sequence isolated from the Sargasso Sea
ataaaatttataatgtaggaggtgaggaggttcgggctttagatggggtagatctaacaataaaaaacaatgaataccttgcgatcatggggcgttctggatctgggaagtctaccatgatgaatatgataggttgtttagataccccaacttctggcatatatcatttcgagggtgaagaagtccatattatggatgatgcgcagcttgcttctataaggaataggaaaataggttttgtttttcaaaccttcaatctcctcccaaaagcaagtgcactgaataatgttgagatccctctcgtgtatgcgaatattaggaaagaaaaaagaatagagatggcctcaaaagccttgaaagatgttggactggaagatagaatgcaccacaaaccaaatgaactatctggagggcaaagacagagggttgcaatagctagagcattggttaataacccttcgattatacttgcagatgagcctactggaaaccttgactcaaaaagtggccatgagataatggggattcttgatcatttacattcaaaagggaacacgattatacttgtaacacacgaggatgatatagccaaacatgccaaacgtacgatacgtttatttgatgggaagatcatagaagatgataaaggtaaatagt

SEQ ID NO: 274953 - DNA, 622 bp, Unknown
  Bacterial polypeptide expressing nucleotide sequence isolated from the Sargasso Sea
ttgatcaaattaaaaaatgtgaatgttatttatccaacaggcactcatgctatgaaggatgtttcattagacataaatgaaggagattttttagttatagttggaaaatcaggagcaggtaagtcaactttattaagaacgctcaatggtctagtaaaaacaacaagtgggagtattaatatttttgacaaagaagttacaacatcatcaaaaagagagctcagagagattcgctcaaagactgggatgatatttcaaactttcaatcttgtcacaagaaccacagtatttaacaatgtcttaactggaagattaggcgagatgtcaacacttagaggattttttggattatggtctgacgaagataaaaaaatagcaatggatgcattaaaagaagtagagatagaagagaaagcgtggacaagagcttcaaaattatctggtggtcaacaacaaagagttggcatagcaagagccttgacgcaaaaacctaagcttgttttagctgatgaaccggttgcttcattagatccagttacatctagaaaagttatggactatatcaaaaaaattaacgttgagttaggtataacaactaattgtaaatctacacttccttgac

SEQ ID NO: 274954 - DNA, 292 bp, Unknown
  Bacterial polypeptide expressing nucleotide sequence isolated from the Sargasso Sea
ggaggatagaatgtatcatcgtccaaatgaattgtccggaggtcagcgccaaagggttgcaattgctagagcattagtaaatgatccatcaattatcctcgctgacgagcctacagggaacctagattcaaaaagtggtgatgaaattatgaatatattagataacctattttctagaggaaatactataattcttgtaacacatgaagaatatattgctaaacacgctcatcgcattatcaatatttttgatggaaagattaaggaagataaggtagttaaaaagaaataa

SEQ ID NO: 274955 - DNA, 628 bp, Unknown
  Bacterial polypeptide expressing nucleotide sequence isolated from the Sargasso Sea
aaataccaaactggtaaaaaaaatatcaatgttttaaaggatattaatttaacaattaaaaaaaaagaaactgtttctgtggtcggtgaaagtggttcaggaaaaactagcttaattatgttaattggaggcttagaacgtccaacctcgggtaagatcatttttcaagataaagagataacaaatttaaatgaagataaggtctctgaaattagaaagaaaaatattggaattatatttcagtctttttatttgattccaaattataacgcagtagaaaatgttgctttgactttagaacttaaccaatttaaaaatcctgaaaaagaagcaaaacttttattagagcgatttggtctaaagcatcgattaaacaatcttcctagccaattgtctggtggcgaacaacaacgagtagccattgcaagagcaattgctatgaaaccagtgttaatcttagcagatgaaccaacaggtaacttagatacagaaaactcagtaatgatttctgatatattatttaaatatgtaaaagaagaaggctcttctttaatcatggtaacccatgatccaaagcttgcaaacaaagctaaacgaaaaatcaaaattaaagatggaaaaatttaat

SEQ ID NO: 274956 - DNA, 399 bp, Unknown
  Bacterial polypeptide expressing nucleotide sequence isolated from the Sargasso Sea
taccaagagcttctgcacttgataatgttgcgttacctctagtgtatgcagggtacaaaaaagaaattagagatagcatggcaatgaaagcacttaaaagtgttgatttaactaatagagctacgcataaaccgaatgaactatctggaggacaaagacaaagggttgctatagccagggctcttgtgaataaacctagtattattttagctgatgaaccaacaggtaatttagatagcaaaacatcagagggaattatggatttgttttctaaacttcatgatgctggaaatactataattatggttactcatgaaaatgatattgctgcatactcaaaaagaattgttagactaatggacgggaatattgaatcggataaaaaaaatataaattaga

SEQ ID NO: 274957 - DNA, 685 bp, Unknown
  Bacterial polypeptide expressing nucleotide sequence isolated from the Sargasso Sea
catggaattaataaacctaagtgatatttataaaatttataatgtaggcggtgaggaggttcgggcgttagacggggtagatctaacgataaacaataatgaataccttgcaataatggggccttctggatcggggaaatctacattgatgaatatgataggctgtttagacactccaacttctggcatatatcaattcgagggtgaagaggttcatattatggatgacgcacagctcgcttctatacgaaatagaaaaatagggtttgtttttcagacattcaatctcctaccaaaggcaagtgcattacataatgttgaaatacctcttgtatacgcgaatattaggaaagaaagaagaatagatatggcctcgaaggctttgaaagatgttgggttaggagatagaatgcatcacaagccaaatgaattatctggaggccaacgacagagggtagctatagctagagcattagttaataacccctctatcatacttgcagatgagccgactggcaaccttgattcaaaaagcgggcatgaaataatggggattttagataatttacacttaaagggtaatacgatcattcttgtgacacacgaggatgttatagcgaaacgtgctaaacgtataatacgtctctttgatggtaaaataattgaggatgaaataagtaagtag

SEQ ID NO: 274958 - DNA, 296 bp, Unknown
  Bacterial polypeptide expressing nucleotide sequence isolated from the Sargasso Sea
tttacatattgtaggattgcaagatagaatgactcacaagccaaatgaattatctgggggacaaagacaaagagttgcgattgccagagcattagtgaataagccttcaatcattttagccgatgagcccaccggtaatttagattcaaaaagtggtaatgaaatcttaaagtttttttcaaagctacataaggatggaaatacaattattatggttactcatgaagagtctgtagcaaagctttctaaaaggcgtattgatatttttgatggaaaaattgctagggatgaataat

SEQ ID NO: 274959 - DNA, 692 bp, Unknown
  Bacterial polypeptide expressing nucleotide sequence isolated from the Sargasso Sea
aaaggggataagttttgatgttgctgagaatgactttctcgcaataattggccccagtggagcaggtaaatctacgctgattcgttgtataaatagacttgtagagccaacatcaggtcaaatctattttcatggccaagatgttacaaagttgacattccgagagttacgtaaagttagacggggaattgggatgatcttccaagaattcaatttaatcgatcgcatgagtgtcatggacaaccttctatcgggccgtctaggttttacgggtaatgttaggactttgtttaaggcgtttaaacgacaagacattgaaagtgcccttaagctacttgagcgagtggggctaagtgatcaagttgataaacgagctgatgaactttcaggaggacaacgccaaagagtaggtatagcaagagcattgatgcaggaacccaaactgcttctcctagatgaaccaacttcctctttagacccaaaaatatcccgtgaaattatgaatcttgtaaaagaaatggcttttgaattaaaggtcccttgtctttgcaacattcatgatgttcaattggctatggattcctgcaataaaattattggaatacaagaaggcataaagatgttcgaaggggttccagaaagtttaaataaagaaaagcttcaggaaatttatgccatggaagttctatgaa

SEQ ID NO: 274960 - DNA, 694 bp, Unknown
  Bacterial polypeptide expressing nucleotide sequence isolated from the Sargasso Sea
tatgattgaattcaaaaatgtaagtgttgtatatcctggtggagtaaatgcactaaacaatgtctctctgaatattgatgagggtgattttgtaattattgttggcatgtctggtgctggtaaatcaactttgttaagaactgttaataacctagtcaaaccaaccgatggaaatgtttttattgactcacaaaatgtaactagcgcttcaaaaaaggaacttaaaaaaataagatcagatataggtatgatattccaaacgtttaatttagtaaatcgctcatctgtattaaaaaatgtattgactgggagactaagccaagtttcgaccctaagatctgtatttggtctctggcctaaaaatgataaggatattgcttttgaatcattaaacaaagtaggaatattagaaaaggcttatgtaagaggttcaaatttatccggaggtcaacagcaaagggttggaatagcgcgtgcccttgctcaaaaaccaaaagttatgctcgcagatgaacctgttgcatcattagatccgattacttccagagttgtgatgaagtatcttaaggaaattaatcaagaattaggtataacaactatttgtaatcttcacttcttagacctagctaaagagtttggtgaaacgataataggtttaaaagatggtgagcttgtgtacgatggaaaagttgat

SEQ ID NO: 274961 - DNA, 505 bp, Unknown
  Bacterial polypeptide expressing nucleotide sequence isolated from the Sargasso Sea
tgtcacaagaaccacagtatttaacaatgtcttaactggaagattaggcgagatgtcaacacttagaggattttttggattatggtctgacgaagataaaaaaatagcaatggatgcattaaaagaagtagagatagaagagaaagcgtggacaagagcttcaaaattatctggcggtcagcaacaaagagttggcatagcaagagcactaactcagaaacccaagcttgttttagctgatgaaccggttgcttcattagatccagttacatctagaaaagtcatggactatatcaaaaaaattaacgttgagttaggcataacaacaattgtaaatctacacttccttgacttagcaaaagactatgcagaacgcatcataggcatgtacgatggaaaaattgtttacgatggcatggttgatgatattactgatgcagattttgaaaaaatctatggaggtcaactcaccgaggaagattataatgaaacaagaacaaattaa

SEQ ID NO: 274962 - DNA, 553 bp, Unknown
  Bacterial polypeptide expressing nucleotide sequence isolated from the Sargasso Sea
ggcaaaagcaccctgctcaatatcctcggcttgctggacctgcccaactgcggccagtaccactttgccggccacgatattttcaacgccacccccgatgagctggcggcgatccgcaaccagcagatcggtttcgtgttccagagcttcaacctgctgccacgcctcagtgccctggacaacgtcgcgctgcccttgagttatcgcggcgtgtcgcggcatgaatcggtggaacacgcccagcgcatgctcgcacaagtcggcctcgccgaacgcgcccaccatcgccccgccgacctctccggtgggcagcgccaacgtgtggccattgcccgcgccttggtcggcaagccctcggtgatcctggccgacgaacccaccggcaacctcgacagcactaccgcccaagagatcatggacctgctgttgaacctcaaccgtgaccaacaggtgacgctgatcatcgtcacccacgacccccacattgccgagcgcctggagcgcaagatcctggtgtgcaacggcgtggtgcatgaggccgggcgcccatgag

SEQ ID NO: 274963 - DNA, 700 bp, Unknown
  Bacterial polypeptide expressing nucleotide sequence isolated from the Sargasso Sea
ctggaggtgaaggaaattctaatatcactcaataatgtctacaaaatatacaatgttggaggagaagaggtaagagcccttgatggtattgatttaaagattaatgagaatgaatatttagcgattatgggcccatcaggatccggaaaatccactctaatgaatatgattggatgtttagacacaccttcatctggtgtataccagtttgagggcgagatggtgcaggagatgaatgatgatcaattagcctctataagaaatcggaaaattggttttatttttcaaacatttaatcttttaccaaaagcaactgcacaacataatgttgaaattcccctcatttacggtaatgttcggaagataaaaagagtaaacttatcaaaagaagcactagacagcgttgggctatctgatcgcatgcaacataaacctaatgagctatcaggtggtcaaaggcaaagagttgctattgcaagggcattggtgaatagtccgtcaattatccttgccgatgagccaacaggaaatttagactctaaaagtggtcaagagattatgggaattcttgatcagttacatcaaaagggtaatacaatcatactcgttactcatgaagatgaaattgctcagcatgctcatagaattattagattatttgatgggaagattacagaagattctgagatcaaaaattaat

SEQ ID NO: 274964 - DNA, 571 bp, Unknown
  Bacterial polypeptide expressing nucleotide sequence isolated from the Sargasso Sea
atctattttcacggccaagatattacacaattgtcacaccgcgagttgcgaaaaattagacggggaattggaatgatattccaagaattcaatctaatcgatcgcatgagtgttatggacaatcttctatcaggccgccttggttttactggcaatatgagaacattatttaaggcatttaaacgtcaagatattgatagtgcccttaagcttcttgagcgagtggggctaagtgatcaagttgataaacgagctgatgaactttccggaggacaacgtcaacgtgtaggcatagctagagcattgatgcaggacccaaaactacttctactagatgaaccaacttcgtctttagacccaaaaatatcccgtgaaattatgaatcttgtcaaagaaatggcttttgaattaaaagtcccctgcctctgcaacattcatgatgttcaattggctatggattcctgtaataaaattattggtattcaagaaggcacaaagatgtttgaggggacaccagaaagtttaaataaagaaaaacttcaggaaatttatgccatggaagtgctatgaa

SEQ ID NO: 274965 - DNA, 436 bp, Unknown
  Bacterial polypeptide expressing nucleotide sequence isolated from the Sargasso Sea
gttcccgttcccggaggccgaccggcgcttggcgctggattgtctggaccgtgtggggttgctgacccgcgcgctgcaacctgtctacaatctcagtggcggccagcagcaacgcgtcggcattgcgcgagccattgcgcagcagcccaatctcattctcgccgacgagccggtggctagtctcgatccggagacagcgcatcgtgtcctcggcatgctgcacgaaataacaaaacaggacgacatcccgacgattgtcagcctgcaccaggtcgaactggcaaaagcattcgccgaccgaattatcggtctgaacgacggcgaagtcctctttgacggtccacccgacgaactggacgaggcagtgctggatcgaatttacgaccgaccgaacaatgtagagttggacgcctacacgtccgaagctgcggagtaa

SEQ ID NO: 274966 - DNA, 517 bp, Unknown
  Bacterial polypeptide expressing nucleotide sequence isolated from the Sargasso Sea
attagaagggggattgggatgatattccaagaatttaatctaatagatcgcatgagtgttatggacaatcttctatcagggcgccttggttttacaggcaatattagaacattatttaaggtatttaaacgtgaagacattgatagcgctattcagcttcttgagcgagttgggctgagtgatcaagttaataaaagagctgatgaactttcaggaggacaacgtcaacgtgtaggaatagcaagagcattgatgcaggacccaaaactgctcctcttagatgaaccaacctcctctttagatccaaaaatatctcgtgaaattatgaatcttgtcaaagaaatggcttttgaattaaaggtcccctgtctttgcaatattcatgatgttcaattggctatggattcctgcaacaaaattattggtattcaggaaggcacaaagatgtttgaagggacaccagaaagtttaaataaagaaaaacttcaggacatttatgcaatggaagtactgtgaa

SEQ ID NO: 274967 - DNA, 659 bp, Unknown
  Bacterial polypeptide expressing nucleotide sequence isolated from the Sargasso Sea
gatggcactgatccaaacccgtgagctctggaaaacctacaagatgggttccgagttagtgcatgctcttcagggattgtccgttgatgtcgaacgtggcgaattcgtcgccattatgggaccttcagggtccggtaagtcaacgctaatgaaccttattggctgtcttgacacgccatcgaggggtacttatttgctcaatggtcacgatgtgagtcagatggaagacgatgcgctcgcacgtatccgaaacagagagattgggtttgttttccagacgtttaatctgttgccgagagcgtccgcgctccagaatgtggagcttccactgatttactctggagtgccggcagcagaacggaaagtacgggctatagaggcgctaggtttagttgagttggaggaccgcatggatcatcgtcccaacgagctgtctggcggacagcgacagcgcgttgcgattgcacgagcattggttaacaagccgtccatcattcttgccgatgaaccaactggaaacttggactcaaagacaggggtcgaactaatgtccgtgtttagtcgccttcatcgcgaaggtaataccattgtgctgatcacgcatgaatccgatgttgcttcccacgcgcatcgcattatctctcttcgagatggtcttg

SEQ ID NO: 274968 - DNA, 526 bp, Unknown
  Bacterial polypeptide expressing nucleotide sequence isolated from the Sargasso Sea
atgcactcttaataacgttctgacaggactgcttggcaacaacaactcctattactctgttttttatttattcaatcgcaaacagaaaatgattgctcttgaggcgctagaccaagtgggtttattgtctcgagcatataccagaaccgaccgactttccggtggccaacaacaacgtgtcggaatcgccagggctatagtaaaaagtccacagttactgctggctgatgagccggtagccagtcttgatcctaagatttcataccagatactttctctgcttaaggatatttcaatatctcaagatatagcggttttatgcaatctccatcaagtagacttcgcgctgcgtttcgcagatcgaatcattgggctcgcagagggccgtctcgtcatggataagcccattaaggagattgacggagaatacatccggcaaatttaccaaggccatgaccagggattgtttttcggtccgaacatgacacaaagttgggctgatgattttatccgttattctgcatga

SEQ ID NO: 274969 - DNA, 598 bp, Unknown
  Bacterial polypeptide expressing nucleotide sequence isolated from the Sargasso Sea
tatgcttcaaatcaatcgactgaccaaggatttcggcgctgtgaaggcggtgaacgacctgactgttgccattccgaccggacagatggtgggcatcattggtcggtccggtgctggaaaatcgacgctgttgcgcatcctgaacaggatgaccgatgccaccgaaggcgaggtcatcgtggatggcgaggatatcctcgcgcatcgtggcaaggccaagctggcttggcaaaagaactgcgcgatgattttccagcaattcaatctggtgtcgcggttggatgttctgaccaatgtgatcctcggacggttgaacgaccagtcggttctgcgggcctgtctgaagctgttcaccgccgaagagcgtctcgaagcgctgaccctgcttgacaggtttggtgtggccccgacagcgctgcaacgcgccgagacattgtctggcggccaacagcagcgcgtagcgatctgccgggcgatgatgcagaagccgtcaatcatcctcgccgacgagccgattgcctctctcgacccgctgaatgcgcgccttgtcatggagtcgcttcaaaccatcaacaaggaagaaagcctgactgttgtc

SEQ ID NO: 274970 - DNA, 572 bp, Unknown
  Bacterial polypeptide expressing nucleotide sequence isolated from the Sargasso Sea
tggaaaatcaactttaatgaatatgattggatgtctagatactccaacagaaggtacctacgagtttgaaggtgaattagttcatgaaatggatgatgatcagttagcatctattcgtaacaggaaaattggcttcgtctttcaaacgtttaatttgcttccaaaagcaactgctcttagaaatgtagaagttccgcttatttattcaaatatttcgaaatcaaaacgattaaaaatggcaagcgactctttagtatctgtgggattagaagataggcttgatcataaaccaaatgagctttcaggagggcagaggcaaagagtggcaattgcccgtgctttagtcaataatccttcaatcattttagcagacgagccaactggcaatcttgattcaaaaagtgggatcgagattatgaagatcttacatgaattatatactaatggaaatactattattttagtgacgcatgaagaggatattgcaatgcacgctaaaagaattatcaccatttttgatggcaagattaaagaagataagatcaataagaaaatgactaaggctttgtaat

SEQ ID NO: 274971 - DNA, 655 bp, Unknown
  Bacterial polypeptide expressing nucleotide sequence isolated from the Sargasso Sea
cactggcaaagtgatctcggccgagctaggtgcgctcgaaacccggtctacggtacgccgccatcggtgcaaaaccgccatggttttccagcaccatcagctcattgaacgccatacggcgctccagaatgtgctgaccggtcggcttgcttaccacagcacctggcgcagtttgtttccgctacccaggcaggaacaggcgcttgctctgcactgcctggaccgcgtaggcatggccgagaaagcgcttacccgggtcgatcaactctccggcgggcagcaacagcgggtgggcattgcgcgtgccttggcgcagcagcccgccatgatattggcggacgagccagtggccagccttgacccggcaacctctgagcgagtgctaacgctactgcgagatatatgccgtgaggatggtattaccgccattatttcactgcaccagctggagtatgcccagcggtttgctgaccgcattatcgggttagcgaatgcccaaatcgttttcgatgcggccccctcacagttacagcaacgccacctgaacgagatctaccacggcacgcgcggagctgtgaccgacgccgctgagaccaccgaacccaaccctcaaaccaccactccctccccgataaaactggagattgcccaatga

SEQ ID NO: 274972 - DNA, 787 bp, Unknown
  Bacterial polypeptide expressing nucleotide sequence isolated from the Sargasso Sea
aatgattattaaaaaagttaacaaatttttcggtgataatcatgccgttaaaaacgtttcttttgaggttaacaaacctcaaatgataggaatcataggtagatctggggctggtaaatcaacattactaagaattataaatcgacttaccgacgcaacagatgggtcgattgaaattgaaggtcaaaatattctagatttaaaaagtaaggaaaagagatcatggcaaagaaactgtgcaatgatttttcaacaatttaatttagtcccacgattagatgttctaacaaatgtaatattaggcagattaaattatcagggctcatttagagcatccttaaaaatgttttctcgagatgaaagagctgatgctctgattttactcaataacttaggtatggctaacactgcccttcaaagagctgaaacgttatctggaggtcaacagcaacgtgtagctatatgcagagctttgatgcaaaatcctaaaatgattttagcagacgaacctatagcatctttagatccaatgaatgcaagaatggtaatggaatcattaagaaaaattcatgacgaaaaaaatttaacagttatttcaaatcttcatacacttgatacagcaaaaacttattgtgatcgaattattggaatgaaagatggtgaaatagtctttgatgatttgcctgaaaaattatcagataaacttgcaagagaaatttatggtgcagaggctgatgaagcttttgagccacaagtaacatctacagagcttaaaacaaaaaaaaag

SEQ ID NO: 274973 - DNA, 769 bp, Unknown
  Bacterial polypeptide expressing nucleotide sequence isolated from the Sargasso Sea
atgatcgatttagaaataaaagatttaaaaaaaagttttggtagtgagtttgtattaaaaggtctttcttttagtgttaattcgcaaagtttattagcaatcatcggttctaatggagcaggtaaatctaccttgctgagatgctgcagccgcttaatagaaccatcgagtggaagtattaaaatttttgacaaggaaataaccactttaaatagtcataagctaagtcaaatacgaagagacgtagcgtttatttttcaacggcataatttagttcctcgactaagtgtgttatcaaatgttattcatggagattttggaaatatcactagcggtataattcgagtaacacgatggtttcattttctggctcctcaaaattctagatcaagggcaatggattgccttcggaaagtaaatttatctcatcttgccatgaaacgagttgatagcctttctggaggacaatctcaaagagttgcgatagctagagctctcatgcaaagacccaagttattacttgctgacgagcctgttgctagccttgacccagtggctgcaaaaacggttatggagcttctcacagaactatgtaaaaaagaaaaaataacagttatatttacctcgcataatgttgaagatgccgtaaaatattccgacaaagttttagctttaaaagagggtgaaataagcttcttgagagcaagtaaagcgttggatccaaaagaattaattgagcaatacgacagctctgtaagaaatgtttaat

SEQ ID NO: 274974 - DNA, 713 bp, Unknown
  Bacterial polypeptide expressing nucleotide sequence isolated from the Sargasso Sea
aataattatgcctgaccttatatccctaacaaatatcaaacgtcactatgatgttggcggggaaattgtacgtgcgcttgatggtgtcgatgtaaaaattaaacaaaatgaatatatttcaattatgggcccttcaggctctggcaaatcaactttaatgaacatgattggatgcttagatactccaactgaaggaaattatgagtttgggggtgaattagttcatgaaatggatgatgatcaattagcatccattcgtaacagaaaaatcggatttgtattccaaacttttaatttgctgccaaaagcaacagccttaagaaacgttgaggtgccactcatttattccaatatcccaaaagaagaacgactagaaatggcaaataaagcacttgtttcagttggccttggagatcgagttgatcataaaccgaatgaattatccggaggccagcgtcaaagggttgctattgcaagagcattggtaaataatccttcgattattttggcagatgaacctacaggaaatcttgattcaaaaagtggaattgagataatgaagattttagatgaattgcattcaaaaggtaatactataatattggtaactcatgaagaagatattgccaatcatgcaaatcgtattattacaatttttgatggtagagttaaggatgatttaattaataataataagatggaagttgcataat

SEQ ID NO: 274975 - DNA, 250 bp, Unknown
  Bacterial polypeptide expressing nucleotide sequence isolated from the Sargasso Sea
gtctggtggacaaaggcaaagagttgcaatagctagagcattagtaaatgatcctagtattattttagctgatgaaccaactggtaacttagatagtaaaacttcatatagtataatggatcttttttctttattacatgaaaaggggaatactataattatggtaacacatgaagaagacattgcaaagtattcaaaacgtgtagttagactaaaagatggattaatctcttcagataagaaaaaataa

SEQ ID NO: 274976 - DNA, 294 bp, Unknown
  Bacterial polypeptide expressing nucleotide sequence isolated from the Sargasso Sea
gattagcagataggttacatcataaaccaaatgaattatcgggaggccaacggcagagagtggcaatagctcgcgctttagttaataagccatctattattctagctgatgagccaactgggaaccttgattctaagagcggtagcgagatcatgactatccttgatgatctacacaagaatggaaatactattatacttgttacacatgaagatgatgttgctcagcatgcccaccggattattcgcttgttcgatggaaaaattattgaggattcaaaacaggctccctaat

SEQ ID NO: 274977 - DNA, 587 bp, Unknown
  Bacterial polypeptide expressing nucleotide sequence isolated from the Sargasso Sea
tatgagtatccttgaggttaaagacctctgtgccagctacagttcctctgggcctgaaatccttaagggaataagttttgatgtggctgagaatgactttctcgcaataattggtcccagtggggcagggaaatcgacactgattcgttgtataaatagacttgtcgaaccaacttcagggcaaatctattttcgtggacaagaagtcacaaaattgactcttcgtgagttacgaaaagttagacggagcattgggatgatcttccaagaattcaatctaatcgatcgcatgagtgtcatggacaatcttctatcaggacgccttggttttacgggtaatttaaggacgttgtttaaggcatttaaaagaaaagatattgaaagtgctcttaagctacttgagcgagtgggtctaagtgatcaagttgataaacgagctgatgaactttcagggggacaacgtcagcgagtaggtatagcaagagcattgatgcaggaacccaaattacttctcctagatgaaccaacttcctctttagaccccaaaatatcccgtgaaattatgaatcttgtaaaagaaatggctt

SEQ ID NO: 274978 - DNA, 610 bp, Unknown
  Bacterial polypeptide expressing nucleotide sequence isolated from the Sargasso Sea
caaaatgaatatatttcaattatgggcccctctggttctggaaaatcgactttaatgaatatgattggatgtttagatactccaacagaaggcacctacgagtttgaaggtgaattagttcatgaaatggatgatgatcagctagcatctattcgcaataggaaaattggctttgtctttcaaacgtttaatttgcttccaaaagcaaccgctcttagaaatgtagaagttccgcttatttattcaaatatttcgaagtcaaaacgattaaaaatggcaagtgaatctttaatatctgtaggattagaagataggcttgatcacaaaccaaatgagctttcagggggccagaggcaaagagtggcaattgcccgtgctttagtcaataatccttctatcattttagcagacgagccaacaggcaatcttgattcaaaaagtggaatcgagattatgaagatcttacatgaattatatactaacggaaatactattattttggtaacgcatgaagaggatattgcaatgcatgctaaaagaattatcaccatttttgatggcaagattaaagaagataagattaataagaaaatgactaaggctttgtaat

SEQ ID NO: 274979 - DNA, 769 bp, Unknown
  Bacterial polypeptide expressing nucleotide sequence isolated from the Sargasso Sea
tatgattgatttagaaataaaagatttaaaaaaaagttttggtagtgagtttgtattaaaaggtctttcttttagcgttaattcgcaaagtttattagcaatcatcggttctaatggagcaggtaaatctaccttgctgagatgctgcagccgcttaattgaaccatcgagtggaagtattaaaatttttgacaaggaaataacaactttaaatagtcataagctaggtcaaatacgaagagacgtagcgtttatttttcaacggcataatttagttcctcgactaagtgtgttatcaaatgttattcatggagattttggaaatatcactagcggtataattcgtgtaacacgatggtttcattttctggctcctcaaaattctagatcaagggcaatggattgccttcggaaagtaaatttatctcatcttgccatgaaacgagttgatagcctttctggaggacaatctcaaagagttgcgatagctagagctctcatgcaaagacccaagttattacttgctgacgagcctgtagctagccttgacccagtggctgcaaaaacggttatggagcttctcacagaactatgtaaaaaagaaaaaataacagttatatttacctctcacaatgttgaagatgctgtaaaatattccgacaaagttttagctttaaaagagggtgaaataagcttcttgaaagcaagtaaagcgatagatccaacagaattaattgagcaatacgacagctctgtaagaaatgtttaa

SEQ ID NO: 274980 - DNA, 892 bp, Unknown
  Bacterial polypeptide expressing nucleotide sequence isolated from the Sargasso Sea
gtcatctgctagacgccccactagcggtagcgttttggtggatggtcaagaaatgaccggtctacgccgtcgtgagctcaaccatgctcgccatcgtattggtatgatttttcagcactttaacctgctcaccacgcggaccgtgtttgataatgtcgcccttcccctggagctgatgggcgaaaagcgcagcactatcaaaaatcgtgttttaccgctattggagatggtgggcttagccgataaagcgaagcagtaccctgcccagctttccggcggccaaaaacagcgcgtggccattgcccgcgccctggccagcaagcccaacgtgctgctatgcgacgaagcgacttcagccctcgacccgcaaacgaccagttcaatccttgaactcctcagggatatcaaccatcagttggggattaccattctgctgattacccacgaaatggaagtggtgaaatcgatttgccatcgggtaagcctgatctctgacggcaagctggtagaagacgcggaagtcggcgacttctttactgcgccagccacccagcttggccgcgactttttgaacgactttctacagctcagtcctcctaaagagcttttggaacgcctggaagagagccccagcgaacatacacatccggtggtgcggctgactttctcaggcgatgctgtctccacgccgctcatttctcgcttggcgcgtgagtgcagcgtcgatgtcagcattttgcaggccaaagtcgagtccattcaggaccgcacgcttggcctaatgattgccgaactactgggcagccatgagcaaacccagcaagccatgtcctatttagcagcgcatcaactacaggtggaggtactcggccatgtccagcgcaatgtttga

SEQ ID NO: 274981 - DNA, 559 bp, Unknown
  Bacterial polypeptide expressing nucleotide sequence isolated from the Sargasso Sea
atatttcagcaattcaatcttgtgccccgtttagatgttttaacaaatgtgattcttggaagatcaaatattcaaggcactattcgatcaagcttaaaacttttcactaaagatgaacgcattgatgcattgatggctctggataaattgggaatggctgaaaccgcgctgcaaagagcagagactttatctggtggacagcaacaaagggttgcaatttgtagagctatgatgcagcaaccaaaaatgattttagccgacgagcctattgcatcgctagaccctcttaatgcccgacttgtaatggaatcacttagaaatattcatagagaaaagaagattactgttcttgcaaatcttcatactcttgataccgccaaaaattactgtgacagaatcattggcatgagacttggggaaattgtttttgatgatgtaccttcaagtttaaaagatgatgttgcaagagaaatttatggtgctgaagctgaagaagcatttgaaccaacagttacttcaacttcacttggtgacgaaaagtttgcagaggcagggtaat

SEQ ID NO: 274982 - DNA, 418 bp, Unknown
  Bacterial polypeptide expressing nucleotide sequence isolated from the Sargasso Sea
cttcatttactacctcgcacaacagccacagaaaatgttgaggttcccttactgtattcgcgtccgctgatgtctgctgctgagcgccgagagaaggcggccgaagcacttgaccttatgaagttatcagacagagcttctcatcatcctaatcaactatctggtggacaacagcagcgtgtggcaatagccagggctctggtgaataagccagatttaattttagcggatgagcctaccggtaatcttgatacggcaaccggaaaagaagttatgcaaactttggtaaagctcagagaggaaagagggatcactatagttttaattactcatgagatagaaatagccagttatggttcacgcatagtttcaattcgcgacggtaaaattatatctgatgagaaaaatgtggtttaaa

SEQ ID NO: 274983 - DNA, 520 bp, Unknown
  Bacterial polypeptide expressing nucleotide sequence isolated from the Sargasso Sea
tgatcttccaacatttaatttagtcaacagatcaacagttttaaaaaatgtattaacaggtagattaagcactatatctactttcagatctatatttggattatggccaaaggatcaaaaacaactagcttttgaagcacttgatcaagtagagatattagaaaaagcttatgtacgggcatctaacctttctggtggtcaacaacaaagagttggtattgcaagagcattatcacaaaaaccaaaagtaatgctagcagatgaaccggtagcctcgcttgatcctattacatctagagttgtgatgaattatttaaaaaaaataaatacagaactaggcataactacaattgtaaatttacattttcttgatttagcaaaagaatttggagataggctaataggccttagagatggaaagttagtttttgatggaaatgttgatggtgtatctgatgaagattttgaaaatatctatggacgttctattaaatcttcagatttaattggtaatgattaa

SEQ ID NO: 274984 - DNA, 550 bp, Unknown
  Bacterial polypeptide expressing nucleotide sequence isolated from the Sargasso Sea
cttaaagaacatacgttcacaaattggaatgatatttcaaacgtttaatctagtcaatagatcaacagttttaaaaaatgtattaactggtagattaagcactatatctacttttagatctatatttggattatggccaaaagatcaaaaacaacttgctttcgaagcacttgatcaagtcgagatattagaaaaagcttatgtacgggcttctaatctttctggaggtcagcaacagagagttggtattgcaagagcattatcacaaaaacctaaagttatgcttgcagatgagcctgtggcatcacttgaccctattacatcaagggttgttatgaattatttaaagaagataaatacagaactaggtataactacaattgtaaatttacattttcttgatttagcaaaagagtttggagatagactaattggccttagagatggaaaattagtttttgatggaaatgttgatggtgtatctgatgaagattttgaaaatatctatggacgttctattaaatcttctgatttaattggtaatgattaa

SEQ ID NO: 274985 - DNA, 493 bp, Unknown
  Bacterial polypeptide expressing nucleotide sequence isolated from the Sargasso Sea
cgcctgacagtgatggagaacgtcctgattggcgcgctcggcagcacaccgttctggcgcacctgttttagctggtttaccgctgagcagaaacagcgtgcattacaagcgttaacccgcgttggcatggcgcactttgcataccagcgtgtttccacgctttcgggcggacaacaacagcgcgtcgcaatcgcccgcgcgctgatgcagcaggccaaagtgatccttgccgatgagccgattgcctcactggacccggaatccgcccgcatcgtgatggacaccctacgcgacatcaaccagaccgacggcatcaccgtggtcgtcacgctgcatcaggtagattacgccctgcgctactgcgaacgcatcgtcgcgctgcgccagggcaacgtcttctttgatggcagcagccagcattttgataacgatcgttttgaccatctttaccgcagcatgaaccgtgtcgaacagaacgcgcaggctgcatagt

SEQ ID NO: 274986 - DNA, 814 bp, Unknown
  Bacterial polypeptide expressing nucleotide sequence isolated from the Sargasso Sea
atgtttcgggcacaaaacatcgttaagaattttggtcaggtgaaagcggttgacggcgtgagtttcgccgttgcgaaacctgaaatgatcggcatcatcgggcgctcgggagccggtaaatcgacgctcctgcgggtgatcaatcgtctaacagacgcaacctcgggtgccattacctatggtgatcaggaattgttgagtttgcgcggcaaaaacaagcgcgcatggcaagcccgttgtgcgatgatttttcagcaattcaatcttgtcccacgtatggatgtagtttcgaacgttctcttcggcacattgaatgcgcggtccacatttgcatcgctgctcaacctgttccccaagtccgatataaacaaagcgattgatattcttgaacgccttggcgttgccgagaactgcaccaaacgtgccgaggccctgtctggtggacagcagcagcgcgtggccattgcgcgcgccctgatgcagaaccctgagatcattctagcggatgagccgattgcgtcgcttgaccccctcaacgcaaagattgtcatggaaagcctgcgccgcattcatgatgaagacggccggatggtgatctgcaatctgcacaccctcgatacggcgcgtgctttttgtgaccgtgtcatcggcatgcgtgacggaaagattgtttttgatggccctgcatcggatttgtctgctgctgtcgcccgcgatgtttatggcgccgacaaggaattcagcgaggcggcgacgtcaacaagcattgaggcgctggaaatgagcgacagggcaatcctgaaaactgcgtgac

SEQ ID NO: 274987 - DNA, 685 bp, Unknown
  Bacterial polypeptide expressing nucleotide sequence isolated from the Sargasso Sea
aatgattaaaattaattctctctctaaagaatatattatgggagataacaaattattagcattagatgatgttagtgtttcaataaatgcaggagaatttgtatctattatgggatcatctggttctggaaaatcaactttaatgaatataataggatgtttagatatcccctcaaggggtgaatatttttttagagattataatatatctagtttaaattcaaatagacttgctgaaataagaaataaggaaataggttttgtttttcaaaattttaatttattacctcgtctaaacgctttggagaatgtaattctcccacttctgtattctggtagaaattttaaggagagaaataaactagctctagaagctttagaaggtgttggtttgcacgacagaaaaaaccataggcctaatcaattatctggaggccaacaacaaagagtatcaattgctagggctattgccggttttccaaaattaattttagcagatgaaccaacaggcgctttagacagcaaaactagcttagaaattatgaaaattctaaatgacttaaactctaaaggcattacaattgttttggttactcatgaagatgatatagcaaactatggttcaagaattataaaaatgaaagatggaaaaattatagaggataaaaaaaatgtcactaactga

SEQ ID NO: 274988 - DNA, 781 bp, Unknown
  Bacterial polypeptide expressing nucleotide sequence isolated from the Sargasso Sea
atgctcaaaataaataacctgacaaaaaaatttggttctaatattgctgtcaattctgtctcaatagaggtggggaagccaataatgcttggcataattggtgcttctggagcaggaaaatctactcttttacgaatgataaaccgattggagacagaaacatccgggaatatttccttcgaaggtttatcaatatccgatttaaaaggtgcagcaatatcaagatggcaatcaaattgtgcaatgatctttcaacaattcaatttagttccccgaatggatgtcgtaagcaatgtgcttcatggaacattgaataaaagatctactttcaccacatttttcaatttatatccgaaatctgatataaataccgccattgaaattttgggtcgtcttggagttgcagagcacgccgccaaaagagccgaagctatttctggtgggcagcaacaaagagttgcgatagcaagagcactgatgcaagacccaaaaataatcttagctgatgaaccaattgcctctctagatccaatgaatgcccaaatcgttatggaaactcttcgccgcatacatgacgaagatggacgaactgtgattgcgaaccttcacaccttagatactgcgagaaaatactgtgatcgtgtgattggcatgcgaaatggccatttagtttttgacgggacaccttctgaactaacaacagaagtagcccgcaaagtgtatggtgctggctctgatttttccgaggcagcaacatcaactgaaataagagtagcttaat

SEQ ID NO: 274989 - DNA, 823 bp, Unknown
  Bacterial polypeptide expressing nucleotide sequence isolated from the Sargasso Sea
gcgcgcagcgattcgagtcgaccgtctgaacaagagcttcggccgcaaacaggcgttgttcgacctggcgctgtcggtacagccaggtgaaatggtggccttgatcggtgcttcggggtcgggcaagtcgaccctgctgcgccatctcgccggcttggcacgcggcgatgccggcagtatcgaagtgctcggtcgccaggtccaggccgatggtcgcctcaacggcgacgtgcgccgtcagcgcgccgatatcggctatatcttccagcagttcaatctggtcggccgcctcagtgtaatgcagaacgtgctgctcggcggtctggggcgcatgccgcgctggcgcggcagcctcagcctgttcaatgccgaggaaaggcagcgtgccatgcaggcgctggagcgggtcggtctggccgagctcgctgcgcagcgtgcttcgaccctctccggggggcagcagcaacgcgtggccatcgcccgtgcgctgtgtcagcaggccgaggtgattctcgccgacgagcccattgcctcgctcgacccggagtcggcacgcaaggtgatggagattctcgccgacatcaaccgctgcgacggcaagacggtggtggtgaccctgcatcaggtcgactacgcggtgcgctattgccagcgcgccgtggcgctcaagggcgggcgcattcatttcgacggacccaccgaaagcttcaatcccgattttctcaacgacctctacggcggcgatctcgatatcagcctgctgctgccgcaagggcagcgcccacgggctgtagagcgtccgctgacgctggccaaggcctga

SEQ ID NO: 274990 - DNA, 715 bp, Unknown
  Bacterial polypeptide expressing nucleotide sequence isolated from the Sargasso Sea
atgccctccaagtcttctaaagtagtaattggaaattccgatttagttcatgcttccggtttgaattatgtctatggcacaggagctttgaagtatcatgtattgaaagacattgatttcgttgcaaagaagggagaggtcacacttctaataggtccatctgggagtggtaaaagtactttgctgactcttatgggtgctttgcgaagctgtcagacaggttcattaagggttttagatcatgaactacttggcattaacgaagcccaatgtgttcatattaggagacgtataggatttatttttcaaagtcataatctcgtacaagcattaactgcctttgaaaatgttgaattaatccttcggcttaagattcatgattttcaacagcgaaaattgcgggcatatgatctccttgattctgtgggcttacgacagcatctatcatcatatccaaatgaactttcaggaggtcaacgtcaacgtgtagcaattgctagagctttagcactggagcctgatcttatcctcgcggatgaaccgacagcttcattggatcgaatctctgggttagaagtgattcaactaatttcagaaatgtgtcatcaaagagggagtggtgttgtcttggttacacacgacctccgtcttgaacaagaagccgataaaatctggagcattgaagatggatcaattaatcccgtttctctttgat

SEQ ID NO: 274991 - DNA, 754 bp, Unknown
  Bacterial polypeptide expressing nucleotide sequence isolated from the Sargasso Sea
atgagtatccttgaggttaaagatctttgtgctagctacagttcgtctggacctgaaatccttaagggaataagttttgacgtagctgagaatgacttccttgccataataggacccagtggtgcagggaaatcgacactgattcgttgtataaatagactcgtagaaccaacatcaggacaaatctattttcgtagccaagaagtaacaaaattatcactccgagagttacgaaaagttagacgaggaattggtatgatcttccaagaattcaatctaatcgatcgcatgagtgtcatggacaatcttctatcaggccgccttggttttactggcaatattaggacattgtttaaggcatttaaacgaaaagacattgataatgctcttaagttacttgagcgagtggggctaagtgatcaagttgataaaagagctgatgaactttcaggaggacaacgtcaacgtgtaggtatagcaagagctttgatgcaggatccaaagctgcttctcctagatgagccaacttcctctttagacccaaaaatatcccgtgaaattatgaatcttgtcaaagaaatggcttttgaattaaaggtgccctgcctttgcaatattcatgatgttcaattggctatggatttctgcaataaaattattggtatacaagaaggcacgaagatgtttgagggaacaccagacagtttaaataaagaaaaacttcaggaaatttatgccatggaagtgctatgaa

SEQ ID NO: 274992 - DNA, 769 bp, Unknown
  Bacterial polypeptide expressing nucleotide sequence isolated from the Sargasso Sea
tatgattaaattcgaaaatgtaagtgtcacctatccaggtggcgtagaagcgctaaaaaatttagatctagaaataaatgaaggcgattttttaattattgtcggcttatctggagcaggtaaatcaacactacttcgaacaattaataatttagtcaaaccaagcaatggtgttgtttttttagacaacaaagatataactaatgcaaataaaaagcaactaaaacaaattagatcagaaattggtatgatttttcaaacttttaatctagtaaatagatcaacggttttaaaaaatgtattaacaggtagattaagtaaagtctccaccataaggtcgatttttggattatggccaaaagatcaaaaacaaatggcattcgaagcattaaatcaagttgagattcttgaaaaagcatatgtgagagcttctaatctctccggtggacaacaacaaagagtaggtattgccagggctttgtctcaaaaaccaaaagtaatgcttgcagatgaacctgttgcttcgcttgatccaatcacatcaagagttgtaatgagttatcttaaaaaaataaataaagagcttggaattacaacaattgtaaatttacattttcttgatttagctaaagaatttggagacagacttattggtttacgagatggtgaactagtttatgatggcaaagttgacgacgtttcagatgaagactttgaaaatatttatggaagatcaatcaaacaatcagatttaataggtaatgattaa

SEQ ID NO: 274993 - DNA, 798 bp, Unknown
  Bacterial polypeptide expressing nucleotide sequence isolated from the Sargasso Sea
catgattaagttgatcggtctcaacaaagtctacggtaaaggcagtgatgccgtgcacgccctgcgtgacgtgagcctgcatgtgccgcaaggcaaaattttcggggtgatcggcgcctccggtgccggcaagagcaccctcatccgctgcgtcaacctgctggagcgcccgacggaaggtcaggtcatcgtcgacggccaggatctggtcgccctgagtgagcgggacctgacccaggcccgccgccagatcggaatgattttccagcacttcaacctgctcgcctcccgtaccgtctccgccaacatcgcctttccgctggaactggcaggctggagcaaagagaagatccagcaacgggtcgaggagctgctggcgctggtcgggctggaagcccgcgcccacgcctatccgtccgagctctccggtggccagaaacagcgggtcgccatcgcccgggcactggcgccggcccccaaggtactgctgtgcgacgaggccacctcggccctcgacccgcagaccacccgctcgatcctgaccctgctcaaggagatcaacgtcaagctggggctcaccatcctgctcatcacccacgagatggacgtggtgaaggggatctgtgacgaagtggccatcatcagcgacggccggctgatcgaacagggcgaagtggcctggttcttcagcaatgccaagacccagctggcgcgagatttcatccactccaccatccacctgggagtgccccaggagtatcaggatcggatgagtgcggagcgggtccccggcagcta

SEQ ID NO: 274994 - DNA, 523 bp, Unknown
  Bacterial polypeptide expressing nucleotide sequence isolated from the Sargasso Sea
atgttcccttctagtggtgaatatcattttagaaataataatgtttcaacattgaattccaataaactggcggaattacgaaacaaagatataggatttgtttttcagaactttaatttacttccaagattaaatgctacagaaaatgttgtgcttcctcttttatattctggtaaaaatttaaaagaaagaaataaactagccatagaagctttagaaagtgtgggattgaaagacagagtacatcatagacctaatcagttatcgggtggtcaacaacaaagagtatctatagcaagagccattgctggttcacctaaattaatcttagcagatgaaccaactggtgctttggatagtaaaactggtttagaaataatgaaaatattgaatgatcttaatgcaaaagggataacaatagtactcgtaacgcatgaagatgatattgccaattacggatcaagaataattaaaatgaaagatggtagaattttagaggataaacaaaatgtcaataactgat

SEQ ID NO: 274995 - DNA, 805 bp, Unknown
  Bacterial polypeptide expressing nucleotide sequence isolated from the Sargasso Sea
tatgcttaaaataattaatatttctaaatattttgatcaagttaaagctgttaataatgtaacgataaatgttgaaaattcttcaatgattggaattattggaagatcaggtgctggtaaatctacattattaagaacaataaacagactcactgacgctacctctggcgaaattcttttccaagatcaaaatatattagatttgaagaaaaaggataaactcgcatggcaaaaaaattgtgccatgatatttcaacagtttaatcttgttccaagattggatgttcttacaaatgttattttaggcaaattgaatgagatgtctactgtacgtgctagtctaaaactttttacatctgaagaaagatatgccgcattaaacttattagacaaatttggcatgatacagactgctctacaaagagctgaaacactctccggtggtcagcaacaaagagttgcaatatgtagagctatgatgcaagaccctaaactaatccttgcggatgaacctatagcttcattagatcctttaaatgctagacttgttatggaatctcttagaaaaattcatgatgaacaaaatatcacagtgatttgtaacctacatactctagatactgcaaagcagtattgtgatcgtattattggtatgcagaacggagaaatagtgtttgatgatttaccatcaaaacttacaaatcaaaaagctagagaaatttatggtgctgaagctgacgaagcttttgaaggcactatgacatcagtttcattagagagcgcagatattaagaagactgcatga

SEQ ID NO: 274996 - DNA, 772 bp, Unknown
  Bacterial polypeptide expressing nucleotide sequence isolated from the Sargasso Sea
atgataaaatttgaaaatttaagtgttacataccctggtggtgttgaagctttaaaagatataaaccttgaaataaatgaaggtgattttttaattattgttggattgtctggagctggaaaatctactctattaagagctacaaataaccttgttaagcctactaaaggaaatgtatatgtagattctaaaaatgtcacaacagcgtctaaaaaagaattaaaaaatataagatctgatatcggtatgatatttcaaacatttaatttagtaaatagatctacagttttaaaaaatgtattaacaggtagacttagtcagatttctactattagatcaatatttggattatggccaaaagaccaaaaaaaattagcttttgaagcacttaatcaagttgaaatacttgaaaaagcttatgtaagagcatcaaatttatcaggtggtcagcaacaaagagttggtatagctagagctttatcacaaaaaccaaaagtcatgcttgcagatgaacctgtggcatctttagatccaattacatcaagggtcgttatgagttatctaaaaaaaattaatacggagttaggtataacaacaattgttaacttgcattttttagatttagcaaaagaatttggagatcgccttataggacttagagatggtgagttagtttatgatggtaaagtttcagatgtttctgataaagattttgaaaatatatacggaagatccataaaatcatctgatttaattggtgaagatgattgat

SEQ ID NO: 274997 - DNA, 775 bp, Unknown
  Bacterial polypeptide expressing nucleotide sequence isolated from the Sargasso Sea
tttgatcaaattaaaaaatgtgaatgttatttatccaacaggcactcatgccatgaaggatgtttcattagacataaatgaaggagattttttagttatagttggaaaatcaggagcaggtaagtcaactttattaagaacgctcaatggtctagtaaaaacatcaagtgggagtattaatatctttgacaaagaagttacaacatcatcaaaaagagagctcagagagattcgctcaaagactgggatgatatttcaaactttcaatcttgtcacaagaaccacagtatttaacaatgtcttaactggaagattaggcgagatgtcaacacttagaggattttttggattatggtctgacgaagataaaaaaatagcaatggatgcattaaaagaagtagagatagaagagaaagcatggacaagagcctcaaaattatctggtggtcaacaacaaagagttggaatagcaagagccttgacgcaaaaacctaagcttgttttagctgatgaaccggttgcttcattagatccagttacatctagaaaagttatggactatatcaaaaaaattaacgttgagttaggtataacaacaattgtaaatctacatttccttgacttagcaaaagactatgcagaacgcatcataggcatgtacgatggaaaaattgtttacgatggcatggttgatgatattactgatgcagattttgaaaaaatctatggaggtcaactcaccgaggaagattataatgaaacaagaacaaattaa

SEQ ID NO: 274998 - DNA, 763 bp, Unknown
  Bacterial polypeptide expressing nucleotide sequence isolated from the Sargasso Sea
aatgaatgcaattgaagttaatcacttatcaaaatcatatgctgattttgaagttttaagggatatttcctttacaataggagtaggtgagtcaatagcaattataggctcaaacggtgcgggtaaatcaaccttactaaaatgcttaactcgaataactgaaccatcacaaggttcaattaacgtattcggggatccgatcttgaaattcaggacaggcgcactgagaagaatgcgttcatccatcggagtagtattccaaaaacataatcttgtacccagattatcagttctaacaaatgtaattcatggggatataggtcgcttgcacaatgtttcaaaatttccactggcagggataagaaattggggacaaataagtgcgagtaatcgaactagaaaaaaagctatggaagcattagaaatggtgagtttatctcatttggccttgcagagagcagacacactatcaggcggacaatcacaaagagttgcgattgcaagagcgctgatgcaagagcctaatatgatattggctgatgaaccggttgcaagtctagatccagtagcagcaaacgaggtaatgagccttttttatgatttgtgtaagaataaaaatataacactaatattcacctcacataatgttgagcacgcacttgagtatggtaacaaagtgttagcaataaaaaatggtcgattgagtctttttaaagactcaaactctatagaaataaaaactctgcaggctgaatatgactga

SEQ ID NO: 274999 - DNA, 688 bp, Unknown
  Bacterial polypeptide expressing nucleotide sequence isolated from the Sargasso Sea
atgacccttatttcacttaaaaacatattcaaaatatataacgtcggaggtgaagaggttagggcgcttgatggaatagaccttgatattttagaaaatgaatatctagctataatgggaccctctggatcggggaaatctactttgatgaatatgataggttgtcttgatactccaacgtctgggatttatgaatttgagggtgaaatggttcaggtcatggatgattcccaacttgcatccataaggaatcggaagataggttttgtttttcagacctttaacttgcttccaaaagcgactgcgcaacacaatgtagagatccctcttgtctatgcaaatatcaaaaataaagatcgagctaaaatggcaactgatgcattagaaagtgttggattagcagataggttacatcataaaccaaatgaattatcaggagggcaacgtcagagagtggcaatcgcacgtgctttggttaataaaccatctattattctagctgatgagccaactggaaaccttgattctaaaagtggtagcgagatcatgacgattcttgatgatctacacaagaatggaaatactattatacttgttacgcatgaagatgatgttgctcagcatgcccaccggattattcgcttattcgatggaaaaattatagaggattcaaaacaggctccctaat

SEQ ID NO: 275000 - DNA, 811 bp, Unknown
  Bacterial polypeptide expressing nucleotide sequence isolated from the Sargasso Sea
aatgcttgagttacaagatctcagcaagaaatataataccggggacgaggctctcaagggagtcagtctttcgattcccaaagggcaggtacttgccctgatcggtccgtcgggagcgggtaaaagcaccctgattcgctgcatcaaccgtctgatagaaccaacgtcggggaaagttctgcataatggagaagatgttaccttgatgaattcgcgtcgtcttcggaagacccgacgcaagatgggaatgattttccaggaatatgcactggttgagcgtttgacagtgatggaaaatgtcctatccggacgtcttggttatgtaggtttctggagaagttattttcgaaaatttcctcaggccgactttaaggaggccttccgccttttggcgagagtcgggcttgaagaaatggctgataaacgtgccgatgaactttccggagggcaacgtcaacgcgttggaattgccagagctttgatccaaaatcctgaaattctgctcgtcgatgagccaactgccagcctggatccaaaaacatcacgacaaatcatgagactcatcactgaactctgtgaagagcggcaactggcagcaattatcaatattcatgacgttggtttagcagaaatgttcgctcaacgcattgttggacttcaaaagggagcaaccgtatacgatggccctaacaatggtttgaatcctgaggtactcaccaaaatatatggggaagaagactggacaaagaaaaaaaagggaactcagaacgaagacttggaagcgtcttctggttcggaaaaagaagtaatg

SEQ ID NO: 275001 - DNA, 685 bp, Unknown
  Bacterial polypeptide expressing nucleotide sequence isolated from the Sargasso Sea
atggacttaataaacctcagcgatatttataaaatttataatgtaggtggagaagaggttcgagctttagatggggtcgatctaactataaacagcaatgaatacctggcaattatgggcccttctggatcaggaaagtctaccatgatgaatatgataggctgtttggacaccccgagttcaggtatatatcattttgagggtgaagaagtccatatcatggatgacgcacagctcgcttccataaggaatagaaaaataggttttgtttttcagaccttcaaccttcttccaaaagcaagtgcactgaataatgttgaaatacctctcgtgtatgcaaacattaagaaagaaaaaagaattgaaatggcctcaaaggccttgaaagatgttggactggaagatagaatgcatcacaaaccaaatgaactatctggagggcaacgacagagggttgccatagccagagcgcttgttaataacccctctattattcttgctgatgagcctaccggtaaccttgactcaaaaagtggacatgaaataatgggtatttttgatcacttacattcaaaagggaatacaattatccttgtgacacacgaggatgatatcgctaagcatgcgaaacgtacaatacgtttatttgatggtaagatagtagaggataataaaggtaaatagt

SEQ ID NO: 275002 - DNA, 700 bp, Unknown
  Bacterial polypeptide expressing nucleotide sequence isolated from the Sargasso Sea
tttgtcagcagttattgcacttaattcagtcaggaaaacatatgaaatgggtgataactctgttcatgcgttggatgacgttagcctgaccgtcgaacaaggcgagtttgtaacagttacgggcgcatcaggttctggtaaatcgaccctgatgcacattctcggatgtttggataagccgactgcaggcaagtactttctcagaggcgaggacgtgtcagatttatccccagcggatttagctgtaatacgtaataagcagattgggtttgtttttcagggcttcaatttactacctcgcacaacagccacagaaaatgttgaggttcccttactgtattcgcgtccgctgatgtctgctgctgagcgccgagagaaggcgggcgaagcacttgaccttatgaagttatcagacagagcttctcatcatcctaatcaactatctggtggacaacaacagcgtgtggcaatagccagggctctggtgaataagccagatttaattttagcggatgagcctaccggtaatcttgatacggcaaccggaaaagaagttatgcaaactttggtaaagctcagagaggaaagagggattactatagttttaattactcatgagatcgaaatagccagttatggctcgcgcatagtttcaattcgcgacggtaagattatatccgatgagaaaaatgtggtgtaa

SEQ ID NO: 275003 - DNA, 772 bp, Unknown
  Bacterial polypeptide expressing nucleotide sequence isolated from the Sargasso Sea
cgtttcttttgaggttaacaaacctcaaatgataggaatcataggtagatctggggctggtaaatcaacattactaagaattataaatcgacttaccgacgcaacagatgggtctattgaaattgaaggtcaaaatattctagatttaaaaagtaaggaaaagagatcatggcaaagaaactgtgcaatgatttttcaacaatttaatttagtcccaagattagatgttttaacaaacgtaatattaggcagattaaattatcagggctcatttagagcatctttaaaaatgttttctcgagatgaaagagctgatgctctgattttactcaataacttaggtatggctaacactgcccttcaaagagctgaaacgttatctggaggtcaacagcaacgtgtagctatatgtagagctttaatgcaaaatcctaaaatgattttagcagatgaaccaattgcatctttagatccaatgaatgcaagaatggtaatggaatcattaagaaaaattcatgacgaaaaaaatttaacagttatttcaaatcttcatacacttgatacagcaaaaacttattgtgatcgaattattggaatgaaagatggtgaaatagtctttgatgatttgcctgaaaaattatcagataaacttgcaagagaaatttatggtgcagaggctgatgaagcttttgagccacaagtaacatctacagagcttaaaacaaaaaataaattaaatggagatgttgagaaagaatttgcaactgcatga

SEQ ID NO: 275004 - DNA, 667 bp, Unknown
  Bacterial polypeptide expressing nucleotide sequence isolated from the Sargasso Sea
atgagtactcttcttaaattaaaaaagataaatcttaaataccaaactggtgaagattatatcagtgttttaaaagatataaatttgaccacaaaaaaaaaagaaactatttcaatagtaggtgaaagtggttcaggaaaaacaagtttaataatgttaattggcggtttagagcgtcctacttcaggtaagatatactttcaagaccacgaaattacaaaattaagtgaagacgaagtatcaaaaatcagaaaaaaaaatattggtataatttttcagtctttttatctaatcccaaattatacagccctagagaatgtaaccttaattcttgaattgaataaatttaaaaatcctgagaaagaagcaaaatcccttttagatagattcggcctaaaacatcgactaaataatttacctagccagttatctggaggagaacaacagcgtgtcgctatcgcaagagctattgccatgaagccagagctaattctagctgatgaacctacaggaaatttagatacagaaaattctgatatgatttctaaaattttatttaggtatgttaaagaagaaggttcctcattaattatggtaacacatgacccaaaacttgctaatcgtgcaagtagaaaaattaaaattaaagatggaaaaattaaataat

SEQ ID NO: 275005 - DNA, 805 bp, Unknown
  Bacterial polypeptide expressing nucleotide sequence isolated from the Sargasso Sea
aatgatcaaagtagagaaattaaataagtattttggtgacaaccgtgcagtaaacgatgtcacatttgaaattaataaacctgaaatgattggtatcattggcagatctggtgctggaaagtcaacattactgagaataatgaatcgtctaaccgacgcaactagtggatctatttttattgaaggcagaaatatactttcattaacaaagaaagacaaacgagcatggcaaaaagattgtgccatgatatttcagcaattcaatcttgtgccccgtttagatgttttaacaaatgtaattcttggaagatcaaatattcaaggtactttacgatcaagcttaaaacttttcactaaagatgaacgcgttgatgcattgatggctctggataaattgggaatggctgaaaccgcgctgcaaagagcagagactttatctggtggacagcaacaaagggttgcaatttgtagagctatgatgcagcaaccaaaaatgattttagccgacgagcctattgcatcgctagaccctcttaatgcccgacttgtaatggaatcacttagaaatattcatagagaaaagcagattactgttcttgcaaatcttcatactcttgataccgctaaaaattattgtgacagagtcattggcatgagacttggggaaattgtttttgatgatgtaccttcaagtttaaaagatgatgttgctagagaaatttatggcgctgaagctgaagaagcatttgaaccaacagttacttcaacttcacttggtgacgaacagtttgcagaggcaggataa

SEQ ID NO: 275006 - DNA, 457 bp, Unknown
  Bacterial polypeptide expressing nucleotide sequence isolated from the Sargasso Sea
tagtcagatttctactattagatcaatatttggattatggcctaaagaccaaaaacaattagcttttgaagcacttaatcaagttgaaatacttgaaaaagcctatgtaagagcaacaaatttatcaggtggacaacaacaacgagttggtatagctagggctttatcccaaaaaccaaaagttatgctagcagatgaacctgtagcctctttagatccaatcacatcaagggttgttatgagttatttaaaaaaaattaatacagagttaggtataacaacaattgttaatttgcactttttagatttagcaaaagaatttggagatcgccttatcggcctaagagatggtgaattagtttatgatggtaaggtttcagatgtttctgataaagattttgaaaatatttacggaagatcgataaaatcatctgatttaattggtgaagatgattga

SEQ ID NO: 275007 - DNA, 841 bp, Unknown
  Bacterial polypeptide expressing nucleotide sequence isolated from the Sargasso Sea
catgaagttggagaaggaccgagacgttctgagtctcaagggagtttccgtccgctacgttgactcgaccgtggccttgcacccgacgagtctggatgtgaagcagggagagtttttggtgcttctgggcgcctcgggcgcagggaagtccaccttgttacgaagcatcaatggactggtgctgcccacaaaaggcgaggtatcgatacctggcctggcaggtggggtagtcaacgcaaagacgctgagagagcaccgcaagcgctgtgggatggttttccagcagcatcatctgattggacgtcagtcggtcctcaggaatgttctgatgggaaagctcggtgacaggggtgcattcgcttcgctatggccgtggagcaagaaggacaagctggaggcgctcacagtgattgagcgtgtcgggctgctcgaaaaggcgctctcccgggctgatgccttgtctggggggcagcagcagcgcgtaggcatagctagggcgctaatacagaagccacgaatcctgctggccgatgagcctgttgccagcctggacccggcaaccgcacatagcgtgctcaccttgttgcatgagatctgcaaaaaggaccacctcaccgcaatcgtgagtcttcaccaggtggagctcgcgcgctcgtttgcagaccgaatcattgggctccgccagggagctgttgtattcgagggtagggcagagcagctgagtcctgatgttgcgcggaacctctatgcaaagcagtccaacgcttccaacacgagtgcgtccactgatagcccccgaactcttcaatccagtcaaaccaaggagctcttgccatgctga

SEQ ID NO: 275008 - DNA, 691 bp, Unknown
  Bacterial polypeptide expressing nucleotide sequence isolated from the Sargasso Sea
atgaccctaatctctcttaaaaacatctataagatatacaatgtaggcggagaagaagtacgtgcccttgatggtattgatctcgatattaatgagaacgaatatttagcaataatgggtccttccggttcaggtaaatcaaccctaatgaatatggttggttgtctcgatacccctacctcagggatatatgagtttgagggtgagatggtgcaagtaatggatgattctcaattggcttcaataagaaatcgaaagattggttttgtttttcagacctttaatctgcttccaaaagctaccgctcaacacaatgtagagataccactagtatatgcaaatatccgtaagcgtcaaagagttgaaatggcatccaaagcacttgagagtgttgggctttcagacaggtctcaccataggcctaatgaattatctggtgggcagaggcagcgagttgccatagcaagagctcttgtaaataacccatctattattcttgctgatgagccaacaggtaaccttgattctaagagtggacatgaaatcatgaatattttggatgatttacatcaaaagggtaataccattatacttgtaactcatgaagatgatatagcacagcatgcccaccgagtaatccgtttgcttgatggggaaataactgaagatttgaaaataaaatccaaatgat

SEQ ID NO: 275009 - DNA, 769 bp, Unknown
  Bacterial polypeptide expressing nucleotide sequence isolated from the Sargasso Sea
aatgcttaaaacaataaacctcaaaaaggtttatccaaatggtgaagaggcgcttaaaggaataaacctggaaattcctaatgggcaagtagttgctcttatcggtccttcaggtgctggtaaaagtacttttattagaacaataaatagattagttgagcccacttcagggaaagtttatttcgctaatgaaaaaaatgacattacttctttaaataaatctaaattaagaaaaataagaagacaaattggaatgattttccaggaatttgctttggtagaaagattaagtgtaatggaaaatgtcctttccggcagattaggttacgtaggattttggaatagttttttcaggaaatttcctcaaaaagatattgaagaagcattccgtctgcttcaaagaattggactagagcatatgcttgataaaagagccgatgaattgtcaggagggcagaggcaaagagtaggaattgctagagctttgatacaaaatccaatgttacttttagtagatgaacctacagctagtttagatcccaaaaattccaggcaaattatgcgattaatatgcgagttatgtaaggaaagaaatcttgctgcgattataaatattcatgatgtttttcttgctcagaattttgcagaaagaataataggtttaaaagctggagaaattgtttacgatggcaagccaagtggcttatcagagacaatacttacaaaaatatatggagaagaagactggtctaaaactgtagcaaattag

SEQ ID NO: 275010 - DNA, 781 bp, Unknown
  Bacterial polypeptide expressing nucleotide sequence isolated from the Sargasso Sea
aatgttagaaattgttaacttaacaaaaaattttggttcattaacagctgtttcagaagctaacttttcaattactaagcctcaaatgattggcatcataggaagatcaggagcaggaaagtcaagcctactaagaatgataaatagattacttgacgcaacatctggcgaaattattcattctggaattaatattagaaatcttaaaggaaaaggaaaaagaaaatggcaaaaagattgcgcgatgatctttcaacaattcaatcttgtgccaagacttaatgtacttactaatgtattacttggtgggcttaatcaacaacctttaattagatcattattatcaatttttacccaagaagaaagaaataaagcactcaaaatacttgatagatttggaattgtcgaaactgcccttcaaagagccgaaactctatcaggaggccagcaacaaagagtagctatatgtagagcactaatgcaatctccaaaaatgattttagctgatgagcctattgcttcattagatcctttaaatgcaaaacttgtgatggaggcattaagaaatattcatattcaagaaaaaattaccgttgtttgtaaccttcacactttagatactgcaaaaaaatactgtgacagaataattggtatgaaagcaggtaaaatcgtatttgatgatgtccctttaaagttaactcaatcaaaaacaaaacatatttatggagctgatgaagatgatgagttcaattcttcagtaacatctacctcattgggataa

SEQ ID NO: 275011 - DNA, 2071 bp, Unknown
  Bacterial polypeptide expressing nucleotide sequence isolated from the Sargasso Sea
atgagccagcccctgctgaaactcgctgccgttacgcgacgctttccggccggcgacaaggatgtcgttgtcctgagcaacgtcaacctgtcgatccacgcgggcgagatcgtcgcgatcgtcggcgcgtcgggctccggcaagtcgacgctgatgaacatcctcggctgcctcgaccacccgagcgaaggcacctacacggtcggcggccgcgacacgcacatgctcgacagcgacgagctcgcgcaactgcgccgcgaacatttcggcttcgtgttccagcgctatcacctgctgccgcacgtcgacgcggtcgcgaacctcgaaatgcccgcgatctacgccggcacgccgcgcgccgagcggcacgcacgcgcacgcgaactgctcgcgcgcctcgggctcgcggatcgggcgcaccatcgccccgggcagctttccggcggccagcagcagcgtgtgagcatcgcgcgtgcgctgatgaacggcggccaggtgatcctcgccgacgaaccgacgggcgcgctcgacacgaaaagcggccaggacgtgatccgcatcctgcacgagctgaacgcgctcggccatacgatcgtcatcgtcacgcacgaccaggccgtcgcgcgccatgcgaagcgcatcatcgagatcagcgacggcgagatcgttgccgaccggccgaatcggcactatgcggaagccctcgcggaagtgagcgtgggcgcagcagaagcggcggagtcgatcgaagcggaagccggcgcgctacccgccgacgatcgccacgacacgccatcgccgcccgcaccggtcgacaccgatgcgcatcccgataccgataccggcacccgcacgcgacgcttcgcggccggctccggccgcttcgccgaggcgtgccggatggcgtggatcgcgctcgtgtcgcaccggctgcgcacgctgctgacgatgctcggcatcatcatcggcatcacgtcggtcgtgtcgatcgtcgcgatcggcgaaggcgcgaagcgctacatgctcgacgagatcggcagcatcggcacgaacacgatcaacctctatccgggcaccgactggggcgacagccgcgccgacgcgatccagacgctcgtgcccgccgacgtcgccgcgctcgccgaacagccgtacgtcgacagcgcgacgcccgaaacgtcgcgcacgctgctgctgcgctaccgcaacgtcgacgtgaacgcgctcgtgagcggcgtcggcgaccgcttcttccaggcccgcgggatgcgcttcgcgcagggtgtcgcattcgacgaggacgcggtgcgccgccaggtgcaggtggcagtgatcgaccagaacacgcgccgcaagctgttcggcgcgacgcgcaacccgatcggcgaagtgatcctggtggacaacgtgccgtgcgtcgtgatcggcgtgaccgccgacaagaagagcgcgttcggcagcgtgaagagcctgaacgtgtgggtgccgtacaccaccgcgagcgggcgcctgttcgggcagcgccatctcgacagcatcaccgtgcgcgtgcgcgacgggcagccgagcgccgccgccgagaaaagcctcgaaaagctgatgacgcagcgccacggccgcaaggacttcttcacgtacaacatggacagcgtggtgaagaccgtcgagaagaccggccagtcgctcaccttgctgctgtcgctgatcgcggtgatctcgctcgtcgtcggcgggatcggcgtgatgaacatcatgctggtgtcggtcaccgagcgcacccgcgaaatcggcatccggatggcggtcggcgcgcgccagtcagacatcctgcagcagtttctcgtcgaggccgtgctcgtctgcctgctcggcggcacgatcggcatcgcgctgtcgttcgggctcggtgcgctgttctcgatgttcgtcgcgcaatggaagatggtgttctcggccggcgcgatcgtgaccgcgttcgtctgctcgacgctcaccggtgtgattttcggcttcatgcccgcgcgcaatgcatcgcggctcgatccgatcgatgcgctcgtgcgcgactgac

SEQ ID NO: 275012 - DNA, 464 bp, Unknown
  Bacterial polypeptide expressing nucleotide sequence isolated from the Sargasso Sea
tgacgaagacctgtcacgagttcgtggtcgctatcttggtttggtgtttcagtcatacaatctgattcagcaactcagtgtcgttgaaaacatcatggttccgttgtcgtaccagttacctgttcgtccggatggccgtgaactcagtacaaagctcgcaacacttgtggggcttgctggccgtcttgaccaccggcccaatcagctttctggtgggcaacagcagcgagtggcgattgctcgagcgttagtgaataaccctcatgtcattcttgctgatgaaccaacgggaaatctcgatacagcgacatcgaatgagattatggaccttcttgatgttttgaataataccggccgcaccattgtcatggtgacccacgaacctgacattgcagagcgagccaagacagtgattacccttcgagatggtctgattcagtctgttgaacagaacagggtataag

SEQ ID NO: 275013 - DNA, 805 bp, Unknown
  Bacterial polypeptide expressing nucleotide sequence isolated from the Sargasso Sea
aatgattgaaataaaaaatttaaacaaatactttggctcaaatcatgcggttaaaaatttaaatattaccattcaagaatcagaaatgattggcatcattggccggtccggtgcaggaaaatccactcttcttcgaattatgaaccgcctaactgaggagagttctggtgagattatcgttgatggtcaagatataactaaacttaacaaaaaagataaaagagcatggcaaaaaagctgcgcgatgatatttcaacagtttaaccttgttccaagactagatgtcctgacaaatgttgttttgggaagactgaatgttcaaccaacctttaaaggagcccttaagttattcactaaagaagaaagagtagacgctcttctcgctcttgatgaactcggaatgtctcaaactgctcttcaaagagctgaaacgctatcaggcggacaacaacaacgagtagcaatttgtagagcgatgatgcaagacccaaaaatgattctggcagatgaacctatcgcttccctcgatcctttaaatgctcgtctggtaatggagtctcttagaaaaattcacgaagagaaaaaaatgactgtaatagcaaaccttcatactctcgatacggccaaacactattgtgacagaattattgggatgagtttaggagaagtagtttttgacgatgtaccctccaagctgacagatcaacttgcaaaagagatctatggcgctgaggctgatgaagcctttgaggcctcacttacatcaacaagtttggggactacccaaaaggcaggagcaagttaa

SEQ ID NO: 275014 - DNA, 811 bp, Unknown
  Bacterial polypeptide expressing nucleotide sequence isolated from the Sargasso Sea
tatgcgcatttcaaacattcgtaaagaattcggttctgtcatagctgtgaatggggtttcattcacgattgagaagcctgaattcattggaatcattggtcgttccggggcaggaaagagtacgttgttgagaatgatcaataggttgatcgattcaacggatggtgaagttgagtttgaaggaaccaatgttctcagtttgtctggacgagctaaaagggattggcaaagaaattgtgcaatgatctttcagcaattcaatctaattcctcggcttgatgccatcacaaatgtgatgttaggtcgtttaaaccagctaaatcttttgcggagttttttcaggattttccccgaaaaagatattgcagatgccctcaccaaccttgagaggctggatattgctgataaagcattgacgagggttgagcatctgtcgggtggtcaacagcagcgtgtggctattgcaagggccttaatgcagaatccaaaattaattcttgctgatgaacccattgcttctttagacccactctctgctgaaacagttatgaataatctgagaaagatccacgaaaatgatcaactcacggtgatctgcaaccttcacacacttgaaactgctcgacgttactgtaatcgagtaattggaatgttgaaggggaaagtcgttttcgatggtcctattgatcaattgacaggaagtgttgttcgggaaatttatgattcagaaaagcttgatgagtctctcaattcagtttctctaaaacaacctgaagaatccaacattgattctgcatctgcagaatcttaa

SEQ ID NO: 275015 - DNA, 694 bp, Unknown
  Bacterial polypeptide expressing nucleotide sequence isolated from the Sargasso Sea
tttgggttctttaatatcacttcagagtataaaacgtcattatgaggttggggatgaattagttcgggctttagatggagttgatttaaatattaatcataatgaatatatttctattatggggccttccggttctggaaaatcaacattaatgaatatgattggttgtcttgatacaccaagtgctggaacttatgaatttgagggtgaacttgtacatgatatggatgataatcaattggcatctataagaaaccgtaaaattggatttgtatttcaaacttttaatttgctacctaaagcaactgctttacataatgttgaagttccacttatatactctaatattcctaaagatcaacgtatagaaaaagcaatcaaagcattaacagaagttggtttggaggatagaatgtatcatcgtccaaatgaattatccggaggtcaacgccaaagggttgcaattgctagagcattagtaaatgatccatcaattatcctcgctgacgagcctacagggaacctagattcaaaaagtggtgatgaaattatgaatatattagataacctattttctagaggaaatactataattcttgtaacacatgaagaatatattgctaaacacgctcatcgcattatcaatatttttgatggaaagattaaggaagataaggtagttaaaaagaaataa

SEQ ID NO: 275016 - DNA, 610 bp, Unknown
  Bacterial polypeptide expressing nucleotide sequence isolated from the Sargasso Sea
tggtaaatcaactgcaatgaatttaataggctgtttagatacactcacatcgggtcaatttttatttgaagggagtgatatttccaactttacatccgatgaactggcaaccatacggaatgggaaaataggttttgtttttcagagttttaaccttctggctaggactacggccatggataatgttcagttgccactgctatatagtggtatgccaagagcggacagggccagagttgctgaaaaggtattaaaggaagttggtttaggggatagggtggatcatcacccctctcaactatccggaggtcaacagcaacgtgttgctattgccagagccctagttaatgcgccggcactcatattagctgacgagcctactggtgctctcgatactcgcacagggattgaaataatgtcactttttcaaaaactcaatgtgaccggtatcactataattattgttactcacgaagccgatgtcgcgcaatttgcgaaacgtattataagattccaggatggacgaattatcagcgaggagaacaacaaggaaagtgttaatgctaaggagttgctgcaaaactttaaaccagtggatagggcgggatga

SEQ ID NO: 275017 - DNA, 769 bp, Unknown
  Bacterial polypeptide expressing nucleotide sequence isolated from the Sargasso Sea
aatgcttaaaacaataaacctcaaaaaggtttatccaaatggagaagaggcgcttaaaggaataaacttggaaattcctaatgggcaagtagttgctcttattggcccttcaggtgctggtaaaagtacttttattagaacaataaatagattagttgagcctagttcaggtaacgtatatttcgctaacgaaaaaaatgatattacttccttaaataaatctaaattaagaaaggtaagaagacaaattgggatgattttccaggaatttgccttagtagagagattaagtgtaatggaaaatgtcctttccggtagattaggatacgtaggattttggaatagttttttcaggaaatttcctcaaaaagatattgaagaagcattccgattgcttcaaagaattggactagagcatatgcttgataaaagagccgatgaattatcaggagggcagaggcaaagagtaggaattgctagagctttgatacaaaatccaatgttactcttagtagatgaacctacagctagtttagatcccaaaaactccagacaaattatgagattaatatgtgagttatgtaaggaaagaaatcttgctgcaattataaatattcatgatgtttttcttgctcagaattttgcagaaagaataataggtttaaaagctggagaaattgtttacgatggcaaggcaagtggcttgtcggaagcaatacttacaaatatatatggagaagaagactggtctaaaaccgtagcaaattag

SEQ ID NO: 275018 - DNA, 805 bp, Unknown
  Bacterial polypeptide expressing nucleotide sequence isolated from the Sargasso Sea
atgcttaaaataattaatatttcaaaatattttgatcaagttaaagccgttaataatgtttcaataaatgttgaaaattcctcaatgattggaattattggaagatcaggtgcaggtaaatctacattattaagaacaataaatagactaactgatgccacctcaggtgaaattcttttccaaaatcaaaatatattagattttaagaaaaaggataaactcgaatggcaaaaaaattgtgccatgatatttcaacagtttaatcttgttccaaggttggatgtgctaacaaacgtgatgctaggcaagttaaatgaaatgtctactgtgcgtgctagtttaaaactttttacatcagaagaaagacatgcagcactaaacttattaaataaatttggtatgatgcaaacagctctacaaagagctgaaactctctctggtggtcagcaacagagagttgcaatatgtagagctatgatgcaagaccctaaactaatccttgcagatgaacctatagcatcattggatcctctaaatgccagacttgttatggaatcgcttagaaaaattcacgatgaacaaaatatcacagtgatttgtaacctacatactcttgatactgcaaagcagtattgtgatcgtattattggtatgcagaacggagaaatagtctttgatgatttgccatcaaaactaacaaatcagaaggccagagaaatttatggtgctgaagccgacgaagcttttgaaggcactatgacatcagtttcattggagagtgcagatattaagaagactgcataaa

SEQ ID NO: 275019 - DNA, 291 bp, Unknown
  Bacterial polypeptide expressing nucleotide sequence isolated from the Sargasso Sea
tagcagataggttacatcataaaccaaatgaattatcgggaggccaacggcagagagtggcaatagctcgcgctttagttaataagccatctattattctagctgatgagccaactgggaaccttgattctaagagcggtagcgagatcatgactatccttgatgatctacacaagaatggaaatactattatacttgttacacatgaagatgatgtcgctcagcatgcccaccggattattcgcttgttcgatggaaaaattattgaggattcaaaacaagctccctaat

SEQ ID NO: 275020 - DNA, 826 bp, Unknown
  Bacterial polypeptide expressing nucleotide sequence isolated from the Sargasso Sea
aatgattattaaaaaagttaacaaatttttcggtgataatcatgccgttaaaaacgtttcttttgaggttaacaaacctcaaatgataggaatcataggtagatctggggctggtaaatcaacattactaagaattataaatcgacttaccgacgcaacagatgggtcgattgaaattgaaggtcaaaatattctagatttaaaaagtaaggaaaagagatcatggcaaagaaactgtgcaatgatttttcaacaatttaatttagtcccacgattagatgttctaacaaatgtaatattaggcagattaaattatcagggctcatttagagcatccttaaaaatgttttctcgagatgaaagagctgatgctctgattttactcaataacttaggtatggctaacactgcccttcaaagagctgaaacgttatctggaggtcaacagcaacgtgtagctatatgcagagctttgatgcaaaatcctaaaatgattttagcagacgaacctatagcatctttagacccaatgaatgcaagaatggtaatggagtcattaagaaaaattcatgatgaaaaaaatttaacggtcatttcaaatcttcataccctagatacagcaaaaacctattgtgaccgtattattggaatgaaagatggcgcaattgtctttgatgatgtaccagaaaaattatcagacaaacttgcaagagaaatttatggtgcagaagctgatgaagcttttgaaccacaagtaacatccactgagcttaaaacaaaaaaaaagataaatggagatgttgagaaagaatttgcaactgcatga

SEQ ID NO: 275021 - DNA, 826 bp, Unknown
  Bacterial polypeptide expressing nucleotide sequence isolated from the Sargasso Sea
aatgattattaaaaaagttaacaaatttttcggtgataatcatgccgttaaaaacgtttcttttgaggttaacaaacctcaaatgataggaatcataggtagatctggggctggtaaatcaacattactaagaattataaatcgacttaccgacgcaacagatgggtcgattgaaattgaaggtcaaaatattctagatttaaaaagtaaggaaaagagatcatggcaaagaaactgtgcaatgatttttcaacaatttaatttagtcccacgattagatgttctaacaaatgtaatattaggcagattaaattatcagggctcatttagagcatccttaaaaatgttttctcgagatgaaagagctgatgctctgattttactcaataacttaggtatggctaacactgcccttcaaagagctgaaacgttatctggaggtcaacagcaacgtgtagctatatgcagagctttgatgcaaaatcctaaaatgattttagcagacgaacctatagcatctttagatccaatgaatgcaagaatggtaatggaatcattaagaaaaattcatgacgaaaaaaatttaacagttatttcaaatcttcatacacttgatacagcaaaaacttattgtgatcgaattattggaatgaaagatggtgaaatagtctttgatgatttgcctgaaaaattatcagataaacttgcaagagaaatttatggtgcagaggctgatgaagcttttgagccacaagtaacatctacagagcttaaaacaaaaaaaaagataaatggagatgttgagaaagaatttgcaactgcatga

SEQ ID NO: 275022 - DNA, 808 bp, Unknown
  Bacterial polypeptide expressing nucleotide sequence isolated from the Sargasso Sea
atgcatctacaagtatcaaaacttaaaaaagaatttggttcgacagtcgcaatagatagtgtttcttttgaatctactaaaaatgagttcataggtatcatcggtcgttctggcgcaggaaagtcaacgctcctccgggttttaaatagactgactactgaaactgaagggaaagtgtttgccgggagcattaatattctggagctcaagggttcagagaaaaggcaatggcaatctcaatgcgcaatgattttccagcaatttaatttagtgcctcgcttggacgtgatcacaaacgtcatattgggtcgcttgttctaccagtctaccttgcggtcaacactcagattttttacaaaagaagagcgttcgaatgcccttgatttgatgaatcgtttcggtgtcgctcctacagctttgcaaagagcagaaactttatctggaggtcagcaacagagggtagcgatctgtagagcgatgatgcaaaatccaaaaataattttagcagatgagccaattgcatccttggatccattaaatgcacggctagtaatggaagcactgcaatcaattaattcgaacgaaaaaatcaaagtgatatgtaatttgcacactttagatacagcaagaacatattgcgacaggattattggaatgcggtctggagatatagtatttgacggcaagccaagtgaattgagcgatgcgaaagcaagagaaatttacggtgttgaggctgatgaggcattcgaagcgtcagtaacctcaacgtccttaaatacatcccgcgtagggattgcaagttaat

SEQ ID NO: 275023 - DNA, 826 bp, Unknown
  Bacterial polypeptide expressing nucleotide sequence isolated from the Sargasso Sea
tatgcgaataagcaaagtaaataaattctttggtaataatcacgctgttaaaaatgtttcatttgaggtcaataaacctcaaatgataggaattattggaagatcaggtgcaggtaaatcaactcttctcaggatcataaatcgactcactgatgcaacagatggagaagtagaaatcgatggtcaaaatatattacaactaaaaagcaaagaaaaaagatcctggcagagaaattgtgcaatgatttttcaacaatttaacttagtaccgagactagatgtattaacaaatgtcattttaggtagattaaattatcaaggatcatttagagcatcattaaaaatgttttctcgagatgagagagctgatgctttaattttgcttaacacccttggtatggctaatactgcacttcaaagagcagaaactttatctggtggtcaacaacaacgtgtagctatatgcagagcattaatgcaaaatcctaaaatgattttggcagatgaacctatagcatctttagacccaatgaatgcaagaatggtaatggagtcattaagaaaaattcatgatgaaaaaaatttaacggtcatttcaaatcttcataccctagatacagcaaaaacctattgtgaccgtattattggaatgaaagatggcgcaattgtctttgatgatttaccagaaaaattatcagacaaacttgcaagagaaatttatggtgcagaagctgatgaagcttttgaaccacaagtaacatccactgagcttaaaacaaaaaaaaagataaatggagatgttgagaaagaatttgcaactgcatga

SEQ ID NO: 275024 - DNA, 715 bp, Unknown
  Bacterial polypeptide expressing nucleotide sequence isolated from the Sargasso Sea
aatggttagtagacatataataattattttaataataaaacttttgttcatgagctctcttcttaaattaaaaaaaataaatcttaaataccaaactggtaaagataatattagcgttttgaaagacataaatttgaccacaaaaaaaaaagagactatttcaatagtaggtgaaagcggttcaggaaaaacaagtttaatcatgttaattggtggtttagagcgtccaacttcaggcaagatatactttctagacaaagaaattacaaaattgagtgaagacgaagtatcaaaaatcagaaaaaaaaatattggtataatttttcagtctttttatctaatccccaattatacagccctagaaaatgtaaccttaattcttgaattgaataaattcaaaaatcctgagaaagaagcaaaatctcttttagatagatttggactaaaacatcgactaaacaatctacccagccagttatctggaggagaacaacaacgtgtcgctatcgcgagagctattgctatgaagccagagctaattctagctgatgaacctacaggaaatttagatacagaaaattccgatatgatttctaaaattttatttaggtatgtcaaagaggaaagttcctcgttaattatggtaacacacgacccaaaacttgctaaccgtgcaagcagaaaaattaaaattaaagatggaaaaattaaataa

SEQ ID NO: 275025 - DNA, 688 bp, Unknown
  Bacterial polypeptide expressing nucleotide sequence isolated from the Sargasso Sea
atggtcgaaccgatctgcaagaccctggaagagatcgtcgactggcgcgtggacttcctcacccgctaccagagtgccggactggcgcgccgctatcgccagttggtcgagcgcgtgcgcgacgccgatagcgcggacgatctggcgctgtccaaggccgtcgcgcgctactacttcaagctcctcgcctacaaggacgagtacgaggtagcgcggctgtacagcgagccggaattccgccagcagctcgaagcgcagttcgagggcgactacaagctgcagtttcacctcgccccagcctggctggccaagcgtgaccccgtcaccggtgaaccgcgcaagcgcgagctggggccgtgggtgctgaacctgtttggcgtgctggccaagttccgcttcctgcgcggcacaccgctcgatccgttcggctatggccacgatcgccgcgtcgagcgccagctgatcaccgagtacgagaaaaccgtggacgggctgctggcccagctcaagccgaccaactaccgcaccgccgtggccatcgccgcgctaccggaacagatccgcggctacggcccggtgaaggagcgttccatcgccaaggcccgccagcaggagaagttgctgcgcgagcaattggccaagggcgacgaggtacagagcgtgcggctgttccagccggcggcctagc

SEQ ID NO: 275026 - DNA, 138 bp, Unknown
  Bacterial polypeptide expressing nucleotide sequence isolated from the Sargasso Sea
gatgagccattcggaccgcattcaggcccggtttcagtgccacttcgacaagtttgccctggatgttgatctcaatctgcccggctcgggcattaccgccatctttggccactccggctgcggcaaaaccacgctgtt

SEQ ID NO: 275027 - DNA, 277 bp, Unknown
  Bacterial polypeptide expressing nucleotide sequence isolated from the Sargasso Sea
acttggggaccagagatactacttatggatgaacctctagccgctttagatcctcaaacaatacaaatgcttcaaacaataataattaaactacaatcagagtataacttaactatcctgattactgaccatcaagcaagggatttacttgtagtttgtgatagagcggtaatactttcaaattcaaaaatagttgctgagggaacaccaaatcaattaatgcaaaatgatgatgcagctaaatattattttggtgaaaattttaaatttaagtaag

SEQ ID NO: 275028 - DNA, 736 bp, Unknown
  Bacterial polypeptide expressing nucleotide sequence isolated from the Sargasso Sea
aaaagttttatttccttagaaaacatatcagtttcttttaaaaaaaatcatcaaatattagataatgtgtctttaaatataccaaagggtcaaatactaggattacttggtcctaatggtgctggaaaatctacactaatgaatgttatatcagggcttataaaacctggctatggtaaagtaaaaataaataacgaagatatttcagatctaccaatttatataagaacaaaaaaatttaaaatttctataattccacagtttggtggcctatttgcatcacttacgactgaacaaaacattcgagcagttgcggaaattttaattaacgacaaatcatttattgacataaaaataaatgaactaatagcaaaatttgaattggactccgtaaaagaaatagaagcgaaatatttatctggaggacaaaagcggcgactcgttatagctatgggacttatttctaaaccagatataatactaatggatgaacctttggctgcactagatcctcaaacaattcaaatgttacaaaatacaatagtaaaacttcaaacagattttaatttaactataattatcacagatcatcaagctcgtgatcttttggctatttgcgataaagctataattttatcaaatagcaaaatagttgcttcagggacaccaagtgatctaatcaaggatgaaagtgctaataagttttattttggtaataatttccaatttaattaat

SEQ ID NO: 275029 - DNA, 523 bp, Unknown
  Bacterial polypeptide expressing nucleotide sequence isolated from the Sargasso Sea
gatgctgtcgatccgagtgacgcgggctctctccgatttcacgctggacgtcgacgtggactgcccatacatggtcacggcggtgtttggaccttccggatccggcaagacgtctctcctcaaccttgtggccggtctgctgagaccggaccgtggggagatcgtgcacgacgatgacgtgctgttttcgtcggataagagtattgacagaccaccagacaatcggcgaatcgggtatgtcttccaggataatctgcttttccctcactttacggtagcggagaacctgcgatacggacacgaccttctgctgtcagcccagcgccgtttccaagttgaccaagtggctgaccttctcgaactcggttccctgatggagcggcgtcctgagtcgctgtcaggcggcgagagtcaacgcgttgccatgggacgagcgattctggcatcccctcgtctgctcttgatggacgagcccttggcgtcgctggatcagggcctcaagaaccggatcattccttacctg

SEQ ID NO: 275030 - DNA, 623 bp, Unknown
  Bacterial polypeptide expressing nucleotide sequence isolated from the Sargasso Sea
aataaaaaaacctaagttactattattagatgagcctcttgcagcactagataaaaaactaagatcaaaaacacaaatagagttaacaacacttcaaaagaaacttaaaattacatttgtcttcgttacacatgatcaggaagaggcaatgtccttatctgatagaatggcaataatgaagaatggtcttattttggaatgttctagccctgaagagatttatgaaaatcctaaaagtctttatactgccaattttataggaattgcaaatataattgagatttataagaaagatgaaaatttttattctgatgatttaggtataaattttaaattaaacaaagaattaaaaaatacaaaaactaatattttactaagaccagagaaaataaaaatacaatcaataaataatttgaaaacaagttcatttaattcctttagtggagaaattttagaaaaatcatatttgggaagctttacacgttatgaaattaaaattaaaaatatgataatttcagttttagatcagaattttaactccaactcaaattataatttcccaaaaggggagaaagtcatttgtagttgggaaagtgaatcaattaaggttttagaggattaat

SEQ ID NO: 275031 - DNA, 562 bp, Unknown
  Bacterial polypeptide expressing nucleotide sequence isolated from the Sargasso Sea
atggataataattttcttgtaattgaaaatatttctaaatcctttggagataacaaagttttagaaaatattaatttaaatatttcaaaatctgaattttttggtctcttaggatcttcgggttcaggcaaaactacattactaagaatactaggtggatttgagaagccagatacaggacgtgtaatactcgacggaatggacataacaaaccttgaaccttttgatagaccattaaactatatgtttcaatcgtatgctctatttcctcacttaaacgtatttaataatttagcttttggaataaaagaaaattttacccaaaaagaaattgaaataaatgtaagaaatattgctgaacttttatctattgaacatttattaaatagaagaattaagcaactatcaggtggagagcagcaaagagttgcccttggaaggtgcttgataaaaaaacctaagttattattattagatgagcctcttgcagcactagataaaaaactaagatcaaaaacacaattagagttaacaacactccaaaagaaactaaaaattacat

SEQ ID NO: 275032 - DNA, 781 bp, Unknown
  Bacterial polypeptide expressing nucleotide sequence isolated from the Sargasso Sea
atgtctgttatcaaaaaattcagaattacaaaaataaaaaatagtaaaccattagtttcgttaaagaaaatatctctctcatttaaaaaaaatcatttaattctagataatatttcattagatatttctaaaggtcaaataataggattattaggtcccaatggagccggtaaatcttcgctaatgaatctaattacaggtatacttaaaccaaactttggaaatataattataaataacgaggatataactgaatacccaatatatcaaagaacaaaaaagtttaaaatttcttttgttcctcaaattggagggttcttttctgatttaacagcagagaataatttaaatgctatcggggaaatattaatcaaagatccaaaatatagaaaatccaaaatagaggagttaatttcaaaatttgagcttgatgcagttagaaaagttgaagcaaagtttttgagtggtggaatgaaaagacgtctggtaataagtatgtctttattgggtgatcccgaaatacttttaatggatgaaccattagccgctttagatccacaaacgattcaaatgttgcagtccattattataagattacagtcggaatataatcttacgattttaataactgatcatcaggcaagagatcttcttgttgtttgtgataaagctgtaatactctctaattcaaaaattgttgccgagggaactcctaatcaacttatgaaaaatgaaaatgctgcaaaatattattttggagagaactttaagtttaattagt

SEQ ID NO: 275033 - DNA, 718 bp, Unknown
  Bacterial polypeptide expressing nucleotide sequence isolated from the Sargasso Sea
aaaaaaatatctttatcatttaaaaaaaatcatcttattttagataatatatcgattgatatttcaaagggtcaagtaataggattactagggcctaatggagctggaaaatcttcgttaatgaatctaatcacaggtgtaataaaaccaaattatggaaatatcataatcaataatgaggatattacccagtatccaatttatgtaaggacaaagaaatttaaaatttcgtcggttcctcaaataggaggtttttttgcagatttaagttgtgaagataatttaaatgccgttggagaaattttaataaaagatataaaaaaaaggaaattaaaaattgaagaattgatctcaaaatttgaacttgatgcagtaagaaaagtagaagctaaatttcttagtggtggtatgaagcgtaggcttgtaatcagtatgtcgctgttaggcgaaccagaaatattgctcatggatgagccattggctgctctagatcctcaaacaattcaaatgcttcaaacaattataataaagcttcagtctgaatataatcttactattttaattacggaccaccaagcaagagatttacttgtagtttgcgatagggcagtaatactgtcaaattctaaaattgttgcagaaggaaccccaaatcaattaatgcaagatgacaatgccgctaaatactattttggtgataattttaaattcaaataaa

SEQ ID NO: 275034 - DNA, 715 bp, Unknown
  Bacterial polypeptide expressing nucleotide sequence isolated from the Sargasso Sea
gccgaacttttatctattgaacatttattaaatagaagaattaagcaattatcaggaggagagcagcaacgagttgctcttggaaggtgcttaataaaaaaacctaagttattattattagatgagcctcttgcagcactagataaaaaactcagatcaaaaacgcaattagagttaacaacactccaaaagaaactaaaaattacatttgtttttgtcacccatgatcaggaagaagcaatgtccttatctgatagaatggcaataatgaagaatggtcttattttggaatgctctagccctgaagagatttatgaaaatcctaaaagtctttatactgccaattttataggaattgcaaatataattgagatttataagaaagatgaaaatttttattctgatgatttaggtataaattttaaattaaacaaagaattaaaaaatacacaaactaatattttactaagaccagagaaaataaaaatacaatcaatgaataatttgaaaacaagttcatttaattcctttagtggagaaattttagaaaaatcatatttgggaagttttacacgttatgaaattaaaattaaaaatatgataatttcagttttagatcagaattttaactccaactcaaattataatttcccaaaaggggagaaagtcatttgtagttggaaaagtgaatcaataaaggttttagaggattaat

SEQ ID NO: 275035 - DNA, 565 bp, Unknown
  Bacterial polypeptide expressing nucleotide sequence isolated from the Sargasso Sea
gatggataataattttctagtaattgaaaatatttctaaatcctttggagataacaaagttttagaaaatattaatttaaatatttcaaaatctgaattttttggtctcctaggatcttcgggttcaggcaaaactaccttactaagaatactaggtggatttgagaagccagatacaggacgtgtaatcctagacggaacagacataacaaaacttgagccttttgatagaccattaaactatatgttccaatcgtatgctctatttcctcacttaaacgtatttaataatttagcttttggaataaaagaaaattttacccaaaaagaaattgaaataaacgtaagaaatattgctgaacttttatctattgaacatttattaaatagaagaattaagcaattatcaggaggagagcagcaacgagttgcccttggaaggtgcttaataaaaaaacctaagttattattattagatgagcctcttgcagcactagataaaaaactaagatcaaaaacgcaattagagttaacaacactgcaaaagaaactaaaaattacattt

SEQ ID NO: 275036 - DNA, 733 bp, Unknown
  Bacterial polypeptide expressing nucleotide sequence isolated from the Sargasso Sea
atgtcagtaattaaaaaatttagaattactaaatttaagaacactaaacccttaatatcacttaaaaaaatttcattatcttttaaaaaaaatcacttgatattagataatatttctctcgatatctctaaagggcaaatcataggtttgcttgggccaaatggtgctggaaaatcatcattaatgaatcttataactggcgccataaaacctaattttggagatattataatcaacaatgaaaaaattaatcaatatcctatatatattagaacaaaaaaattcaaaatttctctagtacctcaaatcggaggttttttttctgacttaaccgcagaagacaatttaaatgctataggggaaattcttattaaagatgtcaagtacaggaaaataaaaatagaagaacttatttcaaaatttgagcttgatgcagtaagaaaagttgaagctaaatttttaagtggtggaatgaaaagaagacttgtaataagtatgtctttattaggagaacctgaaatattattaatggacgaacctcttgctgcattagacccacaaacaatacaaatgctacaaacgattatcataaggttacaatcagagtataatttaactattttaatcacagatcatcaggcaagggatcttttaactgtgtgtgataaggcagtaattttatctaattcaaaaatagttgctgagggaacacctaatcaactgatgaaaaaga

SEQ ID NO: 275037 - DNA, 677 bp, Unknown
  Bacterial polypeptide expressing nucleotide sequence isolated from the Sargasso Sea
aaagcaaagagtagcaataggaagagcactactttgtcaaccagatttattacttatggatgaaccattagcttcattagatcaggacaagaaaaatgagttaattaaatatattgtaaaaattaatgaaattttaaatattccagctgtttacgtttcacattcaatttcagagacatttacattggcaaattgtgttcattttattaaaaatggtactttgatttattctggaaatcgagacaatgcaataaatttttataataaaaatgaaaattttctttttacagattcctatattaaaggaaaagttataaaaacaaatttattagaaggattaactgaaataaaacttggagatcatagtctcacagtattttctaacacacttaatttgggtcaaaatgtaatagtaaaaattaaggcaactgatattataatatctactataattcctgataatctaagttccttaaattatttaaaaacaagaattgaagaagttgtttttgagaaaggattagcatgtttaattttatattatgaaaaaaatattattaaagctctacttacaaaaaaatcatataacaaattaaatattaaaaaaggcatgtattgttacgctataattaaagctttaaatataaatgatgttattaatatcaatatagtttagt

SEQ ID NO: 275038 - DNA, 1102 bp, Unknown
  Bacterial polypeptide expressing nucleotide sequence isolated from the Sargasso Sea
gatgaataccgtggatgacgaaatatacgtgaagcttgagtactcaagacacgagagtcaaagcagaaattttcgactcgacgtagagcttcacttgcctgggaaaggaattaccgcggtatttggggaatctggctctggaaaaacaactctcttgcgttgtattgcgggtcttgaaaaaagtgcctttggaatcgtcaaaatgaaatcagaagtttggcaagaggagaatctgtttttaccgacaaatctaaggcatgtaggattcgtatttcaagagccaagtttgtttcctcacctgacggttcaaggcaatatgcaatttggtgtgaagcgccgtggtcaaatagttgacgataacgactttgcagaaatcgtgcgactcttggatctcggaggcctgcttagtgcttatccaagcaaattgtctggaggtgagaagcaacgagcagcgatagctagagctatattaaccaagccgaagttgctgttgatggatgaacctctcgcggctctagatataaatagaaagagagagtttttaccctatctagaggcaatacgagaaagactggaaactccgattatctatgtaacgcattcaatggaagaggttgcccgactttcggattctttagttattatgcgagagggtaaagcagtctcgataggcacccttagcgaggtactaggggatgttaattacccaagtttttttggggatgaagcgggtgttgtaattgaaggtgccgtgatagagcgtgatagcggctggcatctaatcagagccaaattttctggtggtgaattgtggcttaaggatactggagaggagctgggtaaaaaaataagaattcgaattttagcgcgggacgtgagtcttgcgctcgaagactaccccgagacgagcatcatcaatcgtataaaaactcgggtagcgcatgtgcagtcagactctgacgctgcaatgttgatagtgactcttctgtgtggagacacaaaaattatttcgagaatttcaaaacgatctgcggactctctgaatatagaagttgggaaagaggtttggtcgcagataaaaggagtggctattttacgctga

SEQ ID NO: 275039 - DNA, 601 bp, Unknown
  Bacterial polypeptide expressing nucleotide sequence isolated from the Sargasso Sea
atggataataattttcttgtaattgaaaatatttctaaatcatttggagataacaaagttttagaaaatattaatttaaatatttcaaaatctgaattttttggtctcttaggatcatcgggctcaggcaaaactaccttactaagaatactaggtggatttgagaagccagatacaggacgtgtaatactcgacggaacggacataacaaaccttgagccttttgaaagaccattaaattatatgtttcaatcgtatgctctatttcctcacttaaacgtatttaataatttagcttttggaataaaagaaaattttacccaaaaagaaattgaaataaacgtaagaaatattgccgaacttttatctattgaacatttattaaatagaagaattaagcaattatcagggggagagcagcaacgagttgcccttggaaggtgcttaataaaaaaacctaagttattattattagatgagcctcttgcagcactagataaaaaactaagatcaaaaacgcaattagagttaacaacactccaaaagaaactaaaaattacatttgtttttgtcacccatgattcaggaagaagcaatgtct

SEQ ID NO: 275040 - DNA, 686 bp, Unknown
  Bacterial polypeptide expressing nucleotide sequence isolated from the Sargasso Sea
gatggacaataattttcttgtaattgaaaatatttctaaatcctttggcgataacaaagttttagaaaatattaatttaaagatttcaaaatctgaattttttggtctcttaggatcttcgggttcaggcaaaactaccttactaagaatactaggtggatttgagaagccagattcaggacgcgtaatactcgatggaacggacataactaaccttgaaccttttgatagaccattaaattatatgtttcaatcatatgctctatttcctcacttaaacgtatttaataatttagcttttggaataaaagaaaattttacccaaaaagaaattgaaataaacgtaagaaatattgccgaacttttatctattgaacatttattaaatagaagaattaagcaattatcaggaggagagcagcaacgagttgcccttggaaggtgcttaataaaaaaacctaagttattattattagatgagcctcttgcagcactagataaaaaactaagatcaaaaacgcaattagagttaacaacgctccaaaagaaactaaaaattacatttgtttttgtcacccatgatcaggaagaagcaatgtccttatctgatagaatggcaataatgaagaatggtcttattttggaatgctctagccctgaagagatttatgaaaatcctaaaagtc

SEQ ID NO: 275041 - DNA, 130 bp, Unknown
  Bacterial polypeptide expressing nucleotide sequence isolated from the Sargasso Sea
aatggttcatccatcaataacattggccgcgccttactcacctcgccgcaaatgttattgatggatgaaccattagcctccctcgatttacctcgaaaacgcgaattgctgccttatctacaaaccctag

SEQ ID NO: 275042 - DNA, 598 bp, Unknown
  Bacterial polypeptide expressing nucleotide sequence isolated from the Sargasso Sea
atggataaaaattttctagtaattgaaaatatttctaaatcttttggtaaaaataaagttttagaaaatattaatttaaatatttcaaaatctgaattttttggactattaggatcgtctggatctggcaaaacaactttattgagaattttaggtggttttgaaaaaccagataccggaagaatttttcttgaaggagttgatataacaaatcttgaaccttttgatagaccattaaattatatgttccaatcttatgcattattcccacacttgaatgtatttaataatcttgcatttggaataagagaaaaatttaataaaaaagaaatcgaaataaaggtaaaagatatttctgaattattatctattgataatctgttaaatagaaaaattaaacaattatcaggcggtgagcagcaaagagttgcacttggaagatgtcttataaaaaaacctaaattactattattagatgagcctctagcagcattagataaaaaattaagatcaaaaactcaattagaattaactagtttgcaaaaaaaattaaaaatgacttttgtttttgttactcacgatcaggaggaagcaatgt

SEQ ID NO: 275043 - DNA, 811 bp, Unknown
  Bacterial polypeptide expressing nucleotide sequence isolated from the Sargasso Sea
aaatcgggtagtttggaaatagcaggggagatttggcaggataagaataagttcgttcccacgaacgaacgtgcgattggtatggtatttcaggaatctaggttgtttccgcatttaaaggtccgtgaaaatctgttgtatggatataaacgcactccaacagattcaagaaacttacatctagaggaagtggtgcgcgtgctagctttggaaaatcttttagagcgcggtatagaaaaattgtcgggcggagaaaaacagcgtgtcgcactcggtcgagctttacttacaagcccaaagttgcttttgatggatgaacctctcgcagcgttagatgcccaaataaaagtagagatcatttcatttattcgaaaaatagaacaagaactttctattcccatagtttatgttacccattctatgagtgaggttttgcaacttgtcgatacaatggtgattttaaaagagggaaatgttgtaaaatgcgggcctgttgaaaaagttttttctgacatccaattgcgcgatgctattggtgacgagcattccggcgcaatacttgatacaaatgtcctagatcatgataaggaatttggtatcactcgactcgattttatgggacaggaattaagcgtgcctcttcaaaatattcctctcggagaaggacttcgagtgcatattcattcaaaagatgtgagcttagcaacacacccccctgaagggttgaccagcgtgctcaatatcttaaaaactaaaaataaaaaaattggaaaccatattggttattcggtagatatagagctggatgccg

SEQ ID NO: 275044 - DNA, 658 bp, Unknown
  Bacterial polypeptide expressing nucleotide sequence isolated from the Sargasso Sea
atggacataacaaaccttgaaccttttgatagaccattaaactatatgtttcaatcgtatgctctatttcctcacttaaacgtatttaataatttagcttttggaataaaagaaaattttacccaaaaagaaattgaaataaatgtaagaaatattgctgaacttttatctattgaacatttattaaatagaagaattaagcaactatcaggcggagagcagcaaagagttgcccttggaaggtgcttaataaaaaaacctaagttattattattagatgagcctcttgcagcactagataaaaaactaagatcaaaaacacaattagagttaacaacactccaaaagaaattaaaaattacatttgtttttgtcacccatgatcaggaagaggcaatgtccttatctgatagaatggcaataatgaagaatggtcttattttggaaagttctagccctgaagagatttatgaaaatcctaaaagtctttatactgccaattttataggaattgcaaatataattgagatttacaaaaaagatgaaaatttttattctgatgatttaggtataaattttaaattaaacaaagaattaaaaaatacaaaaacaaatattttactaagaccagagaaaataaaaatacaatcaatcaata

SEQ ID NO: 275045 - DNA, 178 bp, Unknown
  Bacterial polypeptide expressing nucleotide sequence isolated from the Sargasso Sea
cgcgccttactcacctcgccgcaaatgttattgatggatgaaccattagcctccctcgatttacctcgaaaacgcgaattggtgccttatctacaaaccctagcgcaggaattgaagctaccgatcgtctatgtcagccacagcttggacgaaatcctgcaactcgccgaccatatgc

SEQ ID NO: 275046 - DNA, 644 bp, Unknown
  Bacterial polypeptide expressing nucleotide sequence isolated from the Sargasso Sea
tttgaatatttcaactaaccttcatcgccctggggggttcaatctctcggtcgacctgagcatagcgactgatcgcgtgaccgcgctatatggcatatcaggctctggaaagacgacccttttgcgtttaattactggcctggaccgcgaagccggcgtggaggttaacttcaacggtaaagcctggcaaaccgctgacttcttcttgccagttcacaagagaagaataggcttcgtcttccagaatctaaacctattcccccatctgtccgcagccgggaatcttaatttcgctacccgcagaaacaacagtaacgagggcttatctcaaaatgaagttatcgatatactggacatcggaaatctcttatccaagcatcctggtaacctctccggcggggaacaacagcgggtggctatcgcaagagctctactatgcaatccagagctactggttatggacgaacccctaggttcaatagatacactggccaaaacccgaatactgccttatttgcagcgcctgcatagtaaactgaaaattcccgttgtctacgtaagtcactcgctagacgaggtgctggagttatctgacgaagtcatcctgctcgaatctggccgagctacaacaaaacaatctgttt

SEQ ID NO: 275047 - DNA, 814 bp, Unknown
  Bacterial polypeptide expressing nucleotide sequence isolated from the Sargasso Sea
tacgcattatttccacatttaaatgtatttgataatcttgcatttggaataagagaaaaatttaataaaaatgaaatcaattcagaggttaaagatatttctgagctattatcaattgataatcttttaaatagaagaattaaacaattatcaggtggggagcagcaaagagttgcgcttggaagatgtcttataaaaaaacctaaattgctattattagatgagcctctagcagcactagacaaaaaattaagatcaaaaactcaattagaattaactagtttgcaaaaacaattaaaagttacatttgtctttgttactcatgaccaagaggaagcaatgtctttatcagatagaatggcgattatgagagaaggaaaaattttagaatgctctagccctgaagaagtctatgagaacccaaaatctttttatactgctaattttataggaattgcaaatacaatagaagtttataaaaaaagtaatcattatttttccaatgaattaaatataaatttagaattagagcatgaagcaaagaaacaaaaaactaatattctgctcagaccagagaaaataaaaattaaatcagcaaaaggtgttaaaattaatttagttaattcttttgaaggagtagttttagaaaaatcatatttagggagttttacacgttacgaggttaaatcaggcaataaaataatttcagttctagatcaaaattacaattctaattctaattacaattttccaattggagaaagagttttgtgtagttgggaaaaagaatcattaaaaattttggaggattaat

SEQ ID NO: 275048 - DNA, 529 bp, Unknown
  Bacterial polypeptide expressing nucleotide sequence isolated from the Sargasso Sea
gatgttcggtttcggcaaagcctcaccacctgccgttcacgacgacgggcgtactcgcgcgcgcttcgtggtcaagcatccgggcttcgccctggatgtcgacctcgacctgcccgggcgcggcgtcagtgcgctgttcggccactccggttcgggcaagaccagttgcctgcgctgtttcgccgggctcgatcgcccgcagcagggctacctgcaggtcgccggcgagctctggcaggacagtgagcgcggtttctttctgccggcgcacaaacgtcccatcggctacgtgttccaggatgccaacctgttcccgcacctgagcgtgcgcaagaacctggagtatggccaacggcgcatccccgccgcgcagcgcaaggtggcgctggatcaggcgctgctgctgctgggcatcggtcatttgctcgaacgcatgccctcggcgctgtccggcggcgaacgccagcgcgtcggcatcgcccgtgcgctggtgaccagcccgcgcctgctgctgatggacgagccactg

SEQ ID NO: 275049 - DNA, 805 bp, Unknown
  Bacterial polypeptide expressing nucleotide sequence isolated from the Sargasso Sea
catgagtatagatgcccatattcagattgaacgcggcacgtttcagttgaacgccagactggaactgccggcacgcggagtgacggcggtgttcggcccttccggcagcggtaagacgactctgctacgtgccttagctggactagagccctgccccgatagtcgagtaatcgtcaacggaacaccttggcagaccgccaccgaatgcctcgccacacatgaaaggccagtttgcttggtcttccaggaaccgagtctcttcgagcacctgacggtacaggcgaatctagatttcggtcgccaacgtatctctaaatcagcgcaaaccattcctctagatcactcgattgaactattggagatcagcccgttattgaaccggtatccgcatcagctctccgtcggcgaacaacaacgagttgcaatcgcgcgtgcactggcagtgtgcccagaatggctgctacttgatgaacctctggccgctatggatgccgcccgcaagcgggagatacttccttacctcgaaaacctatgccgcgaaaccgatctaccaatcctctacgtgagccactcccgtgaggaagtcgcccggctggcagatcacctcgtagtgcttaatgaaggcaaggttatcgccaacggcccagcgatcgaaattctctccaacctcgctctacctttggcccgcgagccagacagcaccgccatcatcgaaaccaccgtggccggccaagacaacacctttggcctaacactgctggattttgccggcggccagtttccagtgacgcaccatgatctaccc

SEQ ID NO: 275050 - DNA, 718 bp, Unknown
  Bacterial polypeptide expressing nucleotide sequence isolated from the Sargasso Sea
atggataataattttcttgtaattgaaaatatttctaaatcctttggagataacaaagttttagaaaatattaatttaaatatttcaaaatctgaattttttggcctcttaggatcttcgggttcaggcaaaactaccttactaagaatactaggtggatttgagaagccagatacaggacgtgtaatgctcgacggaacggacataacaaatcttgaaccttttgaaagaccattaaattatatgtttcaatcgtatgctctatttcctcacttaaacgtatttaataatttagcttttggaataaaagaaaattttacccaaaaagaaattgaaataaacgtaagaaatattgccgaacttctatctattgaacatttattaaatagaagaattaagcaattatcagggggagagcaacaacgagttgcccttggaaggtgcttaataaaaaaacctaagttattattattagatgagcctcttgcagcactagataaaaaactaagatcaaaaacacaattagagttaacaacactccaaaagaaactaaaaattacatttgttttcgtcacccatgatcaggaagaagcaatgtccttatctgatagaatggcaataatgaagaatggtcttattttggaatgttctagccctgaagagatttatgaaaatcgtaaaagtctttatactgccaattttataggaattgcaaata

SEQ ID NO: 275051 - DNA, 790 bp, Unknown
  Bacterial polypeptide expressing nucleotide sequence isolated from the Sargasso Sea
gatgttcggtttcggcaaggcctcgccacccgctgtccagggcgacgaacgcattcgcgcgcgctttctggtcaagcatccaggcttcaccctggatatcgacctagacctgcccggacgcggcgtcagtgcgctgttcggccattccggctcgggcaagaccagttgcctgcgctgcttcgccgggctggatcgcccgcagcagggctacctgcaggtggctggagagctctggcaagacagtgagcgcggtttctttctgccggcgcacaaacgcgccatcggctacgtgttccaggacgccaacctgttcccgcacctgagcgtgcgcaagaaccttgagtacggccagcggcgcatccccgcctcgcaacgcagggtggcgctggatcaggcgctacagctgctgggcatcgggcacctgctcgagcgcatgccctcggcgctgtccggcggcgaacgccagcgcgtcggcatagcccgtgcgctggtcaccagcccgcgcctgctgctgatggacgagccgctggcttcgctggacctcaagcgcaagcaggaagtgctgccgtatctgcagcgcctgcacgaggagctggacatcccggtgctctacgtcagccacgccccggacgaggtggcgcgcctggccgatcatctggtgctgctcgacgaaggccaggtgcgcgccagcggcccgctcaaggaaattctgctgcgcgccgacctgcccttcgccagcgacgaggatgccgaggcggtgatcgacggccaggtctgcgctcatgatgcc

SEQ ID NO: 275052 - DNA, 1087 bp, Unknown
  Bacterial polypeptide expressing nucleotide sequence isolated from the Sargasso Sea
atgttaaacatcaatattgaaaaacaactcggccacctgcaacttaaggtgaacacccagttaccgttacagggcgtcaccgccgtctttggccgctcgggtgcgggcaaaacctccttagtgaatttactcggcggattaaccacgccagataacggcgaaattagccttggcgatacgctgttgtttaaacataaaaccgttaatctaccccctgaaaaacgccagattggctatgtctttcaagaagcgaggttatttccccactacagtgtgaaggggaatctcacctatggaatgcgccataaagcacctgaattgttcgacaaagtagtctcactactgggcatagaaaaactcttaagccgctatcccagcacactctctggcggtgaaaaacaacgggtcgccattggccgcgccctgctcacctcgccgcagatgttattgatggatgaacccttagcctcactcgatttacctcgaaaacgcgaattgctgccttacctacaaaccctagcgcaggaattgaagctgccgattgtctatgtgagccacagcttggatgaaatcctgcaactcgccgaccatatgctggtgttgcatcaaggaaaaatgatcgcccaaggaccactaacacaggtatggaatagtgaacaaatgcgcccctgggtgccattgcaggaattaagttcactgctgagcgccagaatcgctgacagacatcctgattatccaatgacaagactgttgatggatgatggcaatcagctctgggtcagcggccaactgccacccacccataaacagttaaaggtacgcattcaagcgaaccatgtttcggtttgcactgaggaacctaaaggctcgagtattcgtaacttactcaaaggaaaaataaaagagctctaccccagcgataatggcgagcaaattcagcttaaaattgccctaggtaaagacgaactgtgggccaacatcaccccatgggcttgtgacgagttacaactcgctccaggaaagactatctatgcccaaattaaaggcgtgacaatgacgcagatggatattgccgaatccagctgaa

SEQ ID NO: 275053 - DNA, 1060 bp, Unknown
  Bacterial polypeptide expressing nucleotide sequence isolated from the Sargasso Sea
catgtcaaattctttcttagaaataatagatgtaactaaaagatttggtgatatcttggcattagatagagttaatctcaaaatagaaaaatctgaaatatttagtctgcttggttcatcaggttgtggaaaatccacccttttaagaattattgctggttttgaaaaacctgatcagggaaaaatattacttgaaggaaatgatattactaaccttcctccatacataagaccactaaatataatgtttcaaaattatgctttattccctcatcttaatgtgactaataacatcaaatttggactaaaagaggaaagtttttcaaagcaagaaatcaataatcgtgtcaatgaaattttgaatttattagagttaaatggcctagaggaaagaaaagtgaatgaaatatctggtggccaacaacaacgtgttgcattagctaggtgtttagttaaaaaaccaaaattacttttattagatgaaccacttgctgcgctagacaaacaactaagaatacaaacgcaattcgagttagttaacttgcagaataaattaggtattacatttattattgttacacatgaccaggaggaggcaatttcattatctgacagaatggctattatgcaaaatggcgaaattctccaagttggaaaccctgttgaaatttatgaaaaacctaagaatacatatattgcaaattttataggtacagcaaatatatttcatattctaaacaaagataatcaaataataattgaagagttaaattacgaaattaaaaatattaataataataaaaattttaacaaatgtttaataaggcctgaaaaaattaatattaaaaaaattgaaaatcaatctggtaactcaaatgttggtattgtaaaagaggtagcttatctgggtagttacactaaatacttgattgaagtaaatggaattcaattttactcatttatgcaaaatagtttagtttcagataatctacaaattaagtgggatgataaagttgaatttaaattcaatgattcatcaatatttttgtttaatgattag

SEQ ID NO: 275054 - DNA, 1087 bp, Unknown
  Bacterial polypeptide expressing nucleotide sequence isolated from the Sargasso Sea
tatgttaaacatcaatattgaaaaacagctcggccaactgcaacttaaggtgaacacccagttaccgttacagggcgtcaccgccgtattcggccgctcgggagcgggcaaaacctccttagtgaatttactcggcggattaaccacgccggataacggcgaaattagccttggcgatacgctgttgtttaaacataaaaccgtaaatctgccccctgaaaaacgccagattggctatgtttttcaagaagcgaggttatttccccactacagtgtgaagggcaatctcacctatgggatgcgccataaagcacctgaattgttcgacaaagtggtctcattactgggcatagaaaaactcttaagccgctatccaagtacactctctggcggtgaaaaacaacgggtcgccattggccgcgccttactcacctcgccgcaaatgttattgatggatgaaccattagcctccctcgatttacctcgaaaacgcgaattgctgccttatctacaaaccctagcgcaggaattgaagctaccgatcgtctatgtcagccacagcttggacgaaatcctgcaactcgccgaccatatgctggtgttgcatcaaggaaaaatgatcgcccaaggaccgctaacacaggtatggaatagtgaacaaatgcgcccctgggtgccattgcaggaattaagttcactgctgagcgccagaatcgccgacagacatcccgattatccaatgactagactgttgatggatgatggcaatcaactctgggtcagcggccaactgccgcctacccataaacaactaaaggtgcgcattcaagcgaaccatgtttcggtttgcactgaggaacctaaaggctcgagtattcgtaacttactcaaaggaaaaataaaagagctctaccccagcgataatggcgagcaaattcagcttaaaattgccctaggtaaagacgaactgtgggctaacatcaccccatgggcccgagatgagttacaactaacacccggcaaaaatatttatgcccaaatcaaaggcgtaactatgacgcagatggatattgccgaatcccactga

SEQ ID NO: 275055 - DNA, 664 bp, Unknown
  Bacterial polypeptide expressing nucleotide sequence isolated from the Sargasso Sea
atggataaaaattttttagtaattgaaaatatttctaaatcttttggagaatacaaagttttagaaaatattaatttaaatatttcaaagtctgaattttttggtcttttagggtcctctggttcaggaaaaactaccttactaagaatattaggtggttttgagaaaccagatacaggacgagtaatattagatggagttgatataacaaatctagaaccttttgataggccactgaattatatgtttcaatcttacgctttattccctcatttaaatgtatttaataatttagcttttggaataaaagaaaattacaaacaagatgaaattaaaataaaagtaagagatattgctgagcttttatctattgaaaatttattaagtagaagaattaagcaattatcaggtggtgaacaacagagagttgctctaggtagatgtttaataaaaaaacctaaattattattattagatgaacctctagctgcattagataaaaaactaagatcaaaaacacaattagaattaactacactacaaaagaaattacaaattacatttgtttttgttacacatgatcaagaagaagcaatgtctttatctgacagaatggcaattatgaaaaatggccatatattggaatgttcaagtccagcagaaa

SEQ ID NO: 275056 - DNA, 1087 bp, Unknown
  Bacterial polypeptide expressing nucleotide sequence isolated from the Sargasso Sea
tatgttaaacatcaatattgaaaaacaactcggccaactacaactcaaggtgtacacccatttaccattacagggcgtcacagccgtattcggccgctcaggagcgggcaaaacctccttagtgaatttactcggcggattaacctcaccggataaaggcgagattagccttggcgatacactattgttcaagcataaaaccgttaatctgccccctgaaaaacgccgaattggctatgtttttcaagaagcgaggttatttccccattacagcgtgaaaggcaatctcacctatgggatgcgtcataaagcacctgaattgtttgataaagttgtctcactactgggtatagaaaaactcttaagccgctatccctgcacactctctggcggtgaaaaacaacgggtcgccattggccgagccctactcacctcgccgcaaatgctattgatggatgagcccttagcttccctcgatttaccccgaaaacgcgaattgctgccttacctacaaaccctagcgcaggaattgaagctaccaatcgtctatgtgagccacagcttggatgaaatcctacaacttgccgaccatatgttggtgttacatcaaggaaaaatgatcgcccaaggaccgctaacacaggtatggaatagtgaacaaatgcgcccctgggtaccattgcaggaattaagttcgctgctgagcgccagaatcgccgacagacatcctgattatccaatgaccagactgttgatggatgacggcaatcagctctgggtcagcggccaattgccccccacccataaacagttaaaggtacgcattcaagcgaaccatgtttcggtttgcactgaagaacctaaaggctcgagtattcgtaacttactaagaggaaacataaaagagctctaccccagcgataatggcgagcaaattcagctaaaaattgcactaggcaaagaagaactgtgggccaacatcaccccatgggcttgtgacgagttacaactcgctccaggaaaggctatctatgcccaaatcaaaggcgtgactatgacacaaatggatattgccgagtcccactaa

SEQ ID NO: 275057 - DNA, 1045 bp, Unknown
  Bacterial polypeptide expressing nucleotide sequence isolated from the Sargasso Sea
catgagtctcgagttcgaacacgtcagtttccagtatcccggcgcgcggcacggcgtcgacgacgtcacgctgtccgccgcgcaaggcgagctgctcgcggtgatggggcgcagcggctccggcaagtccacgctgctgcggctcgcggccggcctgctcgacggcggcagcggccgcatcgcgatcggcggcgccgacatggccggcgtgccggtgtggcggcgcgaggtcagcatggtgttccagcattacgcgctgttcccgaacctgtcggtggccgacaacgtcgcgtacgggctgaaaatgcgcggcgtcgcggccgaggttcggcggcgtcgcgcgcgtgacatgctcgagcgggtcggcctcgcggcgcatgcagaacgcggcatcgcgatgctgtccggcgggcagcagcagcgtgtcgcgctcgcgcgtgcgctcgtgatcgaaccgaagctgctgctgctcgacgagccgctggcggcgctcgatgccggcatccgccatcagctgcgcgacgagattcgcgcgctgcagcgtgcgtgcggcgcgacgacgctgctcgtcacgcacgaccaggacgaggcgctgagcatggccgaccgcgtcgcgatcgtcgacggcgggcgggtgctgcaggtgggcacgccgcgcgacctgtacgagcggcccgtgtccgcgcaggtcgcgcgcttcgtcgggcattcgacgctgctgcgcggccgcgtgaccgcgcacgatacggtcgacgtgcggttcgcgacgctgcgcgtcgagaccggcgggcaccggccgggcgccgaggtcgaggtgctggtgcggccggagcacgtggaggccgatccgccggcgcacggcgtgaaccgcatcgacggcgcgccgggcgacgtgcgctacttcggcgcgacgcagcgctacgacttcattcccaccggctcggccgacccgttgctgtgcgaaggccgcgtgccggcctcccggcggatcgcgatcgacccgcgccatctgctcgtgctgccggccgcgccggaggcgcaatga

SEQ ID NO: 275058 - DNA, 1060 bp, Unknown
  Bacterial polypeptide expressing nucleotide sequence isolated from the Sargasso Sea
atgtctgaaccttttttacaaatcatagatgtatcaaaaaggtttgataatgttgttgctttagacaaagttaatctaaaaatagcaaaatctgaaatattcagtctcctaggatcttcaggatgcggtaagtcaacacttttgagaattatagcaggtttcgagaagcctgatgaaggaagaattctactcgagggaaaggatatcacgaaacttccaccatatgtaagacctttaaatattatgttccaaaattatgcactatttccgcatttaaatgtcactaataatatccagtttggactaaaagaagaaaaaatttctaaagaagaaatcaatcatcgtgttaatgaaattttaaatttactagagctgaatggtttagagaaaagaaaaatcaatgagatatctggtggtcaacaacaacgtgtagcattagcaagatgtttagtcaaaaaaccaaaattacttttattggatgaaccacttgcagcattagataaacagctaagagtacaaacacaattcgagttagttaatctacaatataagttaggcatcacttttattattgttacccatgatcaagaggaagcaatgtcattatctgacagaatggcaattatgaaaaatggagaaatcctccaagtcggtaatcctgttgagatatatgaaaaaccgaaggacaaatatatagcgaattttataggcacagccaatatctttaatgttcttaataaaaataatcaaatcatcattaaagaattaaattatgaagttaaaaatattaacaataaagaaaattatgttaaatgtttaattaggcctgaaaaaatttctgttaaaaaattagaaaatcaatctgataatttaaatattggtgtagttaaagaagtagcttatttagggagctatactaagtatttaattgatgttaatggatttgaattttattcttttatgcaaaatagtttagtttcagataaccttcaaataagatgggatgataaagttcagataagttttaacgaaacatcaatatatttctttaatgattaaa

SEQ ID NO: 275059 - DNA, 213 bp, Unknown
  Bacterial polypeptide expressing nucleotide sequence isolated from the Sargasso Sea
tatggtaaatattacggggctagaaaagagatttggtccagaggtcgcagtccatggcgtgaatttgtcagtagcacagggtgagtttgtaactttactgggtccgtcgggttgcggaaaaacgactactttgaggtgtatagctgggcttgagagactagatgccggagaaataagtattggtgaaaaaatagttgtatctgcggacaaaaa

SEQ ID NO: 275060 - DNA, 180 bp, Unknown
  Bacterial polypeptide expressing nucleotide sequence isolated from the Sargasso Sea
tatggtaaatattacggggctggaaaagaggtttggtccagaggtcgcagtccaaggggtgaatttgtcagtagaaaagggtgagtttgtaactttactggggccctcgggttgcggaaaaacgactactctgagatgtattgcagggcttgagagactagatgctggagaaataagtat

SEQ ID NO: 275061 - DNA, 658 bp, Unknown
  Bacterial polypeptide expressing nucleotide sequence isolated from the Sargasso Sea
ggccagcgtcagagagtagcaatgggacgagctattgtcagagacccacaagtttttctttttgatgaacctttgtcaaatcttgacgcaaaccttcgagtgcaaatgagagcagaaattcgtgagctgcagcaaagattaaattccactaccatttacgtaacccatgatcagatagaagcaatgacgatggccgacaaaattgttgtcatgcagaatggatacatcgaacaaattggtagtccgctggaggtatacgaccatcctgccaatacttttgttggcggttttataggatcaccagcgatgaatatgattgaaggtgtggttgtaaaaactgacacgggtctccaccttgacattaacaagtctttgctacctattccaaacctagtgaacctaaaaattgatcaaaaaataattgctggtgtaaggcctgaaaatttgatacctgcggcgacaggtgttcctgcaaagatcgcagttattgagccaacaggatcagaaactcaccttttgcttcgtggtaacaatcaagacttgacctgcgttctacgcgaacgccgagatttcagaccgggtcaagaaattaatctgactgctgacccagatgaaatacatattttcgatcaaaagtcgaaaacacggataaattaaa

SEQ ID NO: 275062 - DNA, 673 bp, Unknown
  Bacterial polypeptide expressing nucleotide sequence isolated from the Sargasso Sea
aatgtcagaagtagccaaacttatccaagtgagtaaaagttttcgcgacggcgagcagcgccataccgtactgcaagccgtcgatttaaccttgcatcgtggcgaaaccatcgcactcacgggccccagcggcagcggcaaaagcacactgttaaatttgatcgcaggctttgaaacgccagacagcggccagatagtgttgaatcatcaatccacccaagattggcaagacaaacactggagcgagttccggcgcaaccatttaggtgtggtgtttcaacaatttaatctgctgacgccactcaatgtgagaaacaacataggtttttcactcaatctcaacggcgccagttggaatccttggtgcgattatctcgtcgacaaattggggctggcttcgctgctcaatcggcaggtagaggcactttcaggcgggcaacagcaaagggtcgctatcgccagagccttagcccacaatccgagtttactgctggccgacgaacccacgggcaatctcgatgatgaatcgggtaaacaggtgatgtcactgctgtgcgaactggccaaagaaagccaaaccagcatcttaatggttacccacagtgaagaatgcgccgcctttatgcacaaacgctggcatctttcccacgcctctgtgtctatctccggttaa

SEQ ID NO: 275063 - DNA, 654 bp, Unknown
  Bacterial polypeptide expressing nucleotide sequence isolated from the Sargasso Sea
catgttcacattaagacggttcaatacaaaacggcgaattatgctgaccataaaagacttaaagaaatctttttcacagacaggggctccgctcatcaacaaccttaaccttaccgtaaagactggtgaatcggtgagtattcagggcgcttcaggctgcggtaaatctaccttgctgtcgctcattgctgggtttgagacgcccgacggaggcgatatttcggtaaatggattgtcgattgctggcaatagcaaactcgataatacatttaaagcgaaggatattgatagttttcgcaaacagcatttaggtattgtgtttcaaagcttcaatctattcgactgctttaatgcgtgggacaacattgcctttactgcaaggctaaaaggtaatgtagataacgactaccaattagcgttaatggagcagctagggatattacccctagcgcaaaagccgctaagtcagttatctggcggtgaacagcagcgctgtgccattgctagagcacttgtacatcgcccctcgcttatcttggccgacgaacccaccggcaatttagacgaaaccactagtgaaaccgtgtctgacttactctttaaaacgtgtaaagaggccaatacttctcttgttgtggtaactcatagccaaga

SEQ ID NO: 275064 - DNA, 480 bp, Unknown
  Bacterial polypeptide expressing nucleotide sequence isolated from the Sargasso Sea
aatgtcagaagtagccaaacttatccaagtgagtaaaagttttcgcgacggcgagcagcgccataccgtactgcaagccgtcgatttaaccttgcatcgtggcgaaaccatcgcactcacgggccccagcggcagcggcaaaagcacactgttaaatttgatcgcaggctttgaaacgccagacagcggccagatagtgttgaatcatcaatccacccaagattggcaagacaaacactggagcgagttccggcgcaaccatttaggtgtggtgtttcaacaatttaatctgctgacgccactcaatgtgagaaacaacataggtttttcactcaatctcaacggcgccagttggaatccttggtgcgattatctcgtcgacaaattggggctggcttcgctgctcaatcggcaggtagaggcactttcaggcgggcaacagcaaagggtcgctatcgccagagccttagcccacaatcc

SEQ ID NO: 275065 - DNA, 673 bp, Unknown
  Bacterial polypeptide expressing nucleotide sequence isolated from the Sargasso Sea
atgtcagaagtagccaaacttatccaagtgagtaaaagttttcgcgacggcgagcagcgccataccgtactgcaagccgtcgatttaaccttgcatcgcggcgaaaccatcgcactcacgggccccagcggcagcggtaaaagcacactgctaaatttgatcgcaggctttgaaacgccagacagcggccagatagtgttgaatcatcaatccacccaagattggcaagacaaacactggagcgagttcaggcgcaaccatttgggcgtggtgtttcaacaatttaatctgctgacgccgctcaatgtgagaaacaacataggtttttcactcaatctcaacggcgccagttggaatccttggtgcgattatctcgtcgacaaattggggctggcttcgttgctcaatcggcaggtcgaggcactttcaggcgggcaacagcaaagggtcgctatcgccagagccttagcccacaacccgagtttactgctggccgacgaacccacgggcaacctcgatgatgaatcgggaaaacaggtgatgtcgctgctgtgcgaactggccaaagaaagccaaaccagcatactcatggtcacccacagtgaagaatgcgccgcttttatgcacaaacgctggcatctttcccacgccgctgtgtctatctccggttaac

SEQ ID NO: 275066 - DNA, 682 bp, Unknown
  Bacterial polypeptide expressing nucleotide sequence isolated from the Sargasso Sea
tgccgggtttagtgaacgtcttcctagcgagttatccggaggacagcaacagcgagtagcggtcgcaagggcgttagttctggaaccggaagttttgttgtttgacgaacccctctcaaatttggatgccaagttacgaagacgggtacgccaggaaattcgtgaacttcagcaaaaactggagttgaccacgatttatgtgacccatgaccaagaggaagcccttgccgtttctgataagatcatcgtcatgaatgaggcggtcatcgcccagcagggaactccggaagatttatatgaatccccggaaagtctttttgtcgcggatttcataggagatgcaaacatcatcattgggcgtatgacagagcatgatggggacttagcagccataaaaattggcgaattatccctgaaccttcctcacaaaggcgtaaatcccggagaaattaaattggcagtccgaccgctagccttgaacgttcatgcagaaaaacatcccggaatccccggaaaggtcctgaaaagtgtctaccttggcagtcatcaggagtacactatcgaaacggatcagggagaatggtttgtcctcgacatggagatgaatgaaatccatgaggaaaatactgaggtttctcttgattttaaatcccgtggcgttagcatcatcccgcattcctga

SEQ ID NO: 275067 - DNA, 751 bp, Unknown
  Bacterial polypeptide expressing nucleotide sequence isolated from the Sargasso Sea
tatggcagaagtaaaaatacgcaacctttttaaatcatatggtaatacagaagtaatccatggtttagatgtagatattgaagatggtgagtttgttgttctagtaggaccttctgggtgtggtaaatcaactctcttgaggatgattgctggtttagaagggatttcctcaggagacataatgattggtaaaagtatagtaaataatctaccaccttctcaaagagacatagcaatggtatttcaaaattatgctctttatcctcataaaactgtaaatgataacatggctttttctcttaaaatgaaaggtttgagtaaaaatgatatctctaatagagtaaatcaagccgcagaaatattaggtttgaccccctatctcaaaagatatccacgtgctttatctggtggccaaagacaaagggtagctatgggccgtgctattgtacgtgacccacaagtttttttatttgacgaaccactatctaatctagatgcaaaattgcgtgtacagatgcgtgcagaaattagagaattacaacagagactgaactctactacagtttatgttacccatgatcagatagaagctatgacaatggcagataaaattgtagttatgaaagatggttatatcgaacaaaccggaagtcctttggaagtttatgacaaacccgctaatactttcgtagcaagttttattggatcacctgcaatgaatatgattgaagggactgtggaaataaaaaat

SEQ ID NO: 275068 - DNA, 778 bp, Unknown
  Bacterial polypeptide expressing nucleotide sequence isolated from the Sargasso Sea
gatcgcaaacgcatcgtcgaagagcttctggctctgtcaaagctggacaagctgggctcacgctatccgcatgagctgtccggcggtcaacagcagcgcgttgcgctggctcgggccatggctcccaacccgcgtctgctgttgctggatgaacccttctccaatctcgatggtgaactgcgccgccgactctcggctgaagtgcgcgacattctcaagtcccgcggtatcagtgccatgctggtgacccatgatcaggccgaggcctttgccgtgtgcgatcacgtcggcgtgctgaaagacggccaactgcagcaatgggacaccccgtacaacctctaccacgaaccggcgacgccctttgttgccagcttcatcggtcagggttacttcattcgtgggcaactgctctccagcgacacggtacagaccgagctgggagtcattcacggcaaccgtgcttaccagctgccggtaggcggtgcggtcgatgtcctgttacggccggatgacctggtgggagatgctcacagcgagctgcgggcgcgaattattgatcgcaccttccagggcgcaaccatcctctaccgtatgcaactgcagaccggcacccagctggaagccctgtttcccagccacgccgaccatcagcccggcgacgaggtcgggcttcgggtcgcggcggagcacctggtcgtgtttccagcccagggcagcgtcaatctgcacgcccagctgccactggagcaggtactggataccggtcgctctgcctgag

SEQ ID NO: 275069 - DNA, 876 bp, Unknown
  Bacterial polypeptide expressing nucleotide sequence isolated from the Sargasso Sea
tgaacctggacagttaatcacgcttctcggaccttcagggtgtggaaaaaccacgactttaagactgatcgcgggattagaaatggtttcaaaagggaagattttcattggcggtaaagatgttactcatgtttccgcatcagaccgggatgtgagcatggtattccagtcatacgctctttttccccacatgaatgtctttcagaacgtttcctatggcctcaccatcagccggcttcccaaggaagaagtcaaagaaaaagccgaagcggccctagaacttgtgggattggcagattatgggaaacgtctaccgagtgaactttcaggagggcagcaacagcgggttgcagtcgcaagggcgttggttctggaaccggaagttttgttgtttgatgaacccctctcaaacctggatgccaagttacgaagacgggtacgccaggaaattcgtgaacttcagcagaaactggaattgacgaccgtttatgtgacccatgaccaggaggaagcccttgcggtgtctgatcagatcatcgtcatgaatgaggcggtcatcgcccagcagggaactccggaagatttatatgaatccccggaaagcctttttgtcgcggatttcataggagatgcaaacatcatcattgggcgtatgtcagagcatgagggagatcttgcagccataaaaattggcgaattatccctgaaccttccccacaaaggcgtacatcccggagaaattaaattagccgtccgaccacaagccgtgaacgttcatgcagaaaaacatcccggaatccccgggaaggtcctgaaaagtgtctaccttggcagccaccaggagtacaccatcgaaacggatcagggagaatggtt

SEQ ID NO: 275070 - DNA, 939 bp, Unknown
  Bacterial polypeptide expressing nucleotide sequence isolated from the Sargasso Sea
cgtgaacttgtcagtagcaaagggtgagtttgtaactttgctaggtccctcgggttgcggaaaaacgactactctgaggtgtatagcagggcttgagagactagatgctggagaaataagtattggtgaaaaaatagttgtgtctgcggacaagaatatttttctttacccggagaaacgggaaataggcatggtatttcagagttatgcagtttggcctcatatgacggttttcgataatgttgcttatggtttgagagttagggggttcggctctgcagaattgaaaaagaagaccaattacgctttggaattagttggcttagatcatttggctagtcgctttgctacaaaattatccgggggtcagaggcagagagtagccttagctagggcaatctgttatgaaccaaatgtcatactttttgacgaaccactctctaatctggatgcaaaacttcgagaacagatgcgggatgagatagtaaggttgcaaaaagaagtgggaattacttcaatttttgtaacccacgaccaatccgaagcactggtaatgagcgatagaatagttgttatggataaggcggtaatccaacaaattggcgaccccaaaacaatatatgcaaacccagccaattcctttgttgccaattttataggagttgccaaccttttcgaaggtaatttgtcagataggaaaggaaagaatgctacagcaaaaatagattttggtggagctcttggcgtaaaagaattgcttgctaatgacgttaataatattccaaacaactcaaaaattcatctttgtatacgaccggaggatatggagttgagtaccaaaaaatttacaggagaattagcaaagaattccattgctggtaaagtaattgagacggtttatttgggtaattttctcgaatgtcgagtgaaaattggaaa

SEQ ID NO: 275071 - DNA, 622 bp, Unknown
  Bacterial polypeptide expressing nucleotide sequence isolated from the Sargasso Sea
atggcagaagtaaaaatacgtaacctttttaaatcctatggtaatacagaagtaatccatggcttagatgtagatattggagatggtgagtttgttgttctagtaggaccttctgggtgtggtaaatcaaccctcttgaggatgattgctggtttagaagggatttcctcaggagacataatgattggtaaaagtatagtaaataatctaccaccctctcaaagggacatagcaatggtatttcaaaattatgctctttatcctcataaaactgtaaatgataacatggctttttcactcaaaatgaagggtttgagtaaaaatgatatcgctaatagagtaaatcaagccgcagaaatattaggtttgaccccctatctcaaaagatatccacgtgctttatctggtggccaaagacagagggtagctatggggcgtgctattgtacgtgaccctcaagtttttttatttgacgaaccattgtctaatctcgatgcaaaattgcgtgtacagatgcgtgcagaaattagagaattacaacagagactgaactctactacaatttatgttacccatgatcagatagaagctatgacaatggcagacaaaattgtagtcagaa

SEQ ID NO: 275072 - DNA, 703 bp, Unknown
  Bacterial polypeptide expressing nucleotide sequence isolated from the Sargasso Sea
gggattagagttagtcggacttgccgggtttggtgaacgtcttcctttcgagttgtccggaggacaacaacagcgagtagcggtcgcaagggcgttagttctggaaccggaagttttgttgtttgatgaacccctctcaaatttggatgccaagttacgaagacgggtacgccaggaaattcgtgaacttcagcagaaactggagttgaccacgatttatgtgacccatgaccaagaggaagcccttgcggtatctgatcagatcatcgtcatgaatgaggcggtcatcgcccagcagggaacaccgaaagatttatatgaatccccggaaagtctttttgtcgcggattttataggagatgcaaacatcatcattgggcgtatgacagagcatgatggagacttagcagccataaaaattggcgaattatccctgaaccttccccacaaaggcgtaaatcccggagaaattaaattagccgtccgaccgctagccgtgaacgttcatgaagaaaaacatcccggaatcaccgggaaggtcctgaaaagtgtctaccttggcagtcaccaggagtacaccatcgaaacggatcagggagaatggtttgtcctcgacacggagatgaacgaaattcacgaggaaaatacggaggtttctcttgattttaaatcccgtggcgttagcatcatcccgcattcctga

SEQ ID NO: 275073 - DNA, 824 bp, Unknown
  Bacterial polypeptide expressing nucleotide sequence isolated from the Sargasso Sea
agatgtgagcatggtattccagtcttacgctctttttccccacatgaatgtctttcagaacgtttcctatggcctgaacataagccggcttcccaaggaagaagtcaaagaaaaagccgaagcggccctcggccttgtgggattggcagattatgggaaacgtctgccgagtgaactttcaggagggcagcaacagcgggttgcggtcgcaagggcgctggttctggaaccggaagttttgttgtttgatgaacccctctcaaacctagatgccaagttacgaagacgggtacgccaggaaattcgtgaacttcagcagaatctggagttgaccacggtttatgtgacccatgaccaggaggaagcccttgcggtttctgatcagatcatcgtcatgaatgaggctgtcatcgcccagcagggaactccggaagatttatatgaatccccggaaagtctttttgtcgcggatttcataggagatgcaaacatcatcattggacacatgacagagtatgatggaaaactttcaaccataaaagttggcgaattatccctgaaccttcctcacaaaggcgtaaatcctggagaaattaaattggcaatccggccgcaagccgtgaaagttcatgcggaaaaacatcccggaatccccgggaaagtcctgaaaagtgtctaccttggaagtcaccaggagtacaccatcgaaacggatcagggagaatggtttgttctcgacacggagatgaatgaaatccatgaggaaaatatggaggtttctcttgattttaaaacccgtggcgttagcatcatcccgcattcct

SEQ ID NO: 275074 - DNA, 819 bp, Unknown
  Bacterial polypeptide expressing nucleotide sequence isolated from the Sargasso Sea
gtgtggcggaaaacgtcgccttcggtatccgcaagcagcccaacgccgagcgcgccactcaagaactgctggagctggtcaagctcggtaacctggccaaacgttacccacacgagctgtccggtggtcagcagcaacgggtcgccctggcgcgcgctctggcgccggaaccgaaattgctgctactcgacgaacccttctccaacctcgatggcgaactgcgcaggcgcctgagccatgaggttcgggaaattctcaaggcgcgtggcaccagcgccattctggtcactcacgatcaggaagaggccttcgccgtcagcgatcacgtcggcgtgttcaaggatggtcgcctggagcagtgggatacgccgttcaatctctatcacgagccgctgacgcctttcgtcgccagcttcatcggtcagggttacttcattcgcggccagttgctcggcccggaaacggtgcagaccgagctcggcatgatccgtggcaaccgtgcctacacctgggctcagggcagcgcggtggacgtcttgctgcgcccggacgacatcgtcccggatgaaagcagcgaactgaaggcgcgcatcgtcggcaagactttcctcggcgctgccacgctctaccgcctgcaactgccgaccggtagccagttggaatcgatcttccccagccatgccgatcaccagccaggcgacgaggtgggcatccgcgtcgccgccgatcacctggtggccttcccggctctcggcagcgtcgccgcgcaattgcaactcagcgactccggtggcgtgcgccgggtcagcagcaactgat

SEQ ID NO: 275075 - DNA, 1063 bp, Unknown
  Bacterial polypeptide expressing nucleotide sequence isolated from the Sargasso Sea
atggaaaaaaccaatcaagcagtcgtttttcaggacgtcagcaaatctttcggacaagtcaatgcagttcgggaactgaatttcaatattgaacctggacagttaatcacgcttctcgggccttcagggtgtgggaaaaccacgactttaagactgatcgcgggattggaaatggtttcaaaagggaagattttcattggtgataaagatgtaactcatgtttccgcatcagaccgagatgtgagcatggtattccagtcttacgctctttttccccacatgaatgtctttcagaacgtttcctatggcctgaccatcagccggcttcccaaggaagaagtcaaagaaaaagcagaagcggccctcggccttgtgggattgtctgattatgggaaacgtcttccgagtgaactgtcaggagggcagcaacagcgggttgcggtcgcaagggcattggttctggaaccggaagttttgttgtttgatgaacccctctctaacctggatgccaagttacgaagacgggtacgccaggaaattcgtgaacttcagcagaaactggaattgaccaccgtttatgtgacccatgaccaggaggaagcccttgcggtgtctgatcagatcatcgtcatgaatgaggccgtcatcgcccagcagggaactccggaagatttatatgaatccccggaaagtctttttgtcgctgatttcataggagatgcaaacatcatcattgggcgcatgacagagcatgagggagacctttcagccataaaaattggcgaattatccctgaaccttcctcacaaaggcttaaatccaggagaaatcaaattggcagtccgaccgcaagccgtgaacgttcatgcagaaaaacatcccggaatccccgggaaggtcctgaaaagtgtctaccttggcagtcaccaggagtacaccatcgaaacggatcagggagaatggtttgtcctcgacacggagatgaacgaaatccatgaggaaaatactgaggtttctcttgattttaaatcccgtggcgttagcatcatcccgcattcctgaa

SEQ ID NO: 275076 - DNA, 1048 bp, Unknown
  Bacterial polypeptide expressing nucleotide sequence isolated from the Sargasso Sea
atgtattcacttgaagttagaaatatcaagatgaaatatgataacttcactgctttatctgatgtttctttaaaagttaaaaaaggtgaatttgtaacactgcttggtccatcaggttgcggcaaaacgacccttttgaaaataatatctggttttataacaccatcaaatggaaatgtttttataaataatgaagatgttactaaaactccaccagagacaagggatactgctatgtgtttccaatcatatgcattatttccacatctttctgtcttacagaatttgagttttggactaattcaaagaaaggtagatacaaaaaaaagaagtcaaattcttgaagaagttgttgctcagttggaattaacaactgaacttgaaaaattaccaaatcaactatctggtggacaacagcaaagagtagcattagggagagcacttgtgatgaggccagaagtaattttgtttgatgaacctttatcaaatttagatgctctattgagagagtctgtaagaatagaaataaaaagaatagtaaagctttttaatttaacggcaatctatgtaacacacgatcaacatgaagctctatctttgtctgacagaatagctcttatgcatgaaggtagtattatacaaattgacgattctgaaacaatttacaccagcccaaaaaataaatttgttgctaactttttaggaagctcaaatataatttcggctaagttaattaaaaaaggcaataaaaaaaatgaatggatttttcaaagtgaaattggcaaattagtcgtttattcagaagaagtttctgtcaaacctgatgttcatatttcatggcgatcagaaaaagtaacatttaataaatcctcagacaacaaaataaaaggaaaaatagaaaatatattctttttaggaagtcactatgaggtttttgtgaaagtaaataatgaaattgttaaaataaatgtaattaacaagcatttactaaataaagaaataactttctttttagataaaagagatttgaaaattttagaggattgag

SEQ ID NO: 275077 - DNA, 1053 bp, Unknown
  Bacterial polypeptide expressing nucleotide sequence isolated from the Sargasso Sea
atttgcagttgaatttaaagaatgttaccaaagagtttggtgatgtacaggcggtacgaaaccttaatttttcaatcgaaaaaggacaactagtaacgttgcttgggccttccgggtgtggaaaaacaaccacactacgtttaattgctgggcttgaaatggtcacagagggcaagatcttcattggagaaaaggaagtcactaaaatgtcagcatctgacagggatgtaagcatggtctttcaatcatatgctctattcccgcacatgacagttatgcagaatgtttcctatggactgactatgagtcgtataagcaaacaagaagtaaaagagaaatcacaaaacggactggaattagttggtctttctggatttggggaacgtcttccaagtgaattatcaggtggacagcaacagcgtgtagctgtggcgcgcgcactagttctggaacctgaagtacttttatttgatgagcctctatcaaaccttgatgcaaagcttcgaagaagagttcgtgaagaaatacgagaactgcagcaggatctaggtttgaccacagtttacgtgactcatgatcaggaagaagcacttgcagtttcagatcgaatcattgttatgaacgaggcagtaattgcacaagaggggactcctaaagagctttatgaagaacctatcaacttgtttgtttcggattttataggagatgcaaatttaataaattcatcaattcttgaaattgatggactaaatgcaaaattagatattggaggtattcaactgcaattacctcatcgaggattgatgcccggaaatgcaatggtagcaataagaccgcagtccatttatttaaatgaatctgagactgaaaaaggtattttaggaacaatacttaaatcatcatatctaggtgatcatcttgaatacactgtgaaatctgaacttggcgaattttttgttattgacaatcaaatgcaaactcagcatcctcccggcgcagaagtttccattacttttcgatcttatggaataagtttaattcctgaatcttgac

SEQ ID NO: 275078 - DNA, 769 bp, Unknown
  Bacterial polypeptide expressing nucleotide sequence isolated from the Sargasso Sea
cctgctcgaactcgatgacctctgcctcgcctacgacacgccgcacggccgccgcaccgtggtcgacgggctgagcctcgcgctgccgcgcggcgacatcggctgcctgctcggcgcatccggctgcggcaagaccaccgtgctgcgcgcgatcgccggcttcgagccggtgcggatggggcgcatcgtgctggacggcgtgcccgtcgcggcgccgtcgctcgacgtgccgcccgagcggcggcgcatcggcatgatgttccaggactacgcgctgttcccgcacctgagcgcggcggacaacgtcgcgttcggcctgcggcgcatgccgaaggccgaacggcgcctgcgtgtcgcggagatgctcgaactcgtcggcctcgccgattccggcggcgcgtatccgcacgagctgtcgggcggccagcagcagcgcgtcgcactcgcgcgtgcgctcgcgccgtcgccggagctactgctgctcgacgagccgttctcgaatctcgacgtcgatacccgcgagcggctcgcgttcgagctgcgcgacatcctgaaacgcacgggccacaccgcgatcctcgtcacgcacaaccaggccgaagcgttcgcgatcgccgaccggatcggcgtgatgaaggacggccagctcgcgcaatgggatacgccgtacgcgctgcatcaccatccggccagcccgttcgtcgcggatttcgtgcgccgcgacgcgctggccgacgaacgcgcacgcgcactggcgcgcggccgctga

SEQ ID NO: 275079 - DNA, 442 bp, Unknown
  Bacterial polypeptide expressing nucleotide sequence isolated from the Sargasso Sea
tatgagtgatattttagaattaaaaaatatttccaaaaattatggaaatacaaaagtgctagaagatattaatattaaaataaaaaataatgaattttttacaatacttggctcaagtggatctgggaaatcaactataattagaatgattggtggttttgcaaaacctacaaaaggtgagattgtttttgaagataatataattaacgaagagccaatttttaaaagaccatttaacacagtctttcaagattatgctttgtttccgaacatgaatgtttttaacaatgttggatttgggcttaaaattaaaaaaataaataaaaaattaattagtgataaggttcaagaagtattatcaattgttggtttagaagatttcgcaaatcgaatgcctcaagaattatcaggaggtcagcaacaaagagttgcactgcaagag

SEQ ID NO: 275080 - DNA, 666 bp, Unknown
  Bacterial polypeptide expressing nucleotide sequence isolated from the Sargasso Sea
tatgagtaatattttagaattaagaaatgtttcaaaaaaatatggagaaacaaaagttttagataatataaattttaaaattaataataatgagttctttacaatattaggatcaagtggatctggtaaatctacaataatacgaatgattggtggttttactaaaccttcagcgggtgaaataatttttgaaaatgaaattattaatgatgaaccaatttttaagagaccatttaacactgtttttcaagattacgcattattcccaaatatgaatgtttttgataatgttggatttggacttaaaataaaaaatattaataaaaatgagattaagaaaagagtcttagatgtattagctgttgtcggattagaaaatttttcaaataggatgcctcaagaattatctggaggtcagcaacaaagagttgctttagcgagagcaattatttgtgaacctaaaattattttattagatgagcctcttggtgcactagacgcagaattacgaaaacaaatgcaattatttctaaaagaaattcaaaaaaaaattcaaattacatttgtttttataactcatgatcaagaggaggccatatttttatcagatagaattgctgtactcaataatcacaaatttgaacaagttggaaacaccaaggatct

SEQ ID NO: 275081 - DNA, 364 bp, Unknown
  Bacterial polypeptide expressing nucleotide sequence isolated from the Sargasso Sea
atgattaaagctctcgaattaaaagatattaataagaaattcaatgagaccattgcattaaaaaacattcaattagaaattaatgacggtgagtttttttctttattaggaccttctggatcaggtaaaactacgtgtttaaaggtaatcggtgggtttgaaaatccagactcaggatttgtaagtttatttaataaggatgtcacaaatatccccccttttaaaagagatgtaaatactgtttttcaagattacgcactttttcctcatatgaatgttgaagagaacgtaagctatagtcttaaaattaaaaaaattccaaaaaatcaacagactgatcaagttaaggaaattctttctaatg

SEQ ID NO: 275082 - DNA, 877 bp, Unknown
  Bacterial polypeptide expressing nucleotide sequence isolated from the Sargasso Sea
tatgagcgaaattttagaattaaaaaacatttccaaaagctatggatctacaacagtattagagaatataagttttaaaattaataataacgaattctttacaattttaggatcaagtggatcgggtaaatctacaataatacgaatgataggagggtttacaaaaccttcttcgggtgaaataatttttgcgaacaagaatattaacgatgaaccaatatttaaaagaccattcaatactgtttttcaagattatgcattatttccaaacatgaatgtttttgacaatgtaggttttggtttaaaaataaaaaacaaaagtaaagaagaaataaaaaaaaatgtgttaaatgttttaactgtagtaggacttgaaaacttatcaaatagaatgcctcaagaattatcagggggtcagcagcaaagagtagctcttgcaagagcaattatttgtgagcctgaaataattttattagatgaaccacttggtgctctagatgctgaattaagaaaacaaatgcagttatttctaaaagagattcaaaaaaaaatccaaatttcatttatttttattactcatgaccaagaagaggctatatttttatcagatagaattgctgtacttaacaatcataaatttgagcaaataggttcaccaaaagatttatattactcaccaaaaactacttatatggctaatttttttggagaatgtaatttaataaaatgtcgtgttacaaattatgactcagaatcaattaaagtttcctctgcgtttggcaactttaatatacctaagaataaaaatttaaataatgaatctgagtttatttatggaattagacctgaggaggtaaaacttgttagacaaagtgaa

SEQ ID NO: 275083 - DNA, 409 bp, Unknown
  Bacterial polypeptide expressing nucleotide sequence isolated from the Sargasso Sea
tatgattaaagccctcgagttaaaaaatattaataaaaagttcaatgaaactgttgctttagataacatacatttggaaattaatgatggagaatttttttcattattaggaccttctggctcaggaaaaacgacctgtttaaaagtaattggtggttttgagcagcctgactcaggaaacgtaagcctatttaatgagaacgtaacagacattccgccatttaaaagaaatgttaatactgtatttcaagattatgctctttttcctcatatgaatgtggaggaaaatgtttgctatagtttaaagattaaaaaaataccaaaaatagaacaagaatctcaggttgaggaaattctctccacagtaaagctaaaaggctatgaaaaaagaaaaccaagtgaactctca

SEQ ID NO: 275084 - DNA, 471 bp, Unknown
  Bacterial polypeptide expressing nucleotide sequence isolated from the Sargasso Sea
catgggacagagtaaaaaattgaataaacaaccgcgttcgctttctccactggtgcaattagcgggaattcgcaaaagtttcgatggcaaagaggtgatttccagcctggatttgaccatcaataatggcgagtttcttacgctgcttggcccctctggctgcggtaaaacaaccgttcttcgcctgattgccggtctggaaacggttgattccggtcatattatgttggacaacgaggacattactcacgttccagcggaaaaccgctacgtgaataccgtcttccaaagctatgcgttattcccccacatgaccgtatttgagaatgtggcctttggtttacgcatgcaaaaaacgcccgcagccgacatttctccccgcgttaccgaagccctgcgcatggtgcaactggaagagttcgcccagcgaaaaccgcatcaactttccggcggccagcagcagcgcgtagc

SEQ ID NO: 275085 - DNA, 1075 bp, Unknown
  Bacterial polypeptide expressing nucleotide sequence isolated from the Sargasso Sea
aatgagttctatattagagttacaagatatttcgaaaaattatggaagttctgtagttttaaaagatattaatcttactatagaaaataatgaattttttacaatacttggatcaagcggatcaggcaaatcaaccctcatacgaattattggaggatttgttaaaccttcaagcggtgatctaatctttaacaacaaagttataaacgaagaaccgatttttaagagaccgttcaatacggtatttcaagattatgcattgtttcccaacatgaatgtttataataatatcggctttggtttaaaaattagaaaattagatccaaaaacagttagtgataaagttgaagaagtcttaagtattgttggcctaaatgattttaaaaaaagaatgcctcatgaattgtctggtggtcagcaacaaagagttgctttagcaagagctattgtttgtgagccaaaagttattttacttgatgagcctttaggagctttggatgcagaattaagaaaacaaatgcagttgtttttaaaagatattcaaaaaaaaattaaaactacttttatttttattacacatgatcaagaggaggctattttcttatcagatagaattgctgtattaaataatcaccaatttgaacaagtaggatctcccaaagatttatattataaacctaaaagcaaatatcttgcatctttttttggagaatgtaatttaattgatgggaccgttgataacataaatagtgatattattactattgatactgctattggaaaaataaatattaaaaacaaatataaaaatattagtcaaaaacaaaatattacatttgcaattaggccagaacaaatatttctaaatcaaaaaaaggatatcaattcatttagaactaacgttgatagagtcgagtttaaaggatcagttacgaatatcatattagattttcaaaaaaatataaaaattaaagttcaaataaataattctgaacaacaaatgaatattaatgagaatgatcaattagatatttattttgatcctaattttggcaatttgtttgttaatgactaa

SEQ ID NO: 275086 - DNA, 646 bp, Unknown
  Bacterial polypeptide expressing nucleotide sequence isolated from the Sargasso Sea
aatgtctcgattgatgcagctacaggacgtcgcggaatcgacccgtcttggcccgctttctggtgagataaaagcaggagagatcctgcatttagtgggaccaaacggtgccggaaaaagtacgctgttggcgcgtatggcgggtctgacgaacggagagggcagcatcacttttggtgatatgccgttggaggaatggccggctgccaggctggcgcaatatcgtgcctatcttgcgcaacagcaaaatcccccgtttgcgatgccggtctggcattttctgacgctgcatcaacccgacaaagcacgtaccgatctgttacaggaggtcgccgatgcgctcggcctgggagataaactggggcgcggcgtgaaccaactctccggcggtgagtggcagcgtgtgcgcctggctgcggttatcctgcagatttgcccacaagcgaatccattaggtcagcttttactcctggatgagccgatgaacagtctggacgtcgcgcaacaaaacgcactggatcgattgttgagtcagctgtgtttgcagggcatagcgattgtgatgagcagtcacgaccttaatcacaccttacgccatgcgcataaagcctggctactcaaacgcgggaaactgcttgccagtggt

SEQ ID NO: 275087 - DNA, 763 bp, Unknown
  Bacterial polypeptide expressing nucleotide sequence isolated from the Sargasso Sea
atgaaattagatgttcataatatttcaaaatattttggggaaggttcaaatagaaaaaaggcaattgagggaataagcttttcaataagttctggcgaatttaaaactcttgttgggagctctggatcaggcaaaagtactatattgaggattattgctgggcttgagagtccatctaaagggaacgtaaaagtagatggaaaaatagttagtggaccgggattggatagaggaatggtttttcagaaatatagtcttttcccttggctcactgcatctgagaatattgcatttggaatgaatttaaatacttacaagttgaaagaaataaaatataggacatcttatttattagaagtagtaggtcttcaggattcgggaaataagtatccaaaagaattatctggaggaatgcaacaaaggattgcaattgcaagagctctagcgactaaccctaaaattctacttttagatgaaccttttggagccttggacttacagataagagaatctatgcaaaaatttctctatgaattatgggaaaaaacttcattgacagttttacttataacccatgatattgaagaagcattagccctctctcagcaaatatgtattttagctcctaatcctggaagaatcataaaagaagttagggtagatctacaaaaaggagatttagataaattgaaacttgattcagattttgcaaaattaagatatgagttatctgattttttaagagggctccaaaaaaaataaa

SEQ ID NO: 275088 - DNA, 769 bp, Unknown
  Bacterial polypeptide expressing nucleotide sequence isolated from the Sargasso Sea
atgctgcaaatctctcatcttgccgccagctacggtggaaaaccggcgctggaggatatcaacctgacgctcgatagcggtgagctgctggtggtactcggaccttccggttgcgggaaaaccacattgttaaatctgattgccggatttgtgccgtatcagcatggcagcatcacgctggcgggtaacagggttgatggtccgggggcagatcgcggggtcgtgttccagaatgaaggtctgctgccctggcgtaacgtgcaggacaacgtggcttttggtctgcagctggcggggggggataaaccacagcgtcagcgtattgccctggagatgttgcagaaagtcgggctggaggacgcgggcaaacgctttatctggcagctttccggtggacagcggcagcgcgtcggcattgcgcgggcgctggcggccaatccacagttgttgttgctggatgaaccttttggcgcgctcgacgcctttactcgtgagcagatgcaaaccctgctgctgaagctgtggcatgagactggcaaacaggtgctgttgattacgcacgatattgaagaagcagtgtttatggcgacagagctggtattgctgtcgccaggcccaggccgggtactggagcgtctgccgctgaatttcgcccgtcgctttgtggctggagagtcgagtcgcagcattaagtccgatccgcagtttatcgccatgcgcgagtacgtgttaggtcgagtctttgaacaacgggaggcattttcatgag

SEQ ID NO: 275089 - DNA, 877 bp, Unknown
  Bacterial polypeptide expressing nucleotide sequence isolated from the Sargasso Sea
tctagtgggtctttaaatcttaattcaactcttagactcaaagtacaaaatgtcggaggggattcttctcttgcaaaactagtaaatcttattgagtctgtaaacgctagaaaacctcgcattcaaagaattgctgatgaaattgcaggcaaatttgcttactttgtgcttatttttgctactttaaccttcttcttttggtggaaaggggcaagaaacttttggccagatttattaagtcataatcatcaattcatcactcactcaagccatacacttcatagttcgcttggtagtaatgctgagaattttcttagtttagccatacaattgtcaattgctgttttagtaatagcttgtccttgtgcattaggtttagccaccccaactgtaataactgtcgcatcaggtaaagcagcaaaaaagggcgttttatttaaaggcggtgacaaaatagagatggcttcaaaaattaatcaaattatttttgataagacaggcactttaacaaaaggtaagcctttcattgttgattataaaaattatgatgatcattcatttttattaaaaatagctgccagtttagaaaaggaaagcagacatccaatcgcagatgccttaattcaagaggcaaaaaagcaaaatttaagtttatttccaataaagaaaatttttactcattcagggcgaggtatttctggagaacttgaatcaattaatggaattattaatattggaaatattgattggctactaagcaaaggaataattattgatagtgaggcaaaaaaagtcattgaaaatgaagaaacaaaaacgaacactatcattggagtaagtatcaaagataagttattaggctttattttgctaggag

SEQ ID NO: 275090 - DNA, 975 bp, Unknown
  Bacterial polypeptide expressing nucleotide sequence isolated from the Sargasso Sea
ggttttaaatcatttattaagaaccgtcctgatatggattctctagtagctcttggagtaactagcgcatacataacaagtcttctatccttaatatttcctgccactggttttccttgtttttttaatgaaccagttatgctgttaggcttcatattgattgggcgtttcttagaggaaagagcaagataccaaactggttcatctattggagagttattagatcttcaacctgaaatggcaaatatctacacagaagataatcaaataaaatcaataagagtaaacactttaagaccaaatcaagagattcaagttttagctggagacagagttcctgctgactgcattgttactcaaggtaattcatatattgatgtttcacatatcactggagaatccaaacctatcgaggtaaaagaaggcgaaaatctatctagtgggtctttaaatcttaattcaactcttagacttaaagtacaaaaggtcggaggggattcttctcttgcgcaactagtaaatcttattgagtctgtaaactctagaaaaccacgcattcaaagaattgccgataaaattgcaggcaaatttacttactttgtcctcatttttgctaccttaactttcttcttttggtggaagggggcaaaaaacatttggccagatttattaagtcataatcatcaactcataactcactcaagccatacacttcatagttcacttggtaataatgctgagaattttcttagtttagcaatacaattgtcaattgctgttttagtaatagcttgtccttgtgcattaggtttagccaccccaactgtaataactgtcgcatcaggtaaagcagcaaaaaagggcgttttatttaaaggcggggataaaatagagatggcttcaaaaattaatcacattatttttgacaagacaggtaccttaacaaaaggtaagccattcatcgttgattataaa

SEQ ID NO: 275091 - DNA, 931 bp, Unknown
  Bacterial polypeptide expressing nucleotide sequence isolated from the Sargasso Sea
tacgctgcggatcaagcgaatcggggaagaatcaactctggctaaaatcatccgcatggttgaagaagcccagtcaagcaaggctcctgtggccaggatggcagatcgggtggcaggattgttcgttcctatagttcttttgctggcgttgctgacggcactgagttggtggttttacggtgcaggaacggaaaccgtcctgactcggatggtggcagtgttggtcattgcctgcccctgtgctctcgggcttgcaacgccgattgcgattctggttggaactggaagcggtgcgcgccatgggatcctgttccgtaatgctgcggctcttgaagcccttcaaggtctggataccctgatgtttgataaaacaggaactctgaccctcggtcaacctgttcttgaatcaatcaaaacctggaacggctggaacgagtttgaagtcctcagactatcagcctcagcggaaatgggttcggaacatcctttcgggaaagcaatcgtagagtcggcaaaatctcaaaatttgaagctttcacaacttgagtccttcgaggccttgagcggttccggtatcatagctttggttgaaaaccgtcaactcgctatcggtcgtcaggagttcattttaaatcaaagtaaaatcaaggaactcccgcaggaatgggacaaaggaatagaagccaaatcatcggtctgggtccttgttgatggcattctggccgcgagcatgagtttccaagaccagatccgccccgaaagccgagaggctatcgaaagcctgaagtccatggggctcaagccggtgatgctgaccggagatcagttggaggcagcacaactcctcgctcgtcaggcaggccttgacgaggtgaaagcagggctgcttccccagcataaagtcagcgtacttgaaaaataccaggcagag

SEQ ID NO: 275092 - DNA, 953 bp, Unknown
  Bacterial polypeptide expressing nucleotide sequence isolated from the Sargasso Sea
acgcttccggaaatcttgtttctggtttttctgcaagtctggaagttggctccagttctttcttactctgccggtgatgtttgccggaagggatttttacctccggggtcttcccagtctctggaggagaaatccgaacatggataccctggtggcattggggacgttggctgcttttggttacagtctctggaacctgctgaaggatggaggaatttccggactttattttgaaacttcggcgctgatcatcaccctcattctgcttggcaggttgatggaatcccgaagtcggagaagggcggtggagtcggttcaggcgcttctggaactgcgtcccaagcaagccatgcttcttaccgacgaaggagagacacccgttgtcctggaactgcttcatccaggagaccggatccggatccgtcccggtgaaacccttcccgcggatggcctggtggaagaaggagcctctgaaatcgatgaatcgatgctcaccggggaaagtgtgcccaggtcctgctcgacaggagatgaagtcaccggcggaacccgctgcatcaacgggatgcttaccctgcgaatcaagcgaatcggggaagaatcaaccctggctaaaatcatccgcatggttgaagatgcccagtccggcaaggctcctgtggctaggatggcagatcgggtggcaggagtgttcgttcctgtagtacttttgctggccgtgttgacggcactgagttggtggttttacggtgcaggaacagaaaccgtcctgacccgtatggtggcagtgttggtcattgcctgcccctgtgcgctcgggcttgcaacgccgattgccattctagttggatccggaagcggtgcgcgccatgggatcctgttccgtaatgctgcggctcttgaagccctttcaggtctggacaccctgatgattgataaaacaggaactctga

SEQ ID NO: 275093 - DNA, 607 bp, Unknown
  Bacterial polypeptide expressing nucleotide sequence isolated from the Sargasso Sea
ctgggtccttgttgatggtacccttgccgcgagcatgagtttccaagaccagatccgccctgaaagccgagaagccatcgaaagcctgaagtccatggggctcaagccggtgatgctgactggagatcagttggaggcagcagaactcctggctcgtcaggcaggcctggacgaggtgaaagcagggctgcttccccagcataaagtcagcgcaatcgaacaataccaggcagagggataccgggttggaatggtcggtgacggaatcaacgatgctccggccttggccgctgcggatgtagggattgggatgggttctggaaccgatgttgctctggaaaccgcggacgtcgtcttgatgaaaaacaacctagctcatcttgccgatgccttccgtctcagtcgtgctaccctgagaaacatcaggcagaatcttttctgggcttttgcttacaatgtgctaggaattccggtggcggcaggagtgcttgtcccttttggaggccctgccctccatccggtacttgctgcggcagcaatggcgctcagttccgtttcggttgttgccaatgccctccgtctgcgcaatttccgtttctcgaaatga

SEQ ID NO: 275094 - DNA, 356 bp, Unknown
  Bacterial polypeptide expressing nucleotide sequence isolated from the Sargasso Sea
ggtcggtgacggaatcaacgatgccccggccttggccgctgcggatgtagggattgggatgggttccggaaccgatgttgcgctggaaaccgcagacgtcgtcttgatgaaaaacaacctagctcatcttgccgatgccttccgtctcagtcgggcgacactgagtaacatcaggcagaatcttttctgggcttttgccttcaatgtactcggaatccccgtggcggcaggagtgctggttcctttcggaggccctgccctccatccggtacttgctgcagcagcaatggcgctcagttccgtttcggtcgtggccaatgccctccttctgcgcaatttccgtttctcgaaatgat

SEQ ID NO: 275095 - DNA, 352 bp, Unknown
  Bacterial polypeptide expressing nucleotide sequence isolated from the Sargasso Sea
catggtgggggacggtatcaacgatgcgcccgccttgatgagcgccgatgtggggatcgccatgggatcgggcactgaggtggcgatcgaaagcgcggatatgactctgctgtcccatcagctgatagtgattgctaacttattggcactttcccgcgcgaccattcgcaatattaaacagaacctgtttggggcctttatctacaacagtttaggtattccagtggcggcgggcgtcttgtatccgctcacggggatgttgttaagtccagtgattgctggggcggcgatggcgctgtcttccctaactgtggtcaccaatgcgaatcggttaagacagcaaaagttataa

SEQ ID NO: 275096 - DNA, 847 bp, Unknown
  Bacterial polypeptide expressing nucleotide sequence isolated from the Sargasso Sea
gctgggcttcgtgctgctgggtcgcttccttgaggagcgggcccgctaccgcaccggtcaggcgttgaagcaactggcgcaacttcagcctgaaacggcccggctgctgctggacgatggcgccatccgcgaggtgcgtgtcggggccttgcgccccggtgaacgggtgcagttgctgccgggggaccgggtgcctgtcgatggcgttgtgatgcagggccactcggcagtggacgtgtccagcctcaccggcgaaccgctgccgctggaggcggaaccgggcacggagctcgcctccggcagcctgaatctcgaagcacctctgtccatggaggtgcagcgggtgggttcggagacggctcttgcccggatcatccagctggtggagcaggcccaggcacgacgtgcccccatccagggtctggcggaccgggtcgccggtcgtttttgctatttcgtcatcggtctggccctggccgccttcctgttctggtggctgatcggtgccgacctctggccacaggtgctggaggcttccgcgccggggatgatggcgcatcccatgcaccatgccggtctcggcagcggtgccgagactccgatcggtctggcgctgcaactggcgatcgccgtgttggtggtggcctgcccctgtgctctcggactggctacaccgactgtgatcacggtggccacgggtctggcggcccggcggggttggctgttccgaggcggcgatgtgctcgagacggcagctggcctggaccaggtggtgttcgacaaaaccggcaccctcacccttggacgccccctggtgacggccatccgggcggacgatcccgagcgg

SEQ ID NO: 275097 - DNA, 883 bp, Unknown
  Bacterial polypeptide expressing nucleotide sequence isolated from the Sargasso Sea
ggtgcaatcaccgcggtcagtggcagcgagcaacacctgctgcagctggccgctgcgctgcagcaacatagtgagcatccgctggcaaaagcggtaatgagcaaagcgaagcaggaaaacatcggcctgtccgagatcagtaactttactgttgttgccggtaaaggcgtgcaggcacagcaaggcgatacccgcctgttgctgggcagcagccattggatgcagcaactggggctgaccttgccgacagcgttaatccgggttgaaggcgcatcggtatcctggctggcaaaacagcaagacgggcatagcgaattgttgggcttactgtgctttagcgacagcattaaagccagcgctcaggcagctgtatcagcactgcagcagcaaggtattaaggtggcgctgttaaccggtgacagccaggccagtgctgaagcagtcgccgccgtgttaaaacccgatcaattgcaggcagaagtgctgccggccgataaagccagctttgtaaaacagtgccagcaacaaggctacaaagtggctatggtgggtgacggtattaatgatgcaccagcattggcacaggctgatctgggcatagccatggccagcggcaccgatgtcgctgttagcgccgctgccataacgctaatgcgtagcgagccagcgttggttagcactgcattaacgcttgccaatgacacctatagcaaaatccggcagaacctgttttgggcctttatttttaacgttaccggtattccattggcagcgttgggttacctgaacccggtcatcgccggtgctgctatggccagcagtagcctggtagtggttagtaatgccttactgctgcaacgcagacagtattttaccggcaata

SEQ ID NO: 275098 - DNA, 890 bp, Unknown
  Bacterial polypeptide expressing nucleotide sequence isolated from the Sargasso Sea
gacaataggagatacaattacgggagctacattaaacggaactgggagtttgacttttcgtgcgactagcgttggaagtgatacaattctctcaaatattattaaaatggtagaaaatgctcaagctgctaagctgccaattcaaggattagtaaatcaagtaactatgtggtttgtaccagcggttatatttctatctatattaacagttgctgtatggtttgtaatcggacccaacaacgttatcacttttgctttagtagctggtgtttcagttttgattattgcttgcccttgtgcaatgggtttagctactccaacctctataatggtcggtactggtagagcagctgaaatgggtgttctatttcgaaaaggagaggcgcttcagagtttgagtaatatcgatattgttactttagataagacaggtactatcactaagggtaagcccacactcactgatttaatattgtctgatgggtttaataaaaaagaagttctacaaatagttgcctcgattgagtcatattctgaacatccaattggtgctgcaattgttcaagaagctaaatctaagggtttaaaattatctccagttcaacatttcaagtctattactggttatggtatagaaggaaatattaatggtcaccgtgttttagttggttcagaacttttaatgaaacgtgaagggctcgatttacaattttttgcttctgaggaaattcacctaactcaaggtgggaaaactatactttatgcttccattgataatcaaattgcagcagctattgcagtagctgatcctattaagccatccagttcaaaagctattgaaatacttcgtaaaaaaggtataggagttgttatgatcactggtgaataaa

SEQ ID NO: 275099 - DNA, 841 bp, Unknown
  Bacterial polypeptide expressing nucleotide sequence isolated from the Sargasso Sea
gataccctggtggcattggggacgttggctgcttttggttacagtctctggaacctgctgaaggatggaggaatttccggactttattttgaaacttcggcgctgatcatcaccctcattctgcttggcaggttgatggaatcccgaagccggagaagggcggtggagtcggttcaggcgcttctggaacttcgtcccaagcaagccatgctccttaccgaagaaggagaaacacccgttgccctggaactgcttcatcccggagaccggatccgggtccgtcccggtgaaacccttcctgcggatggtctggtcgaagagggagtctctgaagtcgatgaatcgatgcttaccggggaaagtgtacccaggtcgtgctacacaggagatgaaatcactggtggaacccgttgcatcaacgggatgcttaccctgcggatcaagcgaattggggaagaatcaaccctggctaaaatcatccgcatggtagaagaggcccagtccggcaaggctcctgtggccaggatggcagatcgggtggcaggagtgttcgttcctatagtacttttgctggccttgctgacggcactgagttggtggttttacggtgcaggaaccgaaaccgtcctgacccggatggtggcattgttggtcattgcctgcccctgtgctctcggacttgcaacgccgatttcgattctagttggaaccggaagcggtgcgcgccatgggatccttttccgtaatgctgcggctcttgaagcccttcaaggtctggataccctgatgtttgataaaacaggaactctgaccctcggtcagcctgttcttgaatcaatca

SEQ ID NO: 275100 - DNA, 763 bp, Unknown
  Bacterial polypeptide expressing nucleotide sequence isolated from the Sargasso Sea
acccttcccgcggatggtttggtggaagagggagtctctgaagtcgatgaatcgatgctcaccggggaaagtgtgcccaggtcttgctcgacaggagatgaagtcactggtggaacctgctgtatcaacgggatgcttaccttgcggatcaagcgaatcggggaagaatcaaccctggctaaaatcatccgcatggttgaagaagcccagtccggcaaggctcctgtggccaggatggcagatcaagtggcaggagtgttcgttcctatagtacttttgcttgccttgctgacggcactgagttggtggttttacgatgcaggaacggaaaccgtcctgacccggatggtggcagtgttagtgattgcctgcccctgtgctctcgggcttgcaacgccgattgggattctggttggaaccggaagcggtgcacgccatgggatcctgttccgtaatgctgcggcccttgaaacccttcaaggtctggatatcctgatgtttgataaaacaggaactctgaccctcggtcaacctgttcttgaatcaatcaaaacctggaacggctggaacgagtctgaagtcctcagactatcagcctccgcggaaagcggttcggaacatcctttcggaaaagcaatcgtagagtcggcaaaatctcaaaatttggagatttcacaacctgagtccttcgaggccttgagtggttccggtatcatggctgtgatagaaaaccgtcaactcgctatcggtcgcctaggagttc

SEQ ID NO: 275101 - DNA, 765 bp, Unknown
  Bacterial polypeptide expressing nucleotide sequence isolated from the Sargasso Sea
tcaccgcagtctcaacatgttcacgctcatctcccttggagtgggcgtcgcctggggctacagcgcagtggcgcgcttgatgccgtccctgtttccgtcaagcatccggatgtccgacggaagcgtgccggtgtatttcgaagcggcagccgtgatcactgcgctggtgctactcggccaggtgctggaactgcgcgcgcggagccggacgagcgctgccatccgtatgctgctcggcctcgcgcccaagaccgcgcgcatggtgcgggaggacggccgtgaagaggacattccgttggaccaggttcgcccgggggacgtgctgcgcgtgcggccaggcgagaagattccggtcgacggcgtcgtgaccgaaggggtgagcggggtcgacgagtccatggtgacgggcgagtccattcccgtcgaaaagcgggccggcgaacgggtgatcggcgcaacgctgaacggtaccggcagtctcctcatgcgcgccgaacgggtaggcgcagagacgctgctcgcgcagatcgtacggatggttgccgatgcgcaacgcagccgcgcgccgatccagcgattggtggacgtagtgtctgcctacttcgtcccggcggtgattgccgccgccgcgatcacactggtcgtctggggaggctgggggccggaaccccggcttgcccatgcggtcatcaatgcggttgcggtcctgatcatcgcgtgcccgtgcgcattgggactcgcgacaccgatggccatcatggtcgg

SEQ ID NO: 275102 - DNA, 928 bp, Unknown
  Bacterial polypeptide expressing nucleotide sequence isolated from the Sargasso Sea
aagggggttttttgcattttaccgctggagtccgaacatggatactttgattactatcggtacttctgcggccgtgggattcagtgttgggaatttatttggcataagtcagaacattgaaggtttatactttgaaacagcgggagtgattatttccctgatattacttggaaagtctcttgaatccaaaagtcgaatctatgcttctgaagctatcaattctttgttgaagcttcgtcccacagaagcagttctgattcatgatggaaaggagtctagtattccaatcgatcttgttcactctggggatattttgaggatacgtcctggaagcattatcccggttgatggtgtcattgtggaaggttccagctatgtggatgagtcgatgctaacaggtgaagcagtaccagttaaaaaaacaatcggtgcagaagttacaggcggaacatccaacaccaatggggtaatggatattagagtgatacgagtaggtgcacaaacagtattgtccagcataatccgcatggtggaaaatgctcagctgtcaaaatctccggtttcgcgaatggccgataaagtagcaggagtatttgtacccattgtactgataattgctgcagtttcaggaattttgtggtgggtatacggcgcagaaactaatgacattttaagatatacaattgccgtgcttgtaattgcatgcccttgcgcactcggtttggctacccctattgcaatcctagttggaaccggaatcggtgctcgaaacggtattctgtttagaaatgcagtggctcttgaagcagcccataatctggacacaatttttttagacaaaacagggacattaactgagggtagtccaaaagttacaaaggttttgattaatgaaggctttgaaaaagatttccttttactttatgct

SEQ ID NO: 275103 - DNA, 892 bp, Unknown
  Bacterial polypeptide expressing nucleotide sequence isolated from the Sargasso Sea
tgatttggtctccttagtggtatttgcaccgtatttacaatttttaccccttttcttttcatctactgagcatgtttttttcgacggagctgcattcattatttcattcatattgcttgggaattggttggaagccagagccaaactgaaagctactgatgccgtattttcattaatggatctcaaagctaaaacagcactcgttttagattcaagcggttcccattctgaaattccagttgaagacataccagaaggaacagagcttctggtaaaagttggacaaaccattcctcttgatggcttagtagtcaaaggttcagcttcaattgatacttcgatgatgacaggagaatctaaccctgtttttgtaaagcaagatgatcctgtgatgggagggacaattgttttggattcttcaattcatataaaatcaacaaagcatcatgatgatacggttttagcaaacgttatacatttggttgatgaagcgcagatgggcaaggccccaattcaaaaattagtagacagaatttctgcagtatttgtaccattggtggtcgtttgtgcaattctagcatcactggcttggatgttcttttcagaagggtatggacagtataactcaactgaactcgctataatggttctagtatctacattagtaatagcttgtccatgtgctctaggattagccactccaaccgcccttatggtaggtactggagtgggagctcagtatggattactaatcaaaggcatagatgcccttcaaaacagttataacacagatacattagttttagacaaaactggaacattaacggtaggttcaccatcgttagtcaatattaaatcattaaattctaaagacaatgacgttctaaccata

SEQ ID NO: 275104 - DNA, 654 bp, Unknown
  Bacterial polypeptide expressing nucleotide sequence isolated from the Sargasso Sea
tcataatcatcaattcatcactcactcaagccatacacttcatagttcccttggtagtaatgctgagaatttccttagtttagccattcaattgtcaatcgctgttttagtaatagcttgtccatgtgcattaggtttagctaccccaacagtaataactgtcgcatcaggtaaagcagcaaaaaaaggagttttatttaaaggcggggacaaaatagagatggcttcaaaaattaatcacattatttttgacaagacaggtaccttaacaaaaggtaagcctttcattgttgattataaaaataatgatgatcattcatttttattaagaatagctgcaagtttagaaaaggaaagcagacatccaattgcagatgcattagttcaagaggcaaaaaaacaaaatttaagtttatttccaataaaaaaaattttcacttattcaggtagaggtatttctggagaactagagtcaattgatggactaattaatattggaaatattgaatggctactaagtaaaggaataattattgatagtgattcagaaaaattgattgaaaatgaagagacaaaatcgaacactatcattggagtaagtatcaaagataagttattaggcttcatcttccttggagatttactcagagatga

SEQ ID NO: 275105 - DNA, 787 bp, Unknown
  Bacterial polypeptide expressing nucleotide sequence isolated from the Sargasso Sea
tattgagttactaaaaattgaagcctttaacgccattacgggttttggtgtagaagcaagctgcaacaacaaagccctgcttttcggaaacgataaactaatgaagttaaaaggcatagacctcacaggctttgttgaacaagcacagtctttagccaaagaagccaaaacacctatgtactttgctgtagatggtgaacttgcagcaatcattgctgttgcagatcctatcaagtcagactcaatctctgctatcaaacggcttcaggctaatggtatacgcgtcatcatgttaacgggtgataacaaggaaaccgctgccgccgtagctaaaaaagcgggtattagtgagtttcttgctgaagtgctgccagaagataaagccaacaaggtgaaagagctacaagaaggcggcgaaattgttggtatgacaggagatggcatcaacgatgctcctgcgctagcgttagccgatgttggcttcgccataggcacagggactgatgtagctatcgaaagtgctgacattaccctaatgcgtggttcacttcatggccttgctgatgccatagcggtaagcaaagctactttacgaaatatcaaacaaaacttgtttggcgcgtttgtctataacgtagccgggattccttttgctgcgggggttctatatcccttctttggcattctgcttagccctgtaattgcaggtgctgcaatggcgttttcgtcattgactgtagtgtcaaatgcaaatcgacttcgcttttttaaagcaaaagagcattaa

SEQ ID NO: 275106 - DNA, 863 bp, Unknown
  Bacterial polypeptide expressing nucleotide sequence isolated from the Sargasso Sea
ataccttggtttcctaggcgtaggcgcggcctttgtgtggtcgttgtatgcgctttttctcgggggagaaggcgatccgggaatgcgcatggccttccacctgctgcccacccaaggcgctggcagcagcgagatctacttggaggtcgctgcggctgtcaccacattcatcctgctcggccggtacttcgaaatacgcgccaagagcagaagcagccaggcccttaccgcgctgttgtccctcggcgccaaggacgtcacggtgttgagcgacggacgtgagcggacgatcgccatcggcgaactcgccgcgggagatcactttctcgtacgccccggagaaaaggtggcaacagacggtcgggtgatcaatggccaatcgtccgttgacatcagtctgcttaccggggaaccgatgccggtggaagcaggtcccggcgatgcggtggtgggtgccggaatcaacacctccgggcgactggtggtgcaggcaactcgcgtgggagtcgacacgcacctcgcacgaatcgcggctctcgttgaagacgcacaaacgaagaaggctccggtgcagcgcctcgccgatcgaatctcggccgtcttcgttcccatcgtgatcgtcctggcgattgccacggtcgtgggttggtccattgcgggagccgatcttgcattcgcattcactgcgggtgtcgctgtgttgatcatcgcctgcccgtgcgcgcttgggctggcaactcccacggcgcttctcgtgggaacggggcgaggggcgcaaatgggaatcgtcattcgcggcccggagattcttgagtccacacgcaagatcgacaccatcgtgctggacaagacagggactctga

SEQ ID NO: 275107 - DNA, 472 bp, Unknown
  Bacterial polypeptide expressing nucleotide sequence isolated from the Sargasso Sea
agccatacaattgtcaattgctgttttagtaatagcttgtccttgtgcattaggtttagccaccccaactgtaataactgtcgcatcaggtaaagcagcaaaaaaaggcgttttatttaaaggcggtgacaaaatagagatggcttcaaaaattaatcaaattatttttgataagacaggcactttaacaaaaggtaagcctttcattgttgattataaaaattatgatgatcattcatttttattaaaaatagctgccagtttagaaaaggaaagcagacatccaatcgcagatgccttaattcaagaggcaaaaaagcaaaatttaagtttatttccaataaagaaaatttttactcattcagggcgaggtatttctggagaacttgaatcaattaatggaattattaatattggaaatattgattggctactaagcaaaggaataattattgatagtgaggcaaaaaaa

SEQ ID NO: 275108 - DNA, 868 bp, Unknown
  Bacterial polypeptide expressing nucleotide sequence isolated from the Sargasso Sea
tctgaagtcctcagactgtcggcctccgcggaaatcggttcggaacatccttttcgggaaagcaatcgtagagtcggcaaaatctcaaaatttggagatttcacaacctgagtccttcgaggccttgagcggttccggtatcattgctttggtggaaaaacgtcaactcgccatcggtcgtcaggagttcatcctgaaacaaagtaaaatcaaggaactcccgcagggatgggatgaaggtatagaagccaaatcatcggtctgggtccttgttgatgatacccttgccgcgagcatgagtttccgagaccagatccgccccgaaagcctagaggccatcgaaagcctgaagtgcatggggctcaagccggtaatgctgaccggagatcagttggaggcagcagaacccctcgctcgtcaggcaggcctggacgaggtgaaagcagggctgcttccccagcataaagtcagcatactcgaacaataccaggcagagggacaccaggttggaatggtcggtgacggaatcaacgatgccccggccttggccgttgcggatgtagggattgggatgggttccggaaccgatgtcgcgctggaaaccgcggacgtcgtcttgatgaaaaacaacctagctcatcttgctgatgccttccgtctcagtcgtgctaccctgagtaacatcaggcagaatcttttctgggcttttgcctacaatgtgctaggaattccggtggcagcaggagtgctggttcctttcggaggccctgccctccatccggtacttgctgcggcagcaatggcgctcagttccgtttcggtcgtggccaatgccctccgtctgcgcagtttccgtttcttgaaataa

SEQ ID NO: 275109 - DNA, 170 bp, Unknown
  Bacterial polypeptide expressing nucleotide sequence isolated from the Sargasso Sea
tgcatttatatataatacgttgggcgtaccgatcgcagcgggtgtgctttatcccttcatgggcatcttgctttcaccgataatcgccgcaggagcgatgagcctatcatcggtatcagtcgtcggaaacgctcttcgtcttaaatatgttcaactcagcggaaagtagg

SEQ ID NO: 275110 - DNA, 857 bp, Unknown
  Bacterial polypeptide expressing nucleotide sequence isolated from the Sargasso Sea
attgggagaattattagaacttcaacctgaaatggcaaatatctacacagaagacaatcaaataaagtcaataagagtgaatactttaagacctgatcaagagattcaagttttagcaggagacagagtacctgctgactgcattgttacccgaggtaattcatatgttgatgtttcacatatcactggagaatccaaacctatcgaagtaaaagaaggccaaaatctatctagtgggtctttaaatcttaattcaactcttagattaaaagtacaaaaggtaggaggagattcttctctcgcaaaactagtaaatcttattgagtctgtaaacgctagaaaacctcgcattcaaagcattgctgatgaaattgcagggaaatttacttactttgtacttatttttgctactttaaccttcttcttttggtggaagggggcaagaaacatatggcctgatttattaagtcacaatcatgaattaatcactcaatcaagtcatacacttcatagttcgcttgggagtaatgctgagaattttcttagtttagcaattcaattgtcaattgcagttttagtgatagcttgtccttgtgcattaggtttagccaccccaactgtcatcactgtcgcatccggtaaagcagcaaaaaaaggggttttatttaaaggcggggacaaaatagagatggcttcaaaaattaatcacataatttttgacaagacaggtactttaacaaaaggtcagcctttcattgttgattacaaaaataatgatgatcattcatttttattaaaaatagctgccagtttagaaaaggaaagcagacatccaatcgcagatgccttgattaacg

SEQ ID NO: 275111 - DNA, 612 bp, Unknown
  Bacterial polypeptide expressing nucleotide sequence isolated from the Sargasso Sea
tttgaagccgcagcagttattacggtgcttgttctgctgggacaggttcttgagctgcgggcacgggaacaaacctcaggcgccattactgcgcttctgaaccttgcccccaaaaccgccagacggctggatcatgacggtcatgaaacggatattaatgcggaagatgtcctgcctggcgataagctccgcatcagacctggagagagtattccggtcgacggtatcgtgatcgaaggcaaaacaaccgttgatgaatcgatggtgaccggggagtctatgccggttatcaaaacgaagagtgaccctgtcattggggggacgattaatcagacaggtagtcttatcatccgtgcagagaaagtcggtgatgaaacgatgctctcacgaattgttcagatggtcgctgatgcacagcgttcgcgtgcccccatccagagaatggctgacagcgtttcaggctggtttgttcctctggtgatacttatcgcggttgttgctttcgtgatctggtctgtctgggggcccgagcccaggatggcgcacggtctgattgcggctgtgtcggtcctgattattgcctgcccctgtgcactggggctggccacaccg

SEQ ID NO: 275112 - DNA, 760 bp, Unknown
  Bacterial polypeptide expressing nucleotide sequence isolated from the Sargasso Sea
tttaaaaaaataaaaaatctggatttcaatatggatactttaatctcgcttggaagtttgagttccttgttaatttctctgttaccggctgatcttgtttcgtcggtaagttctgcgtcaggggaaaataaaatgtttcttgatactggagcttttatagtttcttttttactcattggtaaagcagttgaagacagggtaatagaagaatctgtgaaaacatctgagtcaataaaaagccggatgccaaaaaccttaatagtaaacagaaatctagacagaatcgaaatacccacaaaagacattcaagaaaaagatcgtttcaatgtaatggttggtgaaattattccagttgatggagaaattattgaaggtgaaacttctgttgatgaaagccttcttactggcgagtctgtccctttattgaaggaaaaaggagatcaggttgtcggaggaagcattaatttacaaggaaatatacaaattcaagtaaaagaatcataccaaaaatcaacctacaacattatcgaagacttaatcagaaatgcacaagggactaagccagatattcaaaaatcactcgacacaattacacagtattttgtaccggttgtcttattaattagtttcagcacttttgcctttaagtatctaattcaaaatgtcatcctgatagacgccttaaaaaattcaatagctgtattagtaattgcatgtccatgtgcactggggttagcaactccagatagtactatttaaa

SEQ ID NO: 275113 - DNA, 861 bp, Unknown
  Bacterial polypeptide expressing nucleotide sequence isolated from the Sargasso Sea
tgtcgcaggccgtttctgctacggcgtgatcgccttggctgtcaccacgtttttgttctggtggttgttcggcgctgaacactggcctgaggttctgcaggcatcagcgcctgggatgcccatgacccatgagatgtcccatgggatggaccatggccatgggatgcatcacggcggcttgggcagtggagccagcactccgatgggtctggccctgcaactgtcaatcgccgtgctggtggtcgcctgcccctgtgctctcggtctggcgacccccaccgtgatcacagtggccactggcctggcggcacggcgcggctggctgttccgcggtggtgatgtgatcgaaactgccgctggtttggagcatgtggtcttcgacaagaccggcaccctcaccttgggtcgccccctcgtgaccgatgtgtacggggatgacccggatcacttgttgcagcttgcggccagcctggagcaaagcagccgccatcccttggcctatgcattgctgcaggaggcccagcgccgggaactcgctctgcgggagtgcgaggacgttcgcaccgtttccggccagggtctggagggccatgtggacggtgcatcggctcgggtgcgtgttggcaagctcgactggctggtggggcagggtgttgccatcgcccccgccgcccaggactggctttccgctgctgaaggctcggtggtggctgtggctgtgggatctgtcctagtgggcctggtgcagatcgaggatcagctgcgcccggaagtggctccggcgctgcaacgcctgcgctctcacgggctgtcgctttcggtgttcagtggtgatcggcaggctgccgttcagcgccttgg

SEQ ID NO: 275114 - DNA, 721 bp, Unknown
  Bacterial polypeptide expressing nucleotide sequence isolated from the Sargasso Sea
aaaggtcgaaggcaagactatcctgctgggcaatgcggcctatctgaaatcgttaggtgtccagacacaaacgttggagccacaagccgaaaacctgcgcggtgaaggtgcaaccgttatcaatatcgcactcgatggaaagttggtgggactctttgcaatcgccgatccagtgaagcaatcgacgcctgacgccttgaaggcgctggcggcagaaggcatcaaggtcattatgctgaccggcgacaatagaaccacggcaaatgcggtcgcgaaacggctcggcatctccgatgtggaggcagaagtgcttccggaccagaagagcgccgtcgtcagcaagttgcagaaggcggggcggatcgttgcaatggccggagatggcgtcaacgacgcccctgccttggcgacctcggacgttggaatcgcgatgggcaccgggaccgacgtcgcgatggaaagcgcgggagtcactcttctcaagggcgacttgatgggaatcgttcgtgcccgccgtctctccgaagcgacgatgagcaacatccggcagaacctgttcttcgcgttcatctataacgctgccggcattccgatcgcggccggtgtgctctatccgacgttcggattgctgctgtcacccatcatcgctgcagcggcgatggcgctatcttcagtcagcgtcgtgggcaatgcgctacgattgaagactgtgaacttgtga

SEQ ID NO: 275115 - DNA, 116 bp, Unknown
  Bacterial polypeptide expressing nucleotide sequence isolated from the Sargasso Sea
gccgttcaccggcacgctgctcaacccggtagtagccggggcggagatggcgctttcttccatcaccgtggtgagcaacgcgaaccgagtgctgcgcttcaaacctaaagagtaac

SEQ ID NO: 275116 - DNA, 859 bp, Unknown
  Bacterial polypeptide expressing nucleotide sequence isolated from the Sargasso Sea
ccttaccgacgaaggagaaacaccagttgccctggaactgcttcatcccggagaccggatccgggtccgtcccggtgaaacccttcctgcggatggtctgatggaagagggagtctctgaagtcgatgaatcgatgcttaccggggaaagtgtgcccaggtcctgctcgacaggagatgaagtcaccggtggaacccgctgcatcaacgggatgcttaccctgcggatcaagcgaatcggggaagaatcaaccctggctaaaatcatccgcatggttgaagaggctcagtccggcaaggctcctttggccaggatggcagatcgggtggcaggagtgttcgttcctatagtacaattactggccttgctgacggcactgagttggtggttttacggtgcaggaacggaaaccgtcctgactcggatggtggcagtattggtcattgcctgcccctgtgctctcggacttgcaacgccgattgccattctggttggaaccggaagcggtgcgcgacatgggatcctgttccgtaatgctgcggctcttgaagcccttcaaggtctggataccctgatgtttgataaaacaggaactctgaccctcggtcagcctgttcttgaatcaatcaaaacctggaacggctggaacgagtctgaagtcctcagactgtcggcctccgcggaaatcggttcggaacatcctttcggaaaagcaatcgtagagtcggcaaaatctcaaaatttggagatttcacaacctgagtctttcgaggccttgagcggttccggtatcatagctgtggtggaaaaccgtccactcgccatcggtcgtcaggagttcatcctgaaacaaagtaaa

SEQ ID NO: 275117 - DNA, 816 bp, Unknown
  Bacterial polypeptide expressing nucleotide sequence isolated from the Sargasso Sea
ctcacgggcgagtgggaacccgtcgccaagaacccgggggacacggtcgtgggcggcagcatcaacaccaccggcgtcttccaggtccgcgcctcgcgcgtgggctcggacaccaccctcgcacagatcgtgcggctggtggaggaagcgcagaccaacaaggccccggtgcaagagttcgcggacaaggtctccgcggtgttcgtgcccttcgtcgtgagctgcgcggtgatcgtcttcctgtcgtggctcggcgccgcggagatgggctggaccccggccgagtggaccgcatcgcacggcccgctgttcttctcgctgatgtttggcgtgagcgtcgtcgtcatcgcctgcccatgcgcgctgggcctcgccaccccgacggcagtcatggtcgggacgggtgtcggcgcgtcgatgggcatcctgatcaagggcggccgagcgctggaagtggggcaccacatcacggcggtgtgcttcgacaagacggggacgctcacgctgggcaagcccagctgcatgcacatctctgcgctcagcacggtcgcaggggcgcagcagcagctactgcagctgctgatcgccgccgagaaaggctcggagcacccgatcgcgaaagcgctcgtggactacgcggaggaacagcttgccgggcaggtgtccgtgggcggcgaagtgcttgcgattgatgcgggcgacggcgagtccgtggaggtgagcgtcactcttgcggttgaagggatgatgtgcggcaactgcgaggctaaagtgcgcggagccctggaggaggttgcgggtgttcgatctgcgtcg

SEQ ID NO: 275118 - DNA, 781 bp, Unknown
  Bacterial polypeptide expressing nucleotide sequence isolated from the Sargasso Sea
gtccaaaataataaacctcctattcaaagaattgcagatcaaattgcaggtaaatttacatacttggtactcttaatagcaacttcaagcttctttttttggtggaaaggcgcaaaacgaatttggccagatttattgatgaatgatcatcatggattaataacctcatccaaccatacacttcataattctttaggcagtaatgctgaaaattttttaagtttagccattcaactctcaattgctgttttagtaatagcctgtccttgtgctctgggtcttgcaactcctactgtaatcactgttgcttcagggaaagcggcaaaaaaaggagttttatttaaaggaggtgacaaaatagaaatggcatcaaaaattaatcatattatttttgataaaacaggaacattaacaaaaggggagccttttatcattgactatataaataataatgataatttacatctattaaagatatctgcaagtctagaaagtcaaagcagacatccaatagctagtgcattagttaaagaagccaaaaaacaaaatcttaatttactaccaatcaaaagaattcatacagaaactggtagaggtatttcaggcgatcttgagtcaattgatggagtaatcaatattggaagcgttgaatggttgaccagcaaaggagtaattattgatagagaatcaaaaaaaacattagaaactgaagaatataaatcctattcggtaattggagtaagtatcaataattcattacttggatttattttattaggag

SEQ ID NO: 275119 - DNA, 2023 bp, Unknown
  Bacterial polypeptide expressing nucleotide sequence isolated from the Sargasso Sea
gctgccggacacgggcagtggctacttctgcccaatgtgccccgaagtcttctccgcatcaccaggctcgtgcccccagtgtggaatgcctctcgagacaataagcccgcagaatgcgataccgactgaagaaattacgctgcttggccttcgcgaatttctatacggaatcatactctctgcccccatcctgctcttggcaatggcaccaatgtttgggctatcagttgaggcttggatcgacccacacataaatcagtttctgcaactcattctcacaagtcttgtcatcgcgacatgcggccgttcgatcgtttcccgtggtattcgtagcatcgctacaggcaatctcaacatgtttacgctgattactatcggcgtcagtgctgcctatggattcagccttctagctacgcttctacctaccttttttcctgattcatttcggaatccaaaaactggcttagtgcatactttctttgacgcagcggcaatgattattgtacttgtccatctaggacaagcactagagagccaagcacgatcaaaaactggtgctgagcttcgatcactcgtgtcacttgctccaatgactgcgcgagtcgtactcgaaaatggtgaacatgatgtaccactgagtaccgttcatccgggagaccacctacgagttcggccaggtgagactattcctgtcgacggaacactctttgacggggcaagccatgtggatgaatccttgttaacaggcgagccatcacccgtagaaaagaaaaaaggtgacgaggtcattgcaggaacaaaaaatggtagaggtagcttcattctccttgcagaaaaaactggttctgaaaccctcttatcgcgaatcattacactcgttggttcagcccaaagaagcaaagcacctatacaaagaatggctgatagcgtggccagcatattcacaccaattgtgctggccattgcactcgggacattcaccggatggtttttcctgggccctcagcctcgtctcgcacatgcgatcgtctcaagtgtttcagttttggtgattgcatgcccatgcgccatcggcctggcgacaccaatgtcaattattgtcggtattggtcgcgcagccagcgaaggtgtcctgttcaaagacgccgaatctcttgaggcacttgggcaaagcaagagcctcatgattgataaaaccggaacaatcacagaagggcagccaactgttactgaaatcgtattattcgacaataaatctgaagaagagattctgctgctggcaaccgcagttgaacttggcagtgaacatccacttgccactgcaatctgccaagcagctcgtgaacgaaatcttgaggtactcagcaatgctgacacgtttctctcgacgcccggatctggtgtacagggaactgtagcgggtaagaccattgcccttggtaatgaagcctttctcgaacaacagaacgtacccgcaagtgaactgaatgaatttcgaagggcggcagatcctttacgggcaagcgggaaaacaatcaccggggtagtggtcaattcgcacgtggccggcctattcgccgttacggaccctgtaaaacaatctgcctacacagcaattgggcagctaaagcaattaggacttcaaatcacaatgctgaccggagaccattccgataatgctggcgttattgcacggtcagtcggcattgagcactacgaggccggacttactccacaggagaaatatcagttcgttactgaaaagcattccaaaggtgagcagaccataatggttggtgatggagtgaatgatgccccggctcttgctgctgccacgattggcgtcgccatgggaacaggaagcgatgtggctatcgagactgcgaacgttactcttatgcgaggcgatctccaggcgcttccgtactccattcaattaagccgcttagttttgttgaacatccgacaaaatctatttcttgcatttttttataatgcactaagtatcccactcgcagcaggt

SEQ ID NO: 275120 - DNA, 2044 bp, Unknown
  Bacterial polypeptide expressing nucleotide sequence isolated from the Sargasso Sea
ttgtcagctgagacaaaaacgttagttttatctgttgaaggaatgacctgtgcagcatgtgctgcaagaatagagagggttctaacaaaagaaaaatctgtcaaagatgtagttgtaaactttcccctaaaaaaagcaatcttagaagttaaccccgaagataataattcggatgaatatattcaaagaattagatcaattggatattcagcacaagaagaaatagctgaggagaaaaaaagtaatactagaaaatttcttactccgtttctttctctaatacttacacttagtatcaacccactcattggggctgatcaagatctcgccgcattaggagtaggttcactaataatttttgtttttggtagaaaatttcacgtatctgctttaaaaaatataaaaaaacttaatttcaatatggatacattaatctctattggtagtctctcctctttcgccattggaattttgccaaataatggagaattaatgtacttagaaacaggaggattcataattagcttcattctccttggtaagactatagaagatatttcaattaagtcatctgtttcagtatcagactccataatcgaaagtattcccaaagatgtaaatgtttacgaaaatcaaataactgttcgcaagcctttaaatcagattgaaattggtgatgtaatcatagttaagaaaggcgaaatcattcctcttgatggtgtaatcatacgtggtagttctgaagttgatgaaagcgtaatctctggtgaatccgaacctcttacaaaaaaagagggtgatgaaattgtatctggttcaattaatcttggtgatgatattgaagttgaagtagtaaaaaaagagggagagacaactttaaaccatattgaaaaattaattttgaaagcccagacaagtaagcctgaagttcaagatctcgtagataaaataacaaatatctttgttccttctattttgattttaagttttgcaaacatgatatttaaattatttgtattagaaaatgatttttcagagacaatcagttcaacaattgcaattcttgttgttgcctgcccttgtgctctaggacttgcaactcctatcgtattatttaggactgcctcagtttcaaatcgtaatggttttatttttaaaaattttgactatcttcaaagattcaaaaatttagacacaatagtttttgataaaactggaactcttacttctggtattttcaaaatagaaagcatctcagattcaaaaggtaaaattgttgatgatgaagtattgagagtgcttgcgtctgttgaacaaaaatcaaaccatcctattgctaaaagcatacttttggaatcggaaataaaaaatttgagtctgttccctgtagataattttattgaaacaccaggaattggtgttagtggagttgttgaaaacaaaaaagtttctgtttttaggtcgaaagatgatttaaaaggggatcttgaattaataattgataatgaggaatttaaggtaaagctagtagaagataaaactgtaaataaagatatcattaaagatctttcaaaagattatgaaattgaaattttatcaggagacaaaactgaaaaagtccaagaaattggaaatgatttaaatatcaaaaatgtgttaggcaatcagtccccagaagataaattaaaatatattcaagaaaaacagatggataaaacggtaggtttcattggcgatggaattaatgattcacctgcacttaaacaagcaaatgtaagtttatccttttctcaaagcacacaaatcgcgcaaagtgttagcgacattattatttttaaagggggccttgaaatattaaacaaaatttttaatatttcaaaaaattcaaataaaagaattattcaaaatttattttttgcctttatatataacataatcatgattccaattgctgtaagtgggagtattgttccaagtatggctgctttagctatggctttatcaagtttatctgtagttttaaactcatccagaaaactctaat

SEQ ID NO: 275121 - DNA, 2299 bp, Unknown
  Bacterial polypeptide expressing nucleotide sequence isolated from the Sargasso Sea
tatggaaagcattcaattaaatatttcaggaatgaagtgcggaggttgtgttagtactgttgaaaaaatattaaataattctgatggtattgaaaatgtttctgttaacttactcactgaaagtgcatattttgaaattactcagaaacatatagagatagaagcagttctcaaaaatctaaaagaaaatggtttcccatcaaagatttacataaatgatttttcaaaaaaaataaacaaggcagaattagaaaaaaaaaagaagtggaataatcaatggaaaaaactaacttttgctttattacttttattattttcaggtttaggtcatctagcagaaggaagatatataaattttccgatattaggtaatatattttttcacgcttcattagcaacattagctcttttatttcctggcagaggaataattattaatgggtttaaatcatttattaagaaccgtcctgatatggattctctagtagctcttggagtaacaagcgcatatataacaagtcttctatccttaatatttcctgctactggttttccttgtttttttaatgaaccagtgatgctgttaggcttcatattgattgggcgtttcttagaggaaagagcaagataccaaactggttcatccattggagagttattagatcttcaacctgaaatggcaaatatctacacagaagataatcaaataaaatcaataagagtaaacactttaagaccaaatcaagagattcaagttttagctggagacagagtacctgctgactgcattgttactcaaggtaattcatatattgatgtttcacatatcactggagaatccaaacctatcgaggtaaaagaaggcgaaaatctatctagtgggtctttaaatcttaattcaactcttagacttaaagtacaaaatgttggaggggattcttctcttgcaaaacttgtaaatcttattgagtctgtaaatgctagaaaacctcgcattcaaagaattgccgatgaaattgcaggcaaatttacttactttgtgcttatttttgctactttaactttcttcttttggtggaagggggcaagaaacatttggccagatttattaagtcataattatcaattaatcactcactcaagccatacacttcatagttcgcttggtagtaatgctgagaattttcttagtttagccatacaattgtcaattgctgttttagtaatagcttgtccttgtgcattaggattagccaccccaacagtaataactgtcgcatcaggtaaagcagcaaaaaagggcgttttatttaaaggcggtgacaaaatagagatggcttcaaaaattaatcaaattatttttgataagacaggcactttaacaaaaggtaagcctttcattgttgattataaaaattgtgatgatcattcatttttattaaaaatagctgccagtttagaaaaggaaagcagacatccaatcgcagatgccttaattcaagaggcaaaaaagcaaaatttaagtttatttcaaataaagaaaatttttactcattctgggcgaggtatttctggagaacttgaatcaattgatggacttattaatattggaaatattgaatggctactaagcaaaggaataattattgatagtgaggcaaaaaaaatcattgaaaatgaagaaacaaaaacgaacactatcattggagtaagtatcaaagataagttattgggctttattttgctaggagatttactcagagaagattcaattaaaacagttcaaaatttgagagaaaacaaatttaaaattaacattttaagtggcgataggaaacaaacggttttagctttagcaaaaaaaattggttgtaaagaaacagaagtaaaatgggatcttcttcctgaaatgaagctaaagaatatagaaaatttaaaaattaataacaaagtggcaatgattggtgatggtattaatgatgtcccagccttagcatcctcagacttaggaattgcggtaggatctggtactcaaatagccaaggcaaatgcagatgtagtattaatgggagatcaactaaatggattaccctacgccttgaatcttgcaaaaaaaactataagaaaaataaagcaaaatctaacatgggcttttggttacaacttattagctatacctttagccgccggcattttattccctaaatacggtattcttcttactccctcattagcagcattattgatggctattagctctattacagttgtaattaatgctttatctttggataaatga

SEQ ID NO: 275122 - DNA, 1410 bp, Unknown
  Bacterial polypeptide expressing nucleotide sequence isolated from the Sargasso Sea
tctggcagaaggaaaatatattaattttccaatattaggtaatatattttttcacgcttcattagcaacattagctctattatttcctggcagagaaataatttttaatggatttaagtcatttattaagaaccatccggatatggattctttagtggctattggagtaatcagtgcatatacaacaagtcttctatctttaatatttcctgccactggttttccttgtttttttaatgagccagttatgttattaggcttcatcctaattgggcgttttttagaagaaagagcaagatatcaaactggttcatccattggtgcgttattagatcttcaacctgaaatggcaaatatctatacagaggataatcaaataaagtcagtaagagtaagcactttaagacctgatcaagagattcaagttttagcaggagacagagtacctgctgactgcattgttacccgaggtaattcatatgtagatgtttcacatattactggagaatccaaacctatagaagtaaaagaaggcgaatatctatctagtgggtctttaaatcttaattcaactcttagacttaaagtacaaaaagtcggaagagattcttctctagcaaaactagtaaatcttattgagtctgtaaactctagaaaacctaaaattcaaagaattgctgataatgtagcaggcaaatttacttaccttgtacttatttttgctactttaactttcttcttttggtggaagggggcaaaaaacatatggcctaatttattaagtcatgataatgaattcatgactcacgcaagccatacacttcataattctcttggtagtaatgctgagaattttctgagtttagcaattcaattgtcaattgctgttttagtgatagcttgtccttgcgcattaggattagccaccccaactgtaatcactgtcgcatcaggtaaagcggcaaaaaaaggggttttatttaaaggcggggacaaaatagagatggcatcaaaaattaatcacataatttttgacaaaactggtactttaacaaaaggcaagcctttcatagttgattataaaaataatgatgaccattcatttttattaagaatagctgccagtttagaaaaggaaagcagacatccaattgcgaatgccttaattcaagaggcaaaaaagcaaaatttaagtttatttccaataaaaaaaattttcacttattcaggtcaaggtatttctggagaacttgagtcaattgatggacttattaatattggaaatattgaatggctacaaaaaagaagaataattattgatagtgatgcaaaaaaagtcattgaaaatgaagaaacaaaaacaaacactatcattggagtaagtatcaaagataagttattaggctttat

SEQ ID NO: 275123 - DNA, 1616 bp, Unknown
  Bacterial polypeptide expressing nucleotide sequence isolated from the Sargasso Sea
tttactattttcaggtttaggtcatcttgcagaaggaagatatataaattttccaatattaggtaatatattttttcacgccttattagcaacagtagctttactattgcctggaagaggaataattattaatggatttaaatcatttataaagaaccacccggatatggattctttagtagctcttggagtaactagcgcctacataacaagtcttctatccttaatattccctgcgactggttttccttgtttttttaatgaaccagttatgctattaggatttattctgattgggcgtttcttagaagaaagagctagatatcaaactggttcatccattggagagttattagatcttcaacctgaaatggcaaatatctacacagaagataatcaaataaagtctataagagtaaacactctaaaaccttatcaagagattcaagttttagcaggagacagagtacctgctgactgcattgttacccagggtaattcatatgttgatgtgtcacatataactggagaatcgaaacctatagaagtaaaagaaggcgacaatttatccagtggatctttaaatctaaattcaactcttagactaaaagtgcaaaaggtcggaggagattcttctcttgcaaaactagtaagtcttattgagtctgtaaacgctaataagcctcctattcaaagaattgctgataatattgcaggcaaatttacatactttgtactaatatttgcgactttaagtttctttttttggtggaagggggcaaaacaaatttggcctgatttattaaatcataatcatcatcaattcataacaaactcaagccacacacttcatagttcgcttggtagtaatgctgaaaatttcttgagtttagcaattcaattgtcaattgctgttttagtcatagcttgtccttgtgcactaggtttagctacaccaacagtaatcactgtcgcatcaggtaaagccgccaaaaaaggggttttatttaaaggaggtgacaaaatagagatggcttcaaaaattaatcatattatttttgataagacaggtaccttaacaaaaggaaagccttttattgttgactataaaaataataatgatcataaattcttattaagattagctgccagtctagaaaaggaaagcagacatccaattgccaatgcgttaattcaagaggcccaaaaacaaaacttaattttatttccaattaaaaaaattttcaccgaatcaggtagaggaatttctggagaacttgattcgattgatggacttatcaatattggaaatgttgaatggctacagagcaaaggaataattattgatagtaatgctaaaaaggtcattgaaaatgaagagacgcaaacgaatacactcattggagtgagtattaaaaataagttatttggctttattttgttaggggatttactcagggaggattccattaaaacagttcaaaatttgagagaaaacaaatttaaaattaatattttaagtggagatagaaaacaaacagttttagctttagcaaaaaaaattggttgtaaagaaacggaagtgaaatgggatcttctgcctcacatgaaactta

SEQ ID NO: 275124 - DNA, 634 bp, Unknown
  Bacterial polypeptide expressing nucleotide sequence isolated from the Sargasso Sea
atgaagggaaaggagtcaagtattccaatcaatcttgttcattctggggatattttgaggatacgtccgggaagcatcatcccagttgatggagtaattgtggcgggttcaagttatgtggatgagtcaatgctaataggtgaagcagtaccagttaaaaaaataatcggttcagaagtcacaggaggaacaactaacaccaatggagtgatggatattagagtaatacgtgtaggtcaacaaacaattttgtcaggtattatccgtatggtggaaaattctcagttggcaaaagctccggtttcgcgaatgacagataaggtatcaggagtatttgtaccctttgtacttattattgctgcattttcaggaattatatggtggttatctggcgctgaaactaatgtagttttaagatatacaattgccgtgcttgtaattgcgtgcccttgcgcacttggtttggctactcctattacaatactagttggaaccggaatcggtgctagaaatggtattctgttcaggagtgcagttgctctggaagcagcctacaatctggacacaatttttatggacaaaacaggtacattaactgagggtagtccaaaaagttacaaaggtattggctaat

SEQ ID NO: 275125 - DNA, 1372 bp, Unknown
  Bacterial polypeptide expressing nucleotide sequence isolated from the Sargasso Sea
ctgctgctgctgtcggtgttcggtcacttcagcgaagccggtcatctgtccttgcccctggtcggcagcctgccgttccatgccggtctggccacggtggccctgctgggccccggtcgaccgattctccggggtgggtttgccgcggcccgagtgggtgcccccagcatggacaccctggtgggtctgggggtgggcagcgcctacacggcgagccttgtggccctgatctggccccaggtcggctggccctgttttttcaacgagccggtgatgctgctgggttttgtgttgctgggtcgctttctggaggagcgggcccgtttccgcaccggccaggccctgcaccagttggcccagctgcaacccgatacggcccgcctggtgctgccggatggcgccatccgggaggtgcgcgtcggagcactgcgccccggtgagcggctgcagctgctggcgggggaccgtgtgcctgtggatggtgtggtggtggaggggcattcagcggtggatgcctccagcctcaccggtgaaccgttgccctggcaggccgagcctggccttgagctgtccgccggcagtctcaacctcgatgctccactcgtgctggaggtcacccgggttgggtcggaaacggccttggctcgcatcattcgcctggtggagcaggcccaggcgcgacgggctccgatccaggggctggcggatcgggtggccggacgcttctgttatggcgtgatcgctctggccctggccacctttctgttctggtggttgttcggtgccgatcattggccccaggtgctgcaggcctcagcgccaggcatgccccagggacatccgatgtccagcagccatgccatgcaccatggcggcctcggcagtggcgccacctctccggttggtctggcgttgcagctgtcgatcgcggtgctggtggtggcctgcccctgcgccctcggcttggcgacccccaccgtgatcacggtggccaccggtcttgccgcacaacggggatggctgtttcgcggcggtgatgtgattgaaaccgccgccagccttgatcgtgtggtgttcgacaagaccggcaccctcaccctcggtcgccccctggtgaccgatgtttggggcgaggatccgtctcaggtgctgcagctttccgccagcctcgagcagagcagtcggcatcccctggcccatgccctgctgcaggaggcgcagcgtcgggagttgaccctgttggagccagcgcaggtcaccaccgtgtccggacaggggctggtcggtgagctggcgggttggcctgagccgatccgggtgggccgtcccgactggctggagtccttcgatgtcgccgtcagcgatgaggaca

SEQ ID NO: 275126 - DNA, 2044 bp, Unknown
  Bacterial polypeptide expressing nucleotide sequence isolated from the Sargasso Sea
gttgtcagctgatacaaagacactcattctatctgtcgaaggaatgacctgtgcagcttgtgccgcaaggattgaaagagttttaaataaagaagaatctgttgaggatgtagttgttaactttcccttaaaaaaagccgtaatcgaattaaatactgaaaatgtaaattccgagaattatattgaaaaaattagatcagttggatactcagctcaagaagaaatacaagttgcagatagtaaaaattttaaaagattttttattccaataatttcacttctgtcaactcttgctctcagcccacttatagaagctaatcaagatttcatagcattaggaattagctcaataataatatttatttttggaagaacatttcacttatcagcattaaagagtattaggaatctaaattttaatatggatacattgatctctattgggagcttgtcttcttttgttattggcatcttgcctaataatggagaactgatgtatcttgagactggtggtttcattataagctttttacttataggaaaaacgatagaggatatttctataaagtcatcgatctctgtatctgattcaattattgaaagtatcccaaaagatgtgaatgtttatgacgataaaaaaatcatacgtagacctcttagcgaaatatctgtaaatcaggtaatcattgttaagaagggagaaattattcctcttgatggtgagattgattatggtcattctgaagttgatgaaagtattatttccggagaagcagaaccaattttaaaaaaacaaggagatacggttgtatcaggttctgtcaatcttggaaatgatattgaagttaaagtaacaaaaaaagatggcgaaacaacaataaattatatagaaaaattaattttaaaagcacaaactacaaaacctgacgttcaagaactcgtaaataagataacaaatatttttgtaccttcaattttgcttttaagctttataaattttttgactaaattttatatttttggaaatgatttttcagaaacaattagttcgacaattgcaatcttagtaattgcatgtccttgtgctcttggtcttgcaactccgattgtgttatttcgtactgcatctatttccaataaaaatggattcatttttaaaaattttgactatcttcaaaaatttaccaagctggatacactaatatttgataagactggaactttaacgtctggtatttttaaaatcgaaaaaattacaaatgagaatagcttagttgtcgatgatgaaattataaggatactggcgtctgttgaacagaaatcaaaccaccctattgctaaaagtatccttttggagtcagaaataaaaaacttaaaactctcacctgttgatgaatttaatgaaattcccggtaaaggtgttacgggaattgtagataataagattgtggaagttgaaaaatcaaataaagatctagatagtgatttgattttaaagattgacgctaaggagtatctaattactttggttgaagataaaactttaaataaagatgttattgaaaatctttcaaatgagtatgaaattgaaattttatctggagataagcccgagaaagttaaaaaaattggagaggacttacaaatagatgttgcccttggaaatcagtcaccagaagagaaattagaatatataaagaacaaacagaaagataaaactgttggctttataggtgatgggattaatgactctcctgcgctggaacaagctaatgtaagtttgacatttgctcagagtacacaaattgcacaaagtgttagcgatataattatttttagaggaggctttgaaaagttaaactcaatattcaaaatttcaaaaaacgcaaatagaagaattagtgagaatttgtttttagcttttatttacaacataattatgatccctattgcagttacagggaatattgtcccaagtatggcagcattagctatggccctgtcaagtttgtccgttgtaataaattcatcgagaaaactttaa

SEQ ID NO: 275127 - DNA, 1057 bp, Unknown
  Bacterial polypeptide expressing nucleotide sequence isolated from the Sargasso Sea
catatcggtgctggttgcaacctgcccttgcgcattagggttggctacgccatcagcgttaacctgtgctatggcaaagttaaacagacaaggtattttactaaaacgcgccgatgcgctagaacaaattactgacattgacaccatcgcattagacaaaaccggcacgctcacaaaaggcaaatttactatttcaaatgcctggtacgctgacggtgtggatagtaatagtgcgctatcaattgcgcgcgctttggagtcacgctctgaacacccgattgccaaagcttttagcgagatttctgcctctagcggcagtgctgacgccatcgataacacggtacacaaagtgactaattttaccgttacgccaggaggtggtatcagcggtgagatcaatgacacgttgttttctatgggatctgcagcattcagcgttcacgaatcacagctaaaactcattgaagcgttcccttcagctaacgtgtttctcacggttaaggggcgtattatggcggcgtatgaagtaaaggattcactaagagaagatacgcaagaaactctcgatatattagctgcaagccataccctcgccgttttaagtggtgatacacagcaaaacgttaatgcgcttaccgcaccattgccaatttcgaccgctaaaggtggcctaacacctgagcaaaagtacgaagccgttcaagctatgcagcaatctggcgcgaaagtgatgatgatgggtgacggtattaacgacgctccagttcttgccagcgctgatgtggcaattgcagtgggtaatgccacagacgtggctaaaactgccgccgacgtgatactgcttggcgatcagctgctttctgtaccagagcttattcgaactgcgcaccaagtgaagcaaaaaataaggcaaaatattggctggtcggtaggttacaacgttttgatcttacctttcgccgtatcaggcctactttcaccgtggatggctgttgttggtatgtcgttaagcagtatcattgtggtcacaaactcaacgcgacttttgagcaaatag

SEQ ID NO: 275128 - DNA, 1039 bp, Unknown
  Bacterial polypeptide expressing nucleotide sequence isolated from the Sargasso Sea
gtagaagagcgcgcgaaactgcaggcaacgagcgacatgtcttcacttttgaatctggtgccggatacggcgcgtttggtatcctcttcgacgccctctacggggggtagcgaccccttctatcgaactgttccgacttctgtgatcgagactagggataaaatcgtcgttttgcctggagatcgcattccaatcgacgggaaggtggtgagtggttgcagcacggtggacgaagccgccatcacaggtgaacccataccgcgaccgaaatcagcaggcgacgccgtttccgcaggcactgtcaactgcgatggtgtactcaccattgaagtcgtcgcatcgggtcaagagacgcaagtggcgggcattgttcgtatggtggaatctgcgcagcagcgagaagcaccagtgcaacgactcgctgatcaagtttctggcaagttcgtgtacggagtgatggcagccagcgcggcaaccttcactttctggagtacagtgggcacgaagctcttccccggtgttctcgcaacggcggcgacggcctcaaatgcacccatcttgatcgctcttcagatgactgcttcagttttagttgtcgcatgcccgtgcgctcttggattggcaactccaacagcggtgctcgtgggaacagcgctgggtgcccgccacgggttgctcattcgtggtggagacattttggagaaggcgaataatttggacaccgtcatctttgataagactggtacattaactatcgggaagccagttttgaaggaagcgcgagccacgggagggtacagcgaaactgaaatcatagctctcgctggtgcagtggagcgtaactgtcgacatccattagccttggctatcgccaccgccgccgacgagcaaggaacctccacgcgaaatgtggatgaaggtacttttaaacaagagccaggcgcgggcgcaagcgccatcgtgaacagaaagcgagtctctgttggtactaagttttacgtgcaaggcaacgagaacgttcctgccgagctagtgaata

SEQ ID NO: 275129 - DNA, 340 bp, Unknown
  Bacterial polypeptide expressing nucleotide sequence isolated from the Sargasso Sea
gggcgatggcatcaacgatgctccggctctggccgcggcggatctgggcattgccatcggcaccggcacccagatcgcccaggacaccgccggcatggtgttgatgggagatcgtctgaacaacctgccggaagcgttgaccctggcccgccgcaccttggccaaggtgcggcagaacctgttctgggccttcggttacaacctgatcgccctgccccttgccgccggtgccctgttgccgagtcagggggtgctcctgtccccgcccctggcggccttgctgatggccatcagttcgatcacggtggtgctcaatgccctgctgctgcgggtggcatga

SEQ ID NO: 275130 - DNA, 683 bp, Unknown
  Bacterial polypeptide expressing nucleotide sequence isolated from the Sargasso Sea
catgagcattcataaaaaccagctctccagcaatgctgaagcccgggttagcttacctattgagggtatgacctgtgcaagttgtgtaggacgagttgaagcagctttaaacaaagttgaaggcgtcgtaaacgcaagtgtcaatcttgcgactgagctggcggatattcatcttaaagctcctgttgatcgactgaagttaatcgaagcaattgaaaaggtaggatatgaagttcctgtaacatccgttgaactttcagtgcaaggtatgacatgtgcttcgtgtgttggccgtgttgaaaaggcactcttagcggttgatggtgtaaaggcggcaacggttaaccttgcaactgagagggcaactattcgcggagtggctggcatagacgatctcatatctgctattcaaaaagttggctatgaagcccgtgtcatcgatacccaaaatcaggtcagtaatgagtctgaagtaagaaaggacgcagagaaggctttattaaagaaagatttagttattgcaacagcactggctctgccggtatttgtttctcgaatgggatctcacatgattccaagaaatgcacactgggtgatgaataccatttgggatcccagaaagctggtacgtccagtttgtattgacatttgtagtcttagtggttccaggtcgtcgattctac

SEQ ID NO: 275131 - DNA, 789 bp, Unknown
  Bacterial polypeptide expressing nucleotide sequence isolated from the Sargasso Sea
ccgttgcggcattcacggccagcgccgcacgcgcggtgccggggcgcggcgtggaagccgacgtcgacggccgtacgctcgcgctcggcagcacgcgctggctcaacgaactcggcatcgtgttaccggcgccattcgccgagcgcgcaaaacaactcgaagccgctggcaacaccgtctcctggctgatgcagcgagcgccgctggcacccgccgcgctcgccctaatcgccttcggcgataccgtcaaaccgagcgcgcccgcggcagtcgaacggctcgcccaaatgggtatcaaaagcgtgctcatcaccggcgataaccaaggcagtgcggcaagcgtcgcccaggcgctcggcatcgccgaattccatgccgaagtcctgcccgacgacaaggcccgcgtgatccgcgacctgaagatccgcagcacgggcatcgtcgcgatggtgggcgacggcatcaacgacgcacccgcgctcgccgccgccgacatcggtatcgccatggcgaccggcaccgacgtcgccatgcaggcggccggcatcacgctgatgcgcggcgatccggcgctggtagccgacgccttcgacatttcgcggcgtacctggcggaagatccagcagaacctgttctgggcgttcgtctacaacctgatcggtattccgctggccgccttcggcctgctcaatccgatgttagccggtgcggcaatggcgttttcgagcgtcagcgtcgtcaccaatgcgctactgctgcgcacctggcgcggcgcgtcggcacggtaac

SEQ ID NO: 275132 - DNA, 375 bp, Unknown
  Bacterial polypeptide expressing nucleotide sequence isolated from the Sargasso Sea
ttcaatcagaaggttgcatcgttgcgatggcgggcgacggcatcaacgatgccccggcactggccaaggcgaatgtcggtatcgctatgggaaccgggacggacgtagcgatgaacagtgcgcaaatcaccttggtaaaaggagacctgcggggtatctcgattgcccgggacctgtcaaacaagactgttctcaatatgaagcagaaccttggttttgcgttcatttataatgcgttaggcgttccactggctgctggcgtcctgtacccgtttgccgggttgcttctatcacccatgtttgcagccctggcgatgagtctgagttcagcgtccgttgtattcaactcgctgcggcttcgtggttcggtttaag

SEQ ID NO: 275133 - DNA, 1027 bp, Unknown
  Bacterial polypeptide expressing nucleotide sequence isolated from the Sargasso Sea
attggcttgtcctttgcgcactggggattagcaacaccagcagctatcatggcgggcacaggttcagccgcgcgttcaggtattttgatcaaggatgcgatagcgctggagcacgcgaaggctgtgactttggtcgtatttgacaaaaccggcaccttaactcagggcaaagctgtgttgcagcaagtcagcaatctggctgatgaacctgatgcattactatgggctgcctcattgcagcaacacagcgaacatccgctggctaaagctgtagtgaattacgccacagcgcatcaggtggccgctttggaggtgactgagtttcaggtgatcgcaggtaaaggggtgcaaggcaaagtacaagggcacaacctgattcttggcagtagtcactggatgcagcagttgggcatagagttgccagtggatcagattaaaaccagtggcgcttccgtgtcctggttagctgagcaacaagctaacgacagctataagttagtcgcactgttttgttttaccgacgaattaaagcctgatgcagtgcaagctgtgaatttgttaaagcaacaagctattgctgtcgccatgctgacaggtgatagtaaacaaagtgcggcactcatagcgcagcagctggatttaactgactggaaggcagaggtgttaccggcagacaaagctgcggccattcagaactggcagcagcagggttatcgggtggctatggttggcgatggtattaatgatgccccagctttagcccaggcggatttaggtatagcgatggcgagtggtactgaagtggctgtcagtgcttcggctatgaccctaatgcgcagtaagccctctctggtgagtgcagcgttgcagatagcgcggctgagctaccgtaaaattcagcagaatttgttttgggcttttatttttaatgtgatcggtattcctttggctgctttgggttatttaaatccggttattgctggagctgctatggcgtgcagcagtttatttgtcattagcaatgcct

SEQ ID NO: 275134 - DNA, 909 bp, Unknown
  Bacterial polypeptide expressing nucleotide sequence isolated from the Sargasso Sea
tatggataccttaatcgtgctgggtaccagtacggcatgggcttattccatgctggtggtcatactgccaaatgtatttcctttggatactcgccatgtttactttgaggcgagtgtgatgattttaggtttgattaacctaggttacgcgctagagcttaaagcgcgtggcaaaaccagcgaggcggtgcagcgtttgctcgggcttcaatccaccactgcgattcgtatcggtgataagggcgatgagcaggttgagataagtcagttgaaactgggcgataaactgcgtttacgcccgggagacagagtggccctcgatggtattgttgaaatggggcaatcattgttagatgaagccatgctcacgggtgagcccattcccgtcgtgaaaaatatgggggataacctaagcgcggggacggttaacggtaatggcagtttggtgtatcgcgtgacggcagggccacaagatacgcggcttgcaaaaattattgcactggtgcaagaggcacaaacatcaaaattacccatagggcgattggccgataagatctctgcggtatttgttccaacagtggtggcgattgcgctgctagcggcggctatctggtactttgttgggcctgcgcccgccttaagtcatgcactcgtcgtgctcaccagcgtgttgattatcgcttgtccctgcgcgctggggttggcaacacctatgtccattatggtcgcggtagggcgagcggcacaaatgggcgtattagttaaaaacggtgaggcattacaaacggcgagcaaggttgattgcgtggtgctggataaaacgggcacagttaccttaggtaagccacaagtcactgatttcatgttagtgcaagcactaagtgatactgataaaggagccttactggg

SEQ ID NO: 275135 - DNA, 737 bp, Unknown
  Bacterial polypeptide expressing nucleotide sequence isolated from the Sargasso Sea
gcccccaaaaccgccagacggctggatcatgacggtcatgaaacggatattaatgcggaagatgtcctgccttgcgataagctccgcatcagacctggagagagtattccggtcgacggtatcgtgatcgaaggcaaaacaaccgttgatgaatcgatggtgaccggggagtctatgccggttaccaaaacgaagggtgaccctgtcattggggggacgattaatcagacaggtagtcttatcatccgtgcagagaaagtcggtgatgaaacgatgctctcacgaattgttcagatggtcgctgatgcacagcgttcgcgtgcccccatccagagaatggctgacagcgtttcaggctggtttgttcctctggtgatacttatcgcggttgttgctttcgtgatctggtctgtctgggggcccgagcccaggatggcgcacggtctgattgcggctgtgtcggtcctgattattgcctgcccctgcgcactggggctggccacaccgatgtcgataatggtgggggtaggcaaaggagcccagggcggggtgttaatcaggaatgccgaagcccttgagcgtcttgaaaaagtggacacgctggttgtcgacaaaacaggcacgctcacggaaggttcgcctacggtgacagggattatcagtctcaatccgggtggggaagcatctcttttacgtgtagcggccgcagtggaaaaaggctcgcagcatccgctggg

SEQ ID NO: 275136 - DNA, 793 bp, Unknown
  Bacterial polypeptide expressing nucleotide sequence isolated from the Sargasso Sea
cgttcagctggtctcgagggcccagcgctcgcgtgcgccgatccagaggctagccgatcgggtggcggagtggtttgtattcctggtcgttgccgtcgctgttcttgcattcggggtctgggcaatctgggggccgccgccggcattggggttcgccgtcgtggccgcggtctcggtcctgattatcgcctgtccgtgcgcgcttggcctggcgacaccgatgtcggtcatggtggcaaccggccgcggggcgggtgccggggtactggttagcgatgcggcagctctcgaggcgctggcgcgggtggatctgttgctcgtcgacaaaacgggcacgctgacggccggtcgcccggccgtcacggacatattcccggccgacggcagcgacaccgacgcagtgttggggctcgccgcagcgctggaacggggcagcgaacaccctctggccgaagcgatcctgaacgccgcggacgaccgcggcatcgatgtcccggttgccgcagagtttgaatcggcggctgggcagggtgttcgcggccgtgtggacggtcgtgcggttgcgctgggcaacccggccctgatggatcatctcgacgtctcgatcgcggcgcttgcggatcaggcggaggccgcgcgcgccgatggcgccacggcggtattcgtgtcgatcgacgggtcggtggccggtatgctggcgatttccgatccggtcaaggagacgacgccggacgcgcacgatgcattgcgcgcgcaggggatcgagattgtcatgatgacgggcgacaacccg

SEQ ID NO: 275137 - DNA, 672 bp, Unknown
  Bacterial polypeptide expressing nucleotide sequence isolated from the Sargasso Sea
ggccagaaaactggacgacgatggcagcgaatacgatgtgtcgcttgatcaggtcaaggtgggcgaccgcctgcgggtgcgccccggtgacaaggttccgctggacggcgaggtgcttgaaggcagctccaacgtggatgagtccatggtgaccggcgagcccctggcggtcagcaagaaatccggcgaccaagtgatcggcggcagcataaaccagcagggcagcttcatcatgcgggccgacaaagttggccgcgataccatgctgtcccagattgtccagatggtggccagcgcccagcgtagccgcgcaccgatccaggggctggctgacaaggtagcaggctggtttgtgccggcagttattgtgattgctattgtcgcctttattgcttggtccttctttggacccgcaccgcctatggcgttcgggctgattgcagcggtcagtgttctgatcattgcctgcccttgcgcacttggcttggcgacgcccatgtccatcatggtgggtgtcggacgcggtgctcaaagtggcgttctgattcgcgatgcggaagccttggagcgtatggagaaggtggacaccgtggtggtggataaaaccggcacgctgacagagggcaagccgcaagtcacccggcttgtcgcggccaacgggttcgatgacag

SEQ ID NO: 275138 - DNA, 901 bp, Unknown
  Bacterial polypeptide expressing nucleotide sequence isolated from the Sargasso Sea
caccgcagccccaacatgtggaccctgatcggtttgggaacggccgctgcctacctctacagcgtggccgctaccttggttccgcagtggtttccggcggcttttgcccaggacggacgtatcggcgtctattttgaagcagccgcggtgattatctcactcacgctgttgggccaaatgctcgaactcaaggcccgctcgcagacttcggcagccatcaagtcactgctgaggctggcaccaaagactgcgcgtcgcatcaagcccgatggccaggaagaagatattccgctgacacatgtccatcagggcgaccacctacgtgtccggccgggagagaaagtcccggtggacggtacggttctagagggggagagcgccgtcgacgagtcgatgcttaccggagaaccgttacccgtgaccaagcgggtaggggatgcccttatcggtgccaccctgaacacccacggcagcctggtgatggaggcgcagaaggtcggtgccgagaccatgctgtcgcagatcgttcagatggtggccagagcccaacgttccaaggcccccatgcagcgtatggctgatgcggtggcagggtatttcgtggtcggggtgatcctgatcgcgattctgaccttcttcggctgggggctattagggccggaatcaggctgggtatttggcctgatcaatgcggtggcggtgctaatcattgcgtgtccctgcgctctgggtctggcaaccccgatgtccgtcatggttgcgactggcaaggccgctagcagcggtgtgttgttccgcgatgccagcgccatcgaaaatctatgcaagatcgacacgctcatcgtcgacaagactggaaccctgactgaggggcgtcccgtatttcatagtgcggaaggac

SEQ ID NO: 275139 - DNA, 815 bp, Unknown
  Bacterial polypeptide expressing nucleotide sequence isolated from the Sargasso Sea
gaagccgcagcagttattacggtgcttgttctgctgggacaggttcttgagctgcgggcacgggaacaaacctcaggcgccattactgcgcttctgaaccttgcccccaaaaccgccagacggctggatcatgacggtcatgaaacggatattaatgcggaagatgtcctgcctggcgataagctccgcatcagacctggagagagtattccggtcgacggtatcgtgatcgaaggcaaaacaaccgttgatgaatcgatggtgaccggggagtctatgccggttaccaaaacgaagggtgaccctgtcattggggggacgattaatcagacaggtagtcttatcatccgtgcagagaaagtcggtgatgaaacgatgctctcacgaattgttcagatggtcgctgatgcacagcgttcgcgtgcccccatccagagaatggctgacagcgtttcaggctggtttgttcctctggtgatacttatcgcggttgttgctttcgtgatctggtctgtctgggggcccgagcccaggatggcgcacggtctgattgcggctgtgtcggtcctgattattgcctgcccctgcgcactggggctggccacaccgatgtcgataatggtgggggtaggcaaaggagcccaggccggggtgttaatcaggaatgccgaagcccttgagcgtcttgaaaaagtggacacgctggttgtcgacaaaacaggcacgctcacggaaggttcgcctacggtgacagggattatcagtctcaatccgggtggggaagcatctcttttacgtgtagcggccgcagtgga

SEQ ID NO: 275140 - DNA, 897 bp, Unknown
  Bacterial polypeptide expressing nucleotide sequence isolated from the Sargasso Sea
ttctaagtttagctattcaattttccattgcagttttagtcatagcatgtccatgtgcactaggtttagctactcctacagtcattacagtggcatctggtaaagctgcaaagaagggagttctttttaaggggggagacaaaatagaaatggcctccaaaattaatcaagttatttttgataaaacaggaactttaaccaaaggtaaacctttcattgtcgactataaaaataataaagacaaccaatttttattaaaaatatcggcaagtttggaaaaagaaagcagacacccaatagcaaatgctttggttagagaagctcaaaaacatcaaatagatttactatcaataaaaaatatttacactgaatccggtagaggtatttctggagaactttcctcaattgatggattaattcatattggaagcgttgattggttgattagcaaaggagtaattcttgataacgattctagaaaatttctagcaagtgaagagactaaaaataatactattattggagtaagtattaaaaaagaatttcttggttttattttattaggagatttattaagagatgattccatacaaacagttgaaaaattgagaaaaaataacttgaaaattaatattttgagcggcgatagaaaggaaactgttatcgaatttgctaaaaaaattggttgtgatgaaacagaaataagatggggactacttccacaaatgaaactagatattattgaaaattgcaaattaaataataaagtggccatggtaggtgatggaataaatgatgcacctgcattagcatcttcagacttaggtgttgctgtaggatcaggtactcaaattgcgaaggcaaatgcagatgttgttcttaaggggatcaattaaa

SEQ ID NO: 275141 - DNA, 931 bp, Unknown
  Bacterial polypeptide expressing nucleotide sequence isolated from the Sargasso Sea
attttcgataaaacagggacattgactttaggaaaaccggaagtcgcggatattgttttggtatccggaactcaatgggacgatgatcaagttcttgcactagcgggatccttagaaaaaggttccgaacaccctcttgccttggctattgtgaatgaagccaatagaagagggcttaagcttgatgtcccaagtgactttaatgcattacccgggtttggtgtagaaggggaaataaatagtaaaaagatattacttggaaacaaaacattaatgatagataagcgaattgatatcacttccgttgaagaccatatgaaaagattagtggaaaaagggaaaaccgctatgattttttgtgttgaagatgaggtggttggcctaatagccacaaaggatactttgaagtcaaatgctaaagaggtgactaatcatcttaaagaaatgggcttggatattatcatgctaactggagataattcaaatacagcaaaggtggtagcagatcaacttggtattgggcgagtaatttctgaagttttgccttctggaaaagcagctgaaatagaaagactcaaaaactcaggttgttgtgttgcaatggtgggagatggtattaatgatgctcccgcccttgctgcagccgatgttggcattgctttaggtagtggtacggatgttgctatggaagcctcagatataactctagtgggttcagatattaacgcagttgttgactccattaaattaagtaaagcaacaatgtctaaaatccgacaaaacttattttgggcttttatttataatattcttggcattccaattgctgcgggcattttatacccgtcatacggaattcttttgcaacctgtttttgcagccgctgcaatgtctctaagctcgctgtttgtggtaggcaactctcttttgc

SEQ ID NO: 275142 - DNA, 817 bp, Unknown
  Bacterial polypeptide expressing nucleotide sequence isolated from the Sargasso Sea
gaacatccattggcacatgccattgtcgagggagctgaaaataaaggactgaaacctcagaaggttgacgattttaactccattactggtaaaggcattacaggcaaagtagatgggctgcaaatagccattggcaacaaaaagctccttgaggaatttgatttaacactggatcaggagcatgatgaagatgtgaagcaaagacaacttgaaggacaaacggtcatgttcgtggttattgataaggaagtagccgggttcatcagcgttgctgaccccatcaaagaatcatcagctgatgctattaagcatttgcaagaccaaggactggaagtgattatgctcactggtgacaataagaatacagccaaagcggttgcagataagcttggattagatggatatgtagcagatctcttaccggaaaacaaatacgaaaaagtaaaagcgctccaggaagaaggaaaaattgtagctatggccggtgatggaatcaatgatgccccggcacttgctcaagccaatgtcggaattgccatgggaacaggtacggatgtagctattgagagcgcaagtcttacgttggttaaaggagagttggatgggatcgtgagagctcgtaagttgagtacagatgtgatgagaaacattaagcagaacctgttctttgctttcgtttacaatatgctaggtgtaccaatagccgcaggagtgctctttccagtatttggtcttttgttgagtccgatgcttgccgcagcggccatgagtctgagctccgtttcagtaataggtaacagtttaagattaagataaa

SEQ ID NO: 275143 - DNA, 548 bp, Unknown
  Bacterial polypeptide expressing nucleotide sequence isolated from the Sargasso Sea
aatggatgcccctgttcgagctgctgacaagatgaatgcagcaatttccctgcctatagagggcatgacctgcgcatcctgcgtcggccgtgtcgagcgcgccctgagggccgtccccggcgtcgccaacgcggtcgtcaatctggcgaccgagaaggcaagcatcacgacgaacgacacggttgatcgcatagcgctcgtcaaggctgtcgagaaagctggctatgaagtgccggccagcttcagtgcgccgaaatctgctctccttgaggtgccgatcgaaggcatgacctgcgcttcttgcgtggggcgggtggaaaaggccctcaaggccatccccggcgttgccaatgccgtggtcaacctagctaccgagaaagccagcatcacgacgaacggcccggtgggccgagcggtcgtcgtgaaggccgtggaagacgcaggctacgcggtttcggcaagtttcactgcgccggcggcggcttcgcttgaggtcgcgatcgagggcatgacctgcgcctcctgcgtcgggcgtgtcgaaaaagccc

SEQ ID NO: 275144 - DNA, 749 bp, Unknown
  Bacterial polypeptide expressing nucleotide sequence isolated from the Sargasso Sea
agtcttatcatccgtgcagagaaagtcggtgatgaaacgatgctctcacgaattgttcagatggtcgctgatgcacagcgttcgcgtgcccccatccagagaatggcagacagcgtttcaggctggtttgttcctctggtgatacttatcgcggttgttgctttcttgatctggtctgtctgggggcccgagcccaggatggcgcacggtctcattgcggctgtgtcggtcctgattattgcctgtccctgcgcgctgggactggccacgccgatgtcgataatggtgggggtgggcaaaggcgcccaggccggggtgttaatcaagaatgccgaagcccttgagcgtcttgaaaaagtggacacgctggttgtcgacaaaacaggcacgctcacggaaggttcgcctacggtgacagggattatcagtctcagtccgggtggggaaatatctcttttacgtgtaacagctgcagtggaaaaaggttcgcagcatccgttgggtatggctgttgtcagagccgcgcatgaaaaggggatcgtgatacctgccgtcagtaatttcaatgccccgtcggggaaaggtgtctcaggcgatgtcgaaggtcaacgggttgttattggtaatgaactggctatgcaggaaaacagtatcgttattgataatcaaaaggccgttgcggatacgttgcggatggaaggcgctaccgttatctatgtggccacagacgggaaccttgcaggcctgat

SEQ ID NO: 275145 - DNA, 840 bp, Unknown
  Bacterial polypeptide expressing nucleotide sequence isolated from the Sargasso Sea
ctgctggcggcggtggccgtgctggtgatcgcctgtccctgtgcactggggctggccacaccggcggccatcgtcaccggtaccggggtggcggcgcgccacggcattctgatcaaggatgtcgataccctgcagaaggcccacgccatcaaggcgctgatcttcgacaagaccggcaccctgacccagggccggccggtgctggccagctggagcggcaacgacgagcaactgcgcctcgccgccgccctgcagcaggcgagcgaacacccgctggcgctggccatgcgcgaggcagtcggcaaagaggcggtactgccccagccggaagccgtcgaagtgcgggtcggggccggtattgtcggtcaggtcgctggccacacggtcgccatcggcaatatctctttgctggcccagctcggcatcgatgtaccgcaacaggatgaacaagccgccgacggcgcgacccgggtctgggtggccatcgacggtgtggtggccggcatagccgcactagccgataccctgcgccccgagagcccggatgccatcgccaccctgcgccagcgcggtatcgccagctggctggtgagcggtgatgcgccggcgccggtggcccatattgccgccaagctggggctggacggggccttcgactccgtcctgccggccggcaaggtggagaaagtggaggcgctgcgggcgcaaaccagcggtctggttgccatggtaggggacggggtgaacgacgccccggcgctggcggcggcagatgtcggcatcgccatgggctccggctccgacgtggcgatggagaccgcctccatcaccctgatgcga

SEQ ID NO: 275146 - DNA, 742 bp, Unknown
  Bacterial polypeptide expressing nucleotide sequence isolated from the Sargasso Sea
cgtcttcggcccggacccggcctggacctacgcggtgctgaacgcggtttcggtgctgatcatcgcctgcccctgcgcgttgggtctggccacgccgatgtcgatcatggttgccaccggcaaggcggcacaggtgggcgtactgttccgcgatgccgaggccatcgagcatatgcgccgcatcgacaccctgatcgtcgacaagaccggcacgctcaccgaagggcgcccggctttcaaggaagtcgtggccttcgagggcttcgatgcagaccgggtgctgcacctggcggccagcttggaccagggaagtgagcacccgttggcggacgccatcgtcgccgaggcccggcgccgtaagttcgagttcgaccgcgtggagggcttcgactcggtgaccggcatgggtgtgcgcgggaccgtggcgggccacgaattggcgctgggcaataccgcactcatggaggatctgggagccaaccccggtgcgcatgtcgacgtggccgagcgtctgcgtcgcgagggcgcgagcgccatgttcctcgccgtagatggtcgcttggcgggcctgatcgcggtcgccgacccgatcaaggcatcagccgcggccgccattgatgagctgcacgctgccgggctgcgcatcatcatggccaccggcgacgggctcaccaccgcgcgggccgtggccacggagctgggtctggacgaagtgcatggcgaggtccgcccagaggacaag

SEQ ID NO: 275147 - DNA, 679 bp, Unknown
  Bacterial polypeptide expressing nucleotide sequence isolated from the Sargasso Sea
atccgcatggttgaagaagcccagtccggcaaggctcctgtggccaggatggcagatagggtggcaggagtgtttgttcctatagtacttttcctggccttgctgacggcactgagttggtggttttacggtgcaggaatggaaactgtcctgacccggatggtggcagtgttggtcatctcctgcccctgtgcgctcggacttgcaacgccgattgcgattctggttggaaccggaagcggtgcgcaccatgggatcctgttccgtaatgctggggctcttgaagcccttcaaggtctcgataccctgatgtttgataaaacaggaactctgaccctcggtcaacctgttcttgaatcaatcaaaacctggaacggctggaacgagtctgaggtcctcagactatcagcctccgcagaaatcggttcggaacatcctttcgggaaagcgatcgtagagtcggcaaaatctcaaaatttggagatttcacaacctgactccttcgaggctttgagcggttccggtatcatagctgtggtggaaaatcgtcaactcgccatcggacggcaggaattcatcctgaaacaaagtaaagtagaggaactcctgcaggaatgggatgaaggtatagaagccaaatcatcggtctgggtccttgttgatggtaccctgcccgcga

SEQ ID NO: 275148 - DNA, 628 bp, Unknown
  Bacterial polypeptide expressing nucleotide sequence isolated from the Sargasso Sea
cgcaagctgggaagccgaaggccgcaccttgtcctggctgatcgaaactggcagcccgcctcgcctgctcggcctgctggccttcggcgaccaactcaaggaaggcgccaccgacgccatcgccgaactgcgcgaacagggcatcaccagccacctgatcagcggcgataaccagggcagcgtggcggcggtggccagcgttctgggtatcgatgagccccacgcccaggtattgccggcggacaaggcgcggctgatcggtgaactgcgccagcacggcaccgtggccatggtcggcgacggcatcaacgacgcaccggcgctggccgctgcggacgtcggcatcgccatgggcggcggcaccgatgccgccatgcacgcggccggcatcaccctgatgcgcggtgacccgcgtctggtgccggccgcgctggagatcagccagcgcacctacgccaagatccgccagaacctgttctgggccttcatctacaacctgatcggcatcccgcttgccgccgctggcctgctcaacccgatgttcgccggcgccgccatggcgctatccagcgtcagcgtggtgagcaatgccctgctgctcaatcgctggagaccgaagggatcgtag

SEQ ID NO: 275149 - DNA, 476 bp, Unknown
  Bacterial polypeptide expressing nucleotide sequence isolated from the Sargasso Sea
cggaaacgtgaccgcccaatccgtcgcaaaacaacttggcattgttgagtttcgcggcgaggtcaagcctgcggataagctggcgttggtcgccacacttcaagaacgaggcttggttgtagcgatggcaggcgacggcatcaatgatgcaccggcgctcgccaaagccgacgtgggtattgcgatgggtaccggtaccgatgtcgcgatgaacagcgcccaggttaccctcgtgaaaggcgacctgcggggcattgcccgtgcccgcgccttatccgaggcaacgattgccaacatgaagcaaaacctcggcttcgccttcctttacaacgcactgggtgtgccattggctgccggcgtgctctatccttttaccggacttctgttatcacccatgattgccgcattggcgatgagcttgagttcggcatcggtggtcgccaatgcgctgcgactccgtgcgacccgactctgat

SEQ ID NO: 275150 - DNA, 791 bp, Unknown
  Bacterial polypeptide expressing nucleotide sequence isolated from the Sargasso Sea
cgtggcagggtatttcgtggtgggggtgatcctgatcgcgatcctgacattttttggctggggggtgttcgggccggaatcaggttgggtatttggcctgatcaacgctgtggccgtactgatcattgcctgcccatgcgccctgggcttggcaacgccgatgtcggtcatggtcgcgaccggcaaggccgccagcagcggtgtgttgttccgcgatgccagcgctatcgagaacctctgcaaaatcgacaccttgatcgtcgacaagaccgggacactgacgcaggggcggccggcctttcatagtgcagagggaaccgggccgttcgactcggtcgaggttctgcgcttggccgcaagcctcgaccagggcagcgagcatccgctggcgcatgccattgtcgatcatgcgcgtgaacagggtcttgccctggtgaaaccggagaccttcgaatctggctcaggtattggtgtacgcggacaggtcgatggccatcaactgcagcttgggaacacagcgttgatggaggaggcgggcgtcgatattactccgctgcgtaaccgtgcagagcaactgcgcctggaggggatcagcatcatctatctggccgtcgatggtcgcctggcgggtctcctggccgtttccgatccaatcaaaccgacctcccaacaggctgttgctcaactccagaacgctgacgtgaaggtcatcatggccactggcgatggcctcaccacagcaagagccgtggcgaagcagttaggcatcgaggaggtgcatggcgaggtga

SEQ ID NO: 275151 - DNA, 1678 bp, Unknown
  Bacterial polypeptide expressing nucleotide sequence isolated from the Sargasso Sea
agcgcgggctcgccgccgcaccggagctgcgctggaagcgttggcccaattgcagcccgataccgcgctgttgctgctgggggatggctcgacccgcagcattcgcgtgggtggtctgcgcccgggtgatcacttgcgggtgttgccgggtgatcgcttgcccgtcgatggcgtggtgatcggcggcagctcatcgctggatgaatccagcctcaccggggagcctttgccccgcagcgtggccagtggtgatgagctggctgccggcagcctcaacttgcaggccccattggacctgaaggtgttgaggccgggctcggaatccgccctagcacgggtgattgctctggtggagcaggcccaggcccgcaaggcaccggtgcaggctatggccgatcgctgggcgggtcgcttcacctggattgtgttggccttggctttggccacgttcctgttctggtggattttgggcactgacctcttccctcaggtgctgggtggcatggcccatggcccagggcatcaccgcagcttgggtagtggcgctgaaacacccttcgccctggcgttgcagttggccattgctgtgctggtggtggcatgcccctgcgcgttggggctggccacccccacagccatcagcgtggcgacaggccgcgccgcccatttgggcttgctgttccgtggtggtgatgtgctggaagtggcggcttccgtgcgcacggtgctgctggataaaaccggcaccctgacccgcgggcgacctctgctggaagaccagttggtgttggccgatggccttgatgctgcccgcctggtgcagttggcggcttccctggagcaaaccacccgccatcccttggcttgggccttgctgcaggctgccgagagccaggggttgaccctgctgagctgcagcagcagtaccaccaaggctggcgatggcgtgcaggggcaattggactcgctgcagcagctctgccgcttaggccgcatggcttggctcgagcagcaaggcgttcaagttccagctgctgccacgacttggcagcagcagcaagagcagggtggagcgacggttctggctttagcccatggccaatcgttgctggggctgctggctgtgcgcgatgccttgcgtcccgatgcctctgaggccctggcccagttgcgctcccaaggtttggccttgggattgctaagtggtgatcgtgagggcccggtgcgtcagctcggccagcagctggctttgcagccccagcagttggcctgggggttgcggcctgagcacaaattgcagcggctgcagaaggcggctggtcccgtggcgatggtgggtgatggcctcaatgacgcgccggcgttagctgcggctgatctcggtattgcggtggggaccggaacccaaatcgcccaagacagcgctgatctggtggtgctgggggaacgtttgatggcggtgccgcaggcgctggccttggcgcgttcagctcaggccaagattcgccagaacctcagctgggcattcggttacaacctggtggtgttgcctttagccgcaggtgtgctgctgccaggctttggcctcttgctcacccctccgttggccgcccttttgatggcgctgagttcaatcaccgtggtggccaatgcgctgctgctgcgcgcgcctgaatga

SEQ ID NO: 275152 - DNA, 1321 bp, Unknown
  Bacterial polypeptide expressing nucleotide sequence isolated from the Sargasso Sea
atctaaaaaacctccaattcagagaattgctgataagattgcagggaaatttacatacttcgtactaattattgcaacttcaagcttctttttttggtggaaaggtgcaaaacaaatttggccagatttgttaataaacaatcatcatgacttgataaccacctccaatcatacgttacataattcattaggtagtaatgctgaaaattttttaactttagccattcaactctcaattgctgttttagtcatagcttgtccttgcgctttaggtcttgccactcccactgtaataacagttgcatcaggtaaagctgcaaaaaaaggcgttttatttaaaggaggagataaaattgaaatggcatcaaaaattaatcatattatttttgataaaacaggaacattgaccagaggtaaacctttcataatcgattatttaaatactgctgataaattatttctattaaaaatatctgcaagtttagaaagtcaaagccgacatcccatagctagtgcattagttaatgaagccaaaaaacaaaaccttggcttgttgaaaattaaaaacatccatacagaatctggtagaggtatatcaggggaacttgattcaattgatggggaaatcaatattggaagtgttgaatggttgaatagtaaaggagtaataattgacagaaaatcaaaagaaatattggaaactgaagaaaacaaatcccattctgtgattggagtatgtataaataaaaagttactcggatttattttattaggtgatttattaagagaggattctattaattctgttcaaaaattaagagagaataattatcaaataaaaattttaagcggagatagaaaagaaactgtagtcgagttggcaaaaaaattagatattccagaagcagaaataaaatgggatcttcttccagaaatgaaattaaaaataattgaaaatttaaagaagagtaataaagttgtaatgattggagatggaataaatgatgcacctgctttggcagcttcaaatttaggaatagcagttggttcaggtacccagattgcgaaagcgaatgcagatgttgttttaatgggagatcagttatctggattaccttattcacttagtcttgcaaaaagaacaataggaaaaattaaacaaaatctattctgggcttttggatacaacttgattgcaattcccatagcgggtggtattctatttccaaaatatggcattcttcttacaccatcaatcgcagcattattgatggcaactagttcaataaccgttgtaataaatgctttatctttagaataa

SEQ ID NO: 275153 - DNA, 884 bp, Unknown
  Bacterial polypeptide expressing nucleotide sequence isolated from the Sargasso Sea
tgcttcatccgctgaacagggatctgaacatcctcttggaagagcagttgtggaggaagctgaaaaatataattttgaaagtccggaaatttatggatttgaagcaaaatcaggatttggagttcaagcaaaagtcaacggatccacagttataactggtaatcaaactttgatgcatgcggaaaatattgttattgacattccacctgaaattacaaagcaaattcctatcggaagtacctctgtatttgtcgggattgagggaaaacttgcgggtgtcatttgtctggaagatcaggtacgtccggaaagtatacaagcagtcggtcaaataagggaaatgggtattgaggttgtaatgctcacaggagatgagcaaaactcagcagatgctgttgctcaaaaaacgggaattacgaaccttaactcagcagttattccggaagaaaaatcaaatattatcaaagactatcagcaaaaaagttgtcgtgtaggaatgatcggcgacggaattaatgacgctccggcactagctcaggcagaagttggaatttcaatgggttccggaactgacgtggcacttgaaacttcagacgtagtcctcatgaataatgatttgcggcatgttgtggttgccttgctgctcagccgggcaacgttacgaaacattcgccagaacttattttgggcgttcggttacaacgtgataggcattcctgttgctgcaggtttgcttgttccgttaggcggtcctgctttacatccaatgcttgctgcgactgcaatggcactcagttcagtttctgttgttctgaattccctgcgtctgagaaatttttctgtttcccaaggctcatcctcaattgtcggggaaactgtataag

SEQ ID NO: 275154 - DNA, 1330 bp, Unknown
  Bacterial polypeptide expressing nucleotide sequence isolated from the Sargasso Sea
cctgggcatttctggcatgacctgcgcaagctgcgtgggccgtgtggagcgcgcgctgcgcaaggtgccgggcgtgcaggaggcctcggtcaacctggcgaccgagtctgcgcgcattgcctttgtcacgcaggtcggcgccgacgctgccgccatggaggcggtgctgcgccgcgcggtgcgcaatgcgggctacgagccgcgtgcggcggggcaggacgaagcggtggaagacctgtcgccctgggcggggttcctgcccgtgggcattggcctgctgctgtcggcgccgttagtgctgccgatgatcggtgacctgttcggccagcactggatgctgcctgcctggttgcagtttgcgctggccacgccggtgcagttcattctgggggcgcggttttacaaagcgggctggcatgcggccaaggcgctgagcggcaacatggacttgctggtggcgctgggcaccagtgcgggctggggcctgtcgatgtggctgtggctcacggcgcccacggaccacccggggcatgtgccccatctgtacttcgaggcgtcggccgtggtggtcacgctggtgctgctgggcaagtggctggaggcgcgcgccaagcgccagaccacggcagccatccgcgcgctgcatgcgctgcggcccgatgtggtgcatttgctcaccaagcagggcgaggtggatgtgccggtgtcggaagtgctggtgggcgaccagctggtggtgcggcccggcgagcgcatccctgtggacggcacggtgcacgagggccacacgcaggtggatgaatcgatgctgaccggcgagcccctgccggtggcgcgcgacgtgggcgcggcgctgacgggtggctcgatcaacggcgatggccgcatcgtgatggcggtgacggccgtgggcgccgagacggtgctggcccagatcatccggctggtggaagacgcccaggccgccaaggcgcccatccagcggctggtggatcaggtgtcggccatttttgtgccggtggtgctggtggtggcgctggtgaccttggtgggctggctggccatgggcgcggggctggaggcggcgctgatccacgccgtggccgtgatggtgatcgcctgcccctgtgcgctggggctggccacgcccgcggccatcatggcgggcacgggtgtggcggccaaacacggcatcctgatcaaggacgtgcaggcgctggagctggcgcacaaggtggacacggtggcctttgacaagaccggcacgctgactgtgggccagccccggctcacggcgtttgaggtggtgccgggtcttcatgaggcggca

SEQ ID NO: 275155 - DNA, 1807 bp, Unknown
  Bacterial polypeptide expressing nucleotide sequence isolated from the Sargasso Sea
tatggacgtcttggtagcacttgggtcaagtgcggccttcggttggtccgcaatggttaccgttgcgttgaccaacggcacagtagttttcggcacgcatgtttacttcgagactgctgctctaatcatcacgttgatcaaactgggcaagcttcttgaggtcagagcaaaaggggagaccggagcggcgatacgagagctcctagaacttcgccctaactccgccaatcggataacggagagcggtgaagagtcagtgcccgtggatgagatttgtgtcggagatgtcctgctggtccgtcctggagagcgggtagctgcagacggcagtgtgatcgaaggcgcgacgtcggtcgatgagagtatgctgaccggagaaagccttcccgttgagaagcttgacggcgcgcctgtgaccggaggaactgtaaacctgaccggcgcttttaagatgcgcgttgaacgagtgggcgcggacagtgcactcgctcagatcgtcaggatggtgggcgatgcccaaggctcacgagcccccatccaacgaatggcggaccgagtggcttctgtttttgttccggctgttatagtgatcgccatagttacatgggcggtttggtggttcggaactgaggcagattttactgagtcattgatgcgtttcgtagcggtgctggtgattgcgtgtccgtgcgcgctcggcctagcgacaccgaccgctgttatggcgggaacaggaagagctgctggccgaggcatccttttccggaattcggaggcgctagagcgggcacgggacgtttctgtcgtgttgctggataagacaggaacggtcacccgaggccagccgaccgttcagagcgtgatttctgatgaaagggcttcagttttaggtggggcgtatgactacgtccggctcgccgcatctgtcgaggcgctcagtgagcatccaattgcccgagcggtggtcgaggaggctgagtcgcggttgctcgacattagtgccgtggaggagttcaaagcgatcccgggacagggggtctcggggagggtagagcaccggagtgtcgccgtggggacctcggctctgatgacgtatctgggtgtggagggagtgctggagtggacgggccgagctaaagaagttgaggccgcggcgcagaccccgctatgggtggcagtagatggccggatcgcaggactcattggtgtcgctgacgcagtaaaggagacctctgccgatgcggtcgctgcacttcaatcacgggggcttagcgtcatcatgctgacgggtgatcgtgaggcggtagcgaatgttatcgctgaggaagtcggtattaatgaggtgtattccgaagtgctcccaagtgaaaaagcacaggtggttagccagcttaaggcgcgctcgctcggtgcggtggcaatggtcggcgatggaatcaatgatgctccggcattggctgtcgcggatgttgggatggccttagggactggaacggacgtggcgatggaaacggccgacgtggtgcttatgcgaggggatttgaggaccgtgtcagaggcactagccttgagcgaacgaacgctgcggacgattgaacagaatctgttctgggcatttttctataacgcctctctaatcccggtagcggctggtgcgttgtactcgtttgccttcttgcccatcatgcttcgctctctacaccccatcttagcagcactcgccatggcgttctcctcgatcagcgttgttgcgaatagtttgcgacttcgtcgtgtcaacattcccgagctcctgtccgtgaattga

SEQ ID NO: 275156 - DNA, 819 bp, Unknown
  Bacterial polypeptide expressing nucleotide sequence isolated from the Sargasso Sea
gtccacagaaacttgttaagcaaaatgaaaattctaataaattaattcagttagaaaatattggatgcaaatttccaattaataatgctttcttcgcaaaaaataaaaaatactttactgcacttgaagacataaatctttatattaattcgggagaaacgataggtttagtaggtgaatctggatcagggaaaacaacacttggtttatcgatcatgcaactactcaattattcaggaaatatatatctaaacaaacttaagttatcatctctatcctcagaacaactcagagaatcaagacgagattatcaaatagtttttcaagatccatactcatctttatctccgcgtatgactattcatgaaattctatctgaaggtataatttcattttataataatattagtcaaacaaatttattgcaaaaatgttcagaactgttaaatgaagtaggtctagatgaatcaatgttacaaagatatccgcatcagttttcaggtggacaaagacagaggattgcaattgcacgagcactatcaatgaaacctaaacttattatttttgatgaacccacgagcgcactagatgtaatagttcaaaagaatattttaaaattaatagttaatttgcaggagaaatattctcttagttattgttttattagtcatgatttaaaagtaataagttcaatctcacataggatatatgtaatcaaggattctaaaattgttgaaactaatagcgctgacgagttgatctctaatccgcagagtgattatactaaaaaattgataaaatcctctttcatcacttaga

SEQ ID NO: 275157 - DNA, 1615 bp, Unknown
  Bacterial polypeptide expressing nucleotide sequence isolated from the Sargasso Sea
cacaacacatttgcagggaggccattcatgtccaacgcggaaccgcacgatcacacccaccatggccatcagcatcatgagggggtccacggggatacaccgccgcccatgacgaaactgaaagatccagtctgcggtatggacgtgacggaacaatcgcatcactcggcggagcatgaggggcggcactactacttctgtagcgccaagtgccaaacgaagtttgttgaggacccggacaagtacgctgtcacgcctcccggtaccgacaaggttgcgcgagagccagaagccactcagcccggcaccatctacacctgccccatgcaccctgaggtgcagcaggaccaccccgggaactgccccaaatgcggcatgacgctggagcccatgctccccacgctggatgagggagaaaacgccgaactcgtggatttccggcatcgtttctggtggacgctgccactgaccgtggtggtcaccgtactggccatggtgggacaccggctgcagtggttcgagatggccacacagagctggattgagctcgtgctgacggttccgatcgtgctgtgggctggctggcccttctttgtgcgcggcgctcagtccattgccaaccgtagtcccaacatgtggacgctgatcagcttgggcacgggcgccgcatttgtctacagcgtggtagccaccgtggcgcccggcgtgtttcctgcctcgttccaggccatggggcgtgtggcggtgtactttgaggccgccgctgtcatcatctcgctcacgctgctgggccagatgctggagctcaaagcacgctcgcagacctcggctgccatcaagtcgctgctaggcctggcgcccaagaccgcgcggcgcatcgatgccagcggccaggagagtgatgtcccgttgtcccatgtccatgtgggagacctcttgcgcgtacgtcccggtgagaaggtgccggtggatggcgtggtggtcgaggggagcagcgcggtggacgaagccatgctcactggcgagcctgtgcccatcgtcaaaggacctggggacgctgtcatcggtgccacgctcaataccaacggggcactggtgatccggtccgagcgggtgggctccgccaccatgctgtcccagattgttcagatggttgcgcaggcacagcgctcacgggctcccatgcagcgcatggccgaccaagtagcggggtacttcgtgatggcagtagtcggtatcgcgttgcttacgctgttcgcgtggggcctgttcggcccggagccacgttgggtctatggcctggtcaacgccgtggccgtgctgatcatcgcgtgtccttgtgcgttgggcctcgcgactcctatgtcgatcatggtggccacaggccggggggcgaccagcggcgtgctgttcagggacgcagcagccatcgagaacctgcgcaaggtggatacgctgatcgtggacaagactggcacgctcacagagggcaagccttccttcgagcgggttgttgccatgcccggtctgtccgaggatgaggttctgcgcctggcaaccagtctggatcaaggcagcgagcatccgctggccgatgccatgtccaagcggcccg

SEQ ID NO: 275158 - DNA, 1742 bp, Unknown
  Bacterial polypeptide expressing nucleotide sequence isolated from the Sargasso Sea
gacccgccagcacagccacaaagaagcagcttcgcgccaggaaaacgccaacgcaccgcaaacacacaacgagtacacgcaccaacgcctatgcgacagcgacgaccaacacgctcattcgccccccgtgcccgaggctgtcgagagcgacaaagcaggcgtctcatcaacgacggagttcgcgcccacggtttacacctgcccgatgcatccggagattcgccaggatcatcccggcacgtgccccaaatgcggtatgacgctggagccggtcatgcccgcggtagaggaggaagagaatgcggagcttgcggacttccggcggcgattctgggcaagctttccattgacggcgattgtttttgtgctggccatggctggacaccgattgactcgcctcgatccagcatggcaagacaggtttgagttggcactggccacaccggtcgtgctttgggcgggattgccattcttcagacggtgtgcccaatcctttgtataccgcagcccgaacatgtggacgctcatcggcctgggcacgggggctgcctatctttacagcgcggtagcggtcgttgcgccgggtgtgtttccctctacctttgcggcgtccggccgggtgcaagtgtatttcgaagcggcggccgtcatcatttcattgacactgctggggcagatgctcgaactgaaagcccgctcgcagacctcagccgcaatcaagtctctactcggcttggccccgaaaacggccaggcgtatcaacgcagacgacagcgaagaggatgttcccattgcccatgttcatgtgggcgatttgctgcgtgtgcgacccggtgaaaaggtgcccgtggatggtgtcgtggtcgagggcgcgagcgcgctcgacgagtcgatgatcaccggtgagccgattccagtctccaaacgcgcgggtgaccacgtcatcggtgcaaccctgaacacctcgggtgcgcttgtggtccggtccgagaaagtgggcgcgcagaccgttttgtcgcagatcgtgcaaatggtcgcgcaagcgcagcgctccaaggcgccgatgcagcgaatggcggacaaggtggcaggcgtcttcgtcatcggcgtggtcgccatcgctgtcatgacgctcgtcgcctgggggatctggggcccccagccaagctgggcccacggcttgatcaacgcggttgctgtgctgatcatcgcgtgcccgtgcgcgctcgggctggccacacccatgtccatcatggtggccagcggcaaaggggccgaacacggcattctttttcgggatgccgcagcaatcgagaacctgcgcaaggtcgacacgcttattgtggacaagacaggcacgttgaccgaagggcgcccctcattcgatcgggccattggcctcaatggattttccgacatggacgtcttgcgcttggcggccagtctggaccaaggtagtgagcaccccttggccgctgcgatcgtggcgcaagcgcgcgaacaggggctcgcgctcgagcggccggaagattttgaatccgcgtcagggatcggcgtgagaggacacgtcgctgggcgaagcctggcgctcggcaacacctcgctgatgcaggcgcacgcggttgctgtcgatgccgcctccaccgaggcagacgccatgcgagcccgaagcgccagtgtgatgtacctggcggtcgatggggtccttgctggcctgctgtcggtttccgatcgcgtgaaga

SEQ ID NO: 275159 - DNA, 1444 bp, Unknown
  Bacterial polypeptide expressing nucleotide sequence isolated from the Sargasso Sea
catgtcgcagataaaactctatgttgccaccatgaattgtgcaggctgtgtggccaaaattgaaaaggcctttgcggccgagccgaatgtgagtgcccgtatcaatctcgccgataaacaagtgactgtcgatggcaagatgagcagcgatacggcgctggcagtgatggataaggcgggttatcccgcccagttgattgtggacgcaaaggcggccgcagaggaaaaacgggtcgaagatgcggctgagtatcgcctgcggatgcgtcaggctatcgccgcgctcgctgtcggtatccctatgatgttatggggattactgggcggcgaaatgatgattaatagccctagcatgcagcttggctggggcattatgggcttagttaccctagcacttttagtcggtaccgggcgccatttctatcagggaatgtggcgcgcgcttaaagccaaaaccaccaatatggataccttaatcgtgttaggtactagcacggcatggctctattccatgctggtggtgcttatcccgagtgcgtttccaatggacacacgccacgtgtactttgaggcgagcgtgatgatcttaggtttaattaacttaggtcacgccctcgaactcaaagctcggggtaagaccagcgaagcggtgcagcgcttgctcggtctgcaatcttctaccgcgattcgtattggcgacaatggcgatgaagaggtggaaatcgaccagctcaaactgggggataaactcagacttcgtcccggcgacagggtcgcactcgatggcgtggtagagtccggccaatcattactcgatgaggccatgctgacgggtgagccgatccccgtgcctaagcatgttggcgataatctcagtgcggggacagtcaatggtaacggcagtttagtctaccgagtgaccgctgggcagcaggatacgcgccttgccaaaatcatcgcactggtgcaggaggcgcaaacctcaaagatgccgattggtcgtctggccgataaaatttcggcggtatttgtgccaacagtcgtgctcattgccttactcgcggcagcgatttggtatcttgttgggccagaacctgcgctcagtcatgcacttgtggtgctcaccagcgtgctgatcattgcctgtccctgcgccttagggttagccacacctatgtctatcatggtgtccgttggccgcgccgctcaaatgggcgtcttggttaaaaatggtgaagcactgcaaagcgccagtaaggtcgattgtgtggtgttggataaaactggcacagtgactcaggggaaaccccaagtgaccgatatccattggattgaggctaatgaccaagcgctcagtgatgaagacaaacgcgtgctacttggcgcgatcgccagtcttgagcagcattcagagcatccgctagctagcgcaatggtcagctat

SEQ ID NO: 275160 - DNA, 2248 bp, Unknown
  Bacterial polypeptide expressing nucleotide sequence isolated from the Sargasso Sea
atgactaaaacaggctatactacaatacaactcaatatcctcggcgcaggttgcgcgagttgtgttggcaaaattgaaaaagcgattaactgcgtgcaaggcgttgattcggccgaaatgaactttgccgacagaacagtacttgtttcgggtaacgcatctgccgagttgattataaaagcagtagaaagcgctggttataatgccactcaaatacaggctgagtcggcagaagatgccatgaacgagaaagaacaggctgatttacaacattataaaagtttattacgccataccattatcgctttgtccgtcggtatcccgttgatgatttatggactgtttattggcgaaatgacggtatcaaccctattagagcaaactgtgtggggactggtcggtgtggtgactctggcaattatgcttatatcaggtaggcatttttatatcggcgcttggaaatcatttttaaaccataatgccaatatggacaccctcattgccttaggtaccggtactgcttgggtttactcgatgttgattgtttcatttccacaattgttccccgagatggcaagacatgtttactttgaagcgaccgcgatgattattggtttaattaatcttggtttagcactagaagttaaagcgcgcggtaaaacctctgaagcgattaagcgtctcattggtttgcaagctaaaactgctcgggttatccgtgatgggaaagacctcgacatcgatattgctcatgtattacttaatgatcatgtaaaagttcgccctggcgaaaaaattccagtcgatggggtggtttttgagggtaacagcaccattgatgaatcaatgttgaccggtgagccaatgcctgttgaaaaagtgataggtgacgatgtgttcactggcaccttgaataaatcaggctcaatcatatttaaagccactcgtgtaggtaaggataccgcactggctcgcattattagtatggtcaaacgggcgcaaaactctaagccgccgattgggcgtttagcagatgtcatagccgcttactttgtgcccgctattatgatcatcgctatattcagtgccatggtgtggtttaattttggccctgagccgtcaagtgtatttgccatcgtgtctgcaacaacaatattaattattgcttgtccttgtgcgctaggtctcgcaacgccaatgtcagtgatggttggcgttggtaaggcagctgaatcgggggtgcttattcgtaacggtgaagcattgcaaaccgcgtctaaaataaccgccatgataatagataaaaccggcaccattactgaaggtaaaccgcaagttaccgatattattttggttaatgccgacagtgaagagcaggtacttgccttgtctgctggaatcgaaagtcactccgaacatccactcgcgcaagctattgtagaaagtgcgaatgatagaggtatagaagccattgacactgagcacttcaatgccatttcaggtaaaggtgtagaagctgaagtggatggccagacattactatttggtaatttaaaactgatgttagacaaacacattgatattggccttcacgaagctaaggctcaagtgttagctgaaaatgctaaaacaccaatgtatttagcgcttgcagggcaattactggctattattgcggtatcagatccgataaagcctgattcaattgaagcgattgcgagactgaaactcaatggcatcaaagtgattatgttaaccggggacaataaagcgaccgccgcagcagtggctaaaaaagttggtattgatgattttttcgcagaagtcatgccagaagataaagccaataaagtagctgaacttcagcaacaaaatgaagtggttggcatgactggcgatgggattaatgacgcccccgcattagcgttagccgatgttggctttgctattggaacaggcactgatgtggcgatagaaagcgctgatgtgaccttaatgcgcggatcacttcatggcttagccgatgcgatagccattagtaaagcaacgctgcgcaacattaaacaaaacttgtttggcgcgtttatatacaacgtcgcgggtattcccttagcagcaggtgtgctttttcctgtttttggtattttgctaaatccagtgattgctggcgctgcgatggccttttcatcacttaccgtagtgagtaacgctaaccgtttacgtttgtttaaagccaaggaacactagg

SEQ ID NO: 275161 - DNA, 1540 bp, Unknown
  Bacterial polypeptide expressing nucleotide sequence isolated from the Sargasso Sea
attggggacgttggctgcttttgtttacagtctctggaacctgctgaaggatggaggcatttccgggctttattttgaaacttcggcgctgatcattaccctcattctgcttggcaggttgatggaatcccgaagccggaaaagggcggtagagtcagtgcaggcgcttctggaacttcgtcccaagcaagccatgctccttaccgacgaaggagaaacacccattgctctggaactgcttcatcctggagaccggatccgggtcagtcccggtgaaacccttcctgcggatggtctggtcgaagaaggggtctctgaagtcgatgaatcgatgctcacgggggaaagtgtgcccaggtcctgctcgacaggagatgatgtcactggtggaacccgatgcataaacgggatgcttaccctgcggataaagcgaatcggggaagaatcaaccctggctaaaatcattcgcatggttgaagaggcccagtccggcaaggctcctgtggccaggatggcagatcgggtggcaggagtgttcgttcctatagtccttttgctggccatgctgacggcaatgagttggtggttttacggtgcaggaacggaaaccgtcctgactcggatggtggcagtgttggtcattgcctgcccctgtgctttggggcttgcaacgccgattgcgatactggttggaaccggaagcggtgcgcgccaagggatcctgttccgtaatgctgcggctcttgaagcccttcaaggtctggataccctgatgtttgataaaacaggaactctgaccctggggcagcctgttcttgaatcaatcaaaacctggaacggctggaatgagtctgaagtcctcagactgtcggcctccgcggaaatcggttcggaacatcctttcgggaaagcgattataaagtcggcaaaatctaaaaatttggagatttcacaacctgagtccttcgaggccttgagcggttccggtatcgtggctgtggtggaaaaccgtcaactcgccatcggacagcaggagttcatcctgaaacaaagtaaaatcaaggaactcccgcaggaatgggacgaaggaatagaagccaaatcatcgatctgggtccttgttgatggtacccttgccgcaagcatgagttttcaagatcagatccgtcctgaaagccgagagaccatcgaaagcctgaagtctatggggctcaagccggtgatgctgaccggagatcagttggaggcagcagaactcctcgctcgtcaggcaggcctggacgagctgaaagcagggctgcttccccagcataaagtcagcgtactcgaacaataccaggcagagggacaccgggttggaatggtcggtgacggaatcaacgatgccccggccttggctgctgcggatgtagggattgggatgggttctggaaccgatgtcgcgctggaaactgcagacgtggtcttgatgaagaacaacctagctcatcttgccgatgccttcagtctcagtcgggctaccctgagtaacatcagacag

SEQ ID NO: 275162 - DNA, 1581 bp, Unknown
  Bacterial polypeptide expressing nucleotide sequence isolated from the Sargasso Sea
tatgtctgaacagatccaattgaatatcagcggaatgagctgcgcttcctgtgtgggccgtattgaaaaagctttagctaaagtggcaggtgtagagcaagtcaacgtcaatctggccactgaaaccgcagcgattagcggccttgctctgtcgccagaggtattgatggctgctgtggagaaggcgggctatcaggctagtctgccgttggaaaagccggcagttgacgttgttcagcctgctttttatcagcaggaatggtggcctgttgtcgccagcatagtgctgactttgcctttaattctgccaatgtttggcatgctgtttgggctggattggatgttgccatccttctggcaatggttgttggctactccggtgcagttctattttggcgcgcgtttttacaaagcgggctgggctgcacttaaagcaggcagtggcaatatggatttgctggtggccattggtaccagtgcagcttatggtttgtccttgtatctgtggtgggcttttactgcacagcatgcagggcatggcgcgcctcacttgtattttgaaagcagcagtgcagtgttaagtctggtactgttgggtaagtatctggaacacaaagccaaaaaacgtactacagatgctttaagggcattggagaatttaaaacccgcagtcgcgactttgtggcaaaacgggctttggcttgaagtaaaagcagagactgtgcaacaaggtgacctggtgttggtaaagccaggtgagcgcattgctgtggatgctgtggttgagcaaggccaaagccatgtggatgaagccttgatcagcggcgagtctgtgccggtcagtaaaacactggcagataaagtgacagggggctcagtcaatctggatggtgtattgcagatcagagccagcgctgtaggagctgaatctaccttgtcccgcattattcaactggtggaacaggcgcaaggggcgaaagcgcctgtccaggcattagtagataaaatcagtgctgtttttgtgccggtggttttactaatagctctggcgaccttgctgggatggggtctgctggctgaagattgggtgacaggtattctcaatgcggtcgcggtattggtgattgcctgtccttgtgctctgggtctggccacacctgctgctattatggctgggacaggttctgctgcgcgttcaggaattctgattaaagatgctattgccttagagcaggcgaaggcggtgaacctggtggtgtttgataaaaccggtactttaacccagggcaaaccggtgctgcagcaagtcagtcgttttactgatgaagctgatacgctgcaatgggctgcctcgttgcagcaaaacagcgagcatccgctggccaaagctttactggcttatgcagcatcgcatcaggttgcaacagttgaggcaacagagttccgcgtggtcgcaggtaaaggtgtacaaggtagagtgcaaggtcgcagtctggtgctgggtagcagccactggatgcagcagttggggctagatttgccgctcggacagattaaaaccggtggtgcttcagtgtcctg

SEQ ID NO: 275163 - DNA, 1607 bp, Unknown
  Bacterial polypeptide expressing nucleotide sequence isolated from the Sargasso Sea
tgttttattaggacgttttttagaggaaagagcacgaatcaacactggcacagcattaaaagaattagcaaaattacaacccgaaacagccaatctaattttagacaataacgaaattcgtgaaattagaataggtgctctaagaccaggagaaaaaatccaattattagcgggggatagaatcccagtagatggcttagttataaaaggaaattcggcaatagatatctctagtttaactggagagtctttaccgctagaagcaaaacctggagtcgagctaccctctggcagcctaaatttagagtcaacaattactttagaagttcaaaaaattggatctgaaacagcaatcgctaaaataataagtttagttgaagaagctcaagctagaaaagcaccaattcagggattagcagacaaggtggcaggtatgttctgctatggggtaacaactcttgctttaataacttttcttttttggtggagaataggtacgaggatatggccagaagttttagaagtatctaatgcaggtttcatgcatagccataacttgcatgatcatttaatgaatacccctcaaacacctattggtctctcatttcaattatcaatagctgttttagttgtggcctgtccatgtgcactaggacttgccacgccaacggtaataactgttgcttctggggaagcggctaaacgaggatggcttttcaagggtggagatgtcatagaaatggcctcaaaaataagtcaaattatttttgataaaacaggtacactcacgattggaaggcctttagttgttgactgctggaaaaacaatgagtcagaaagaaatttcatgctcaaattggcggcaagcattgaacaagaaagtcggcatccgctggcacaagcaattattcaagaagcacataaaaaagaaatcaaactagaaaaagtgtcaagctcaaccacttatccagggaaaggcttagccggcaaaattaataacttagaaggacgtataagagtcggaactcccgaatggatcaaaagtgaaggaattgaatggaatgaaatgattgaaaataatttcaagctttcaaaaagaaaagctcaatcaatagtcgcagttgctctggataacaaattattaggttttttcttgattgatgaccaaataagaaaagatgctttcctttcaattaataaattacgctcaagaggtttttcattaagtttatttagtggcgatagagattcagcggttttatctataggggaaaaattgggatttagtgccaaacaagttacatggcaaatgttaccctcagacaagcttaataaattgaacttattaaaaaataatggtttagtcgcgatgataggtgatggaattaatgatgccccagctcttgccgctgcagacttaggagtagcggtaggaaccggaactcaaatcgcgcaagattctgctgatcttgttctgcttggagaaaatttggaagcccttccaaatgctttaaatctatcaaagcaagcaatgctcaaaataaaacaaaaccttgcttgggcatttggatataacttaattgctttaccaatcgccgcaggattac

SEQ ID NO: 275164 - DNA, 2458 bp, Unknown
  Bacterial polypeptide expressing nucleotide sequence isolated from the Sargasso Sea
atgagcggacagcgtaacgacggcgaaacttctcccgaacacctgaacgcgagccacggcgcgggcggccaccaagaccatgctgcgcacgccgcgcaaggtcaggccagcggggatgccgatggcaatcacgcggcgcaccacggacatggccacggtgaaatgtccgaaggtcccgacggcgcgctcagggacccggtgtgcggcatgtctgtcacggcggattcgccatttcgcagcgagcacgatggacatccgtatttcttctgcagtgcgtcatgtcagaagaagtttcgggcggacccgttgcgatatgtcaaaccgtcgaccagcacgtcggttgaggctgcgccggagggctcgatatacacctgcccgatgcatccggaaattcgccaggaccatcctggcaactgcccgaagtgcggtatggcccttgagcccttgttgcccagtctcgaggacgaagagaatcccgagctgacggattttcgacgcaggttctggtggacgctgccgctgacggccgtggtgttcgtcctggccatgttcggccaccggctgggctggatggaagcgtccacacagagctgggtcgaactggctctctcgactccggtcgtcgtgtgggcgggcttgccgttcttcgaacgttgcacccgctcgttcatcaatcgcagcccgaacatgtggacgctcatcggacttggtacggggacggcctatgtctatagcgtcatcgcgacagtcgttccaggagtcttcccggaggcatttgccgcacatggtcgtgtgagcgtgtattttgaggccgcggccgtcattatttcgttgacgctcgtcgggcaactgctcgaactgaaggctcggtcgcagacgtccgctgccatcaaggcactgctgggactggcgccgaagaccgcgcggcgtatcaacgccgacggcacagaagaggacgttccactggctcacgtccatgtcggcgacctccttcgcgtaagaccaggcgagaaggttccggtcgacggcgttgtgacggagggttccagcgcgctcgatgagtccatgattacgggcgaacctattcccgtcagcaagcgggtgggtgaccacgtcatcggcgcgaccatgaatacctccggaagcctcatcatcaaatcggagaaggtcggctcccagaccatgctggcacaaatcgtccagatggtcgcgcaggcgcagcgttccagggcacccatgcagcgcatggctgacaaggtcgcgggagttttcgtcgtcgcggtggtcggcgtcgccatcctgacgttcgtcgcctggggctttttcggacccgagcccagttgggtctacgggcttatcaatgccgtggcggtgctcatcatcgcctgtccctgtgcgcttgggctggcgactcccatgtccatcatggtcgcgagtggcaaaggcgcgtcgaacggtgtgctttttcgggatgcggctgcgattgagaacttccggaaggtcaacacgctgatcgtcgacaagacaggcaccttgaccgaaggtcgccctgccttcgaacgcgcaatcggcgtgaatggatatgcggaagaggatgttctccggctcgcggccagtcttgaccagggtagcgaacacccgctcgctgcgaccatcgtggatgcggcccgtgaacggcggctcgcgttcgagaaggtggagcacttcgagtcgagcaccgggattggcgtgcgaggactggtcggcagccgcaatctcgcgctgggcaacaccaccctcatgcaggccgacggcatcgacgttgggacgctcacggaaaattcggacacgctgcgtgcgcagggcgccagcgtcatgtatctggcggttgatggaatgctggccggcctgctcgcggtttcggacccggtgaaggcaacgacacccgaggcactggcccggctcaaggaagacggtatccgcgtggtgatggcgacgggcgacggtgtcgtgaccgccagggctgtcgcgacgaagctcggcatcggtgaattccatggcgaggtcaaaccagccgacaagctggcgctggtgacgaaattccagcaggaaggcaaggttgtagccatggccggtgacggtatcaacgatgcgcccgcgcttgccaaggcggacgtgggcgtcgcgatgggcaccggcaccgatgtagcgatgagcagcgcacaggtgaccctcgtcaaaggagacctgcgcggcatcgcgcgagcccgggagttgtccgaggcgacaatcgggaacatgaagcagaacctcggcttcgcgtttgtgtacaacgccctgggtgtgcctctggcggcaggggtactgtatccgttcaccggattattgctgtccccgatgatcgccgcactggccatgagcctgagttcggcatcggttatcaccaacgcgctacggttgcggaacgtgaaaatctgac

SEQ ID NO: 275165 - DNA, 1215 bp, Unknown
  Bacterial polypeptide expressing nucleotide sequence isolated from the Sargasso Sea
ggttcgtgcccgccgtcatgctggccgccgtgctgaccttcctggtctggctggtgttcggcccgtcgcccgcgctgtccttcgcgctggtcaatgccgtggcggtgctgatcattgcctgcccgtgcgccatgggtctggcgacgccgacctccatcatggtcggcacgggccggggcgccgagatgggcgtactgttccgcaagggtgaagccctgcaactgctcaaggacgccaaggtggtggccgtggacaagaccggcacgctgaccgagggccgcccggtcctgaccgacctggagattgccgacggctttgaccgcaaccaggtgctggcgaaggtcgcctctgtcgaatcgcgctcggagcatccgatcgcacgcgccatcgtcgagtcggccgtggaaggtggcatcgcgctgccgacgatgacagacttcgattcggtcacgggcatgggcgtgcgcgccaccgtggacggcgcgcgtgtcgaggtcggtgccgatcgcttcatgcgtgagctggggttggacgtgagcggcttcgctcgcacggccgagcgcctgggcaatgagggcaagtcgccgctgtacgccgcgatcgacggccgactggccgccatcatcgcggtggccgatccgatcaagtccagcacgcccgcggccattgccgcgctgcaccagctcggcctgaaggtggcgatgatcactggcgacaacgcgcgtaccgcgcaggccatcgccaagcaactgggcatcgacgaggtggtggccgaagtgctgcccgagggcaaggtcgaagccgtgcgccgcttaaaggccacccacggccagatcgcctacgtgggtgacggcatcaacgatgcgccggcgctggccgaggccgacgtgggcctggcgatcggcaccggcaccgacgtggcggtggagtcggccgacgtggtgctgatgtccggcaacctgcagggtgtgcccaacgccatcgcgctgtccaaggccaccatcggcaacatccgccagaacctgttctgggcgtttggctacaacacggccctgatcccggtggccgctggcgtcctataccccgcatacggtgtgctgctgtcgccgatcttcgcggccggagcgatggcgctgtccagcgtgttcgtgctcggcaacgcgctgcgcctgcgccgcttccagccgccgctggcggcggataccgctcattgag

SEQ ID NO: 275166 - DNA, 2278 bp, Unknown
  Bacterial polypeptide expressing nucleotide sequence isolated from the Sargasso Sea
atgtcgcagataaaactctatgtcgccaccatgaattgtgcagggtgtgtggccaaaattgaaaaggcctttgcggccgagccgaatgtgagtgcccgtatcaatctcgccgataaacaagtgactgtcgatggcaagatgagcagcgataaggcactggcagtcatggataaggcgggttatcccgcccagttgattgtggacgcaaaggcggccgctgaggaaaaacgggtcgaagatgcggcggagtatcgcctgcggatgcgtcaggccatcgccgcgctcgctgttggtatccctatgatgttatggggattactgggcggcgaaatgatgattaatagccctagcatgcagcttggctggggcattatgggcttagttaccctagcacttttagtcggtaccgggcgccatttctatcagggaatgtggcgcgcgcttaaagccaaaaccaccaatatggataccttaatcgtgttaggtactagcacggcatggctctattccatgctggtggtgcttatccctagtgcgtttccaatggacacacgccacgtgtactttgaggcgagcgtgatgatcttaggcttaattaacttaggccacgccctagaactcaaagctcggggcaagaccagcgaagcggtgcagcgcttgctcggcctgcaatcttctaccgcgattcgtattggcgacaatggcgatgaagaggtggaaatcgaccagctcaaactgggggataaactcagacttcgccccggcgacagggtcgcactcgatggcgtagtggagtccggccaatcattactcgatgaggctatgctgacgggggagcctattcctgtgcctaagcatgttggggataatctcagcgcggggacagtcaatggtaacggcagtttagtctaccgagtgaccgcagggcagcaggatacgcgccttgccaaaatcatcgcactggtgcaggaggcgcaaacctctaagatgccaattggccgtctagccgataaaatttcggcggtatttgtgccaacagttgtggtcatcgccttactcgcggcggcgatttggtatcttgttgggccagaacccgcgctcagtcatgcacttgtggtgctcaccagcgtgctgatcatcgcctgtccctgcgccttaggcttagcgacacctatgtctatcatggtgtccgttggccgcgccgctcaaatgggtgtattggtaaaaaatggtgaagcactgcaaagcgccagcaaggtcgattgtgtggtgctggataaaaccggtacagtgactcagggtaaaccccaagtgaccgatatccattggagtgaaggtaatgaccaagctcctaatgaccaagcactcagtgatgaagacaagcgcgcgctgcttggcgcaatcgccagtcttgagcagcattcagagcatccgctagctagcgcaatagtcagctatgttaagcaagcctcgattccattaccttcgaccgagatttttaccaatcatcaaggtaagggcatcgaagggcgagtcgatggcgccgactttttagtgggtaatcaagctttaatggcggcatttgatgtgcagtcagagaagggtgtcacaggcagccactcaggctttgcgatagaagccgccacgcaatttgccaaacagggcaagacggcgatttatgtcgccaaggcgggcaagttagtggccactatcgccattgccgatccgatcaaggccgacgctaaagaagccatccgcgccatccgctcacaggggattcgcgtggtgctgctgactggcgataatccgcaaacggcgcaggcggtggcagctcaagtgggcatagaggaagtgatagcgggcgtgttacccgagcaaaagcaacagcatattaaagccttacaacagcaaggctatgtggttgccatggtgggggacggtatcaacgatgcgcccgccttgatgagcgccgatgtggggatcgccatgggatcgggcactgaggtggcgatcgaaagcgcagatatgactctgctgtcgcagcagctgatagtgattgctaacttattggcactttcccgcgcgaccattcgcaatattaagcagaacctgtttggggcctttatctacaacagtttaggtattccagtggcggcgggcgtcttgtatccgcttacgggtatgttgttaagccctgtgattgccggggcggcgatggcgctgtcttccttaactgtggtcaccaatgcgaaccggttaagacagcaaaaattgtaac

SEQ ID NO: 275167 - DNA, 1270 bp, Unknown
  Bacterial polypeptide expressing nucleotide sequence isolated from the Sargasso Sea
catgagctgcgccagttgtgtgacccgtgtacaaaatgcattgcaaagcgtaccgggtgtcacccaggcacgggtaaacctggcggaacgcactgcgctggtaatgggcagtgcctccgccgcagatttagtgcaggcggtagaaaaagcaggctacggcgcagaagccattgaagatgatgctaagcgccgcgagcgtcagcaagaaaccgccgtggcaaccatgaaacgttttcgctggcaggcagccgtcgcgctgctgctgggtatccctgtcatggtatggggaatgattggcgacaacatgatggtgagcgatgacaaccgcagcctgtggctgacgattggtctggcaacgcttgcggtgatggttttcgcgggcggtcacttttaccgcaatgcgtggaaaagcctgatgaacggcaccgcgactatggatacgttggtcgcgctgggtacaggggtggcatggctctattccatgagcgtcaacctctggccgcaatggttcccgatggaagcgcgacacctctattatgaagccagcgccatgattattggtctgattaacctcggacacatgctggaagcgcgggctcgccagcgctcatccaaagcgctggaaaaactgcttgatctgacgccacccaccgcacgcgtcgttactgacgaaggtgaaaagaacgtgccgctggcagacgttcaggcgggaatgttactgcgcctgaccaccggcgaccgcgtgccggtcgatggcgaaatcacccagggcgaagcctggctggatgaagctatgctcaccggtgagccgattcctcagcaaaaaggtgaaggcgatagcgtccacgccggtacggtcgtacaggacggcagcgtgctgttccgcgccagcgccgttggcagtcacaccacgctgtcacgcattattcgtatggtgcgtcaagcgcaaagcagcaaaccggaaattggcaaactggccgaccgtatctcctcggtgttcgttccggtcgtggtcgccattgcgctggtcagtgcggctatctggtatttctttggaccagcaccgcagattgtctatacgctggtcattgccaccaccgttctgattatcgcctgcccttgtgcgctgggtctggcaacgccgatgtcgattatttccggcgtggggcgtgccgctgagtttggggtactggtacgcgatgccgatgcgctgcagcgcgccagcacgctcgatactctcgtctttgataaagaccgggacgctgactga

SEQ ID NO: 275168 - DNA, 2407 bp, Unknown
  Bacterial polypeptide expressing nucleotide sequence isolated from the Sargasso Sea
cctgcaaaaagccggcgacaaacaggcatcgaaggaatggtcgattcccatcgcggggatgacgtgcgcctcgtgcgtcgctcgcgttgagaagggtctggctaaagtgcctggcgtcacgcatgcagcggtcaatcttgcgaccgagcgtgccagtgttacggctggcgccgcggtgccgcaagatgccatcgtcgatgcagtaaatcgcgccggctatgaagtgcccatgaattccgccaccctcgacatcaaggggatgacgtgcgcgtcttgcgtctcgcgcgtcgagaaagcgctcttgcggctgcctggcgtatccgctgccgtcgtgaaccttgctactgaaactgcgacggtgactagcatgggagtgaacgatgacgcattagtcgctgcggtgatcaaggccggatacgaagctgcccagcatgttgacagcagtgccaggcccgcaccgtctcgttttgacgccgacatgctggctgtcatggcatccgctctcctgagcgtccctctcgtcgtaccgatggttgcggatctgttcggcgcccacgcgatgcttccggcgtcggcccaattggcgctggcgactgtcgtgcagttcgtttttggcgccagattctataaggctgcctacaaagcggtgctggccaaagctgggaacatggatttgctcgtcgcgctgggaaccaccgcagcttacggtctcagcgtctacgagctcatcgcgcatcccgggcaaatggatcacctttacttcgaggcgtcagccgtcgtcattacgcttgtccgattcgggaagtggttggaagtactcgcaaagcgcaaaaccacagacgcgattagagcgctcaacgcattgcggcctgaaacggcgcgcgtgcgcgtggcaggcgaagagaaagatatcgcgttgtcgagtgtccgtgccggcgaccaggttgtggtgcgccctggcgggcgaatcccggtggacggaacaatcgttgaaggccagagcgatgtagacgagtcactcataacgggagaaagtttgcctgtggcgaaggctgttggagacgcggtcgtgacaggctccatcgttggaaacgggtatctgttgcttcacaccacggcagtcggcgcggacacgatgctgtctcgcattatccgtattgtcgagtcggctcaagccgggaaggcgccgatacaaaggctggtggaccgcgtcagtgctgtattcgtacccgtcattttaggtattgcgctcgttacgctggtagggtggctgctggcaaatggaaacgttgaagcagccattctgaatgccgtcgcggtgctggtcatcgcctgcccgtgcgcgctagggctagcaacgcccacggcgataatggcgggcaccggcgtagcggcacagcatggcattctcatcaaagacgctgaagcgttggaactggctcatcgaatcaccgttatcgcgctcgacaagacgggtacattaaccgagggaaagccgagcctcgcgcagttcgtggtgaaccagattccgcacctcgatgctttgcagctggcggcatcggtgcaacaggcaagcgagcatccgctggcccgggcggtggtaaatgctgcgcatgagaaagggctgacgctgagtcgcgcaagtgatgtcacggctctgaccggccgaggtatcgaagcgacggttgatggacgcaggctcgttatcgcaagcgaacgatggctcctgggaaacgcagtcgttgtctcttccgaacttgagcttgtcggcaagcaggcacaggaagccggcttctccgtctcgtggctagtccaaactcagccggccaccaaggttctggccatgatggcgttcggcgatgcaatcaagaacacatcgccaggcgccatccgcgcgctttcggcgttgggcgttcgggcggtgctccttactggggataacgaggggagcgcgcagcttgtggcaaaggaactggggataaacgatgttcgtgcgtcgttgctgcccgaagataaggcaaaagcagtggctgcgttgaagaacgacggcacgactgtcggcatggtcggggacggcatcaacgatgcgcccgcactcgccgcggctgacgtcggtatcgcaatgtccaccggaaccgacgtagcaatgcatgctgcgggcgtgacacttatgcgcggagacccggcacttatcgcagacgctatcgacatctcgcgcaggacgtacagcaagattcgacagaacctgttctgggcattcgtctacaacctgattggcgtgccgttggcagcgttcggcctgctgaatccaattgtagcgggagcggcaatggcattcagcagtgtcagcgttgtgagcaatgcgctgcttcttcggacctggaaaccgcgtccccgaggggtatga

SEQ ID NO: 275169 - DNA, 2197 bp, Unknown
  Bacterial polypeptide expressing nucleotide sequence isolated from the Sargasso Sea
tgtgccagttgcgttggaaaaatagaagctgccttgaagcagacgccgggagtgcagaatgccgaaatgaactttgcagacagaacagtacttgtatcgggtacagcggattctcaattattggttcaagcagtagagtccgttggttacaacgcaaagcctttcgaagataagcctgacactgatgtagtcgatgaaaaagaagcagcggataggacctattacaaaaagctgatgcgagatactttcattgcgctttcgctaggtatccctctaatgacttatagcattgttgtcgacgaaatgacggtcgagactaatgtcgagaggttgttgtggctagcagttggcctactgacgctgggtgtaatgttcttttccggccggcatttttacatcggtgcgtggaagagctttaaaaatcattctgccaatatggatacactcattgcacttggtacaggcacagcatggttctattcgatgttggtagtgttggtacctgaagcagtgccgttaatggcaaggcacgtttattttgaagctacagctatgatcattggtctaattgatctggggcttgccttagaactaaaagcccgcggaaaaacctcagaagcaatcaaacgtttaattggattacaagcgaaaacagccacggttattcgcgacaataaagaggtccaggtcgctatcgagcaagtgctttttaacgatgtcatcaaagtcaggcctggagaaaaagtgcctgttgatggtgtggttgttgaaggccatacgtcaatcgacgagtccatgctaaccggggaaccgatgccagttgaaaaatcacatgacgatgaagtcgttgctggaactctcaacaagtcaggaatgtttctatttaaagcaactcgagtaggtaaagacacggcactggcgcaaatcattgcaatggttaaacgcgcacaaaattcaaagccgcctattgggcgcttggccgacgtgatatccgcttactttgttcctgtggtcatgattatatctgtgctcagtgcgctagcatggctgaactttgggcctgagcccgcactggcatttgccatagtttcggccaccactgtattgatcattgcttgtccatgtgcattgggcctagccacgccgatgtcagttatggtgggggttggaaaggctgctgaagccggcgtgctaattcgcaacggcgaagcgctacaaacggcatcaaaaatcagtgtgatgatactggataaaaccggaacgattacggaaggtacacccaaggtcactgacataattttagccaatttcagtgatgaaaagacagtgctgcaattggcagctagtctggaaaatggttcagagcacccattagcaatggcgatagtagaaagtgcccacgaccagggcattgagctgctgaaaaccgaagagtttaatgcgattaccggtatgggggttgaaggccgttgtgaaggaaaggccttattgtttggtaacagcaagcttatggcttcaaaaggggtgggcataggtaattattcagagaaagcacaaacactggccaaagacgccaaaactcccatgtatttcgctgtagatggacaacttgctgccatcatagcggttgccgacccgataaaacctgactctgtttctgccatcaagcgtcttcaggctaatgatatccgggtcatcatgttaacgggggacaacaaagaaactgctgctgcagtggcaaagaaagcggcaataagcgagttttttgctgaagtattgcccgaagataaggccaacaaagtacatgaattacagcagcagagagaagtagtgggtatgactggtgatggaattaacgatgctccggctcttgccttggctgatgttggctttgccattggtacaggaacggacgttgccattgaaagcgccgatatcaccctgatgcgcggctcgttgcatggtctggccgatgctatagcggttagtaaagccaccttgcgcaacattaagcaaaacttgtttggagcctttatctacaacgtagcaggtataccttttgcggcgggcgtgctctatccatttttcggagtattgctaagcccagttatcgccggagccgccatggcattttcttcgttaacagtggtatcaaatgcgaaccggcttcgcctattcaaggcaaaggaccactaag

SEQ ID NO: 275170 - DNA, 1498 bp, Unknown
  Bacterial polypeptide expressing nucleotide sequence isolated from the Sargasso Sea
gtaccgctgacgcatgtgcatgaaggtgatcctttacgcgtacgtcccggtgagaaagttcctgtcgatggcattgttgaagagggtgcaagttctctcgatgaatccatgttgactggtgaatcgttacccatcagcaagcgcccgggtgacaaggtcataggggcaacgatgaacacctctggtgcacttgtgatccgggcggagaaagtcggctcggccactgtgttgtcacaaattgtccagttggtggctcaggcccaacgctctcgggcgccgatgcaacggatggctgatttggtggcgggttactttgtcatggcggtggtagccatcgccatcctcaccttggtcgtgtggggcatgttcggcccgcagccaagctgggtctatggcctgatcaatgcggtcgctgttctgatcatcgcttgcccttgtgcgctggggctcgcaacgcccatgtcagtcatggttgctaccggacgaggcgcaacccagggtgttctgtttcgtgatgcagcagcaatagaaaatctgcgcaaagtcgatacgctcatcgtagacaagaccggcaccttgacagaaggccgacccgcattcgatcaggctgtttccgctggcgagttggacgccgatgaaatcttgcgcctggctgccagcctcgatcaaggcagcgagcatcctttggctgacgctattgtcagcgctgcgcgcgaacgtaatttggtgctcagcccagtggacgactttgactcgggtagcggcataggcgtacggggcaaggttgaaggcaaaataatgctgttgggcaacactgcgttcatgcagcaggataacgtcaatgttgatggcctggctgccaccgctgagggatggaggataaagggtgcgagtgtgatgtacctggcggttgacggcacactggtcggcctactcgccgtttccgaccccatcaaacaaagcacccctgaagcggtacaggcgctcaaggccgcgggaatcagggtcatcatggctactggtgacggtatttcaacggcaaaagcggtcgccgaacaactaggcatagacgaagttcatggcgaagtgaaaccggccgacaagctgaatctggttgataagcttcaatcagaaggttgcatcgttgcgatggcgggcgacggcatcaacgatgccccggcactggccaaggcgaatgtcggtatcgctatgggaaccgggacggacgtagcgatgaacagtgcgcaaatcaccttggtaaaaggagacctgcggggtatctcgattgcccgggacctgtcaaacaagactgttctcaatatgaagcagaaccttggttttgcgttcatttataatgcgttaggcgttccactggctgctggcgtcctgtacccgtttgccgggttgcttctatcacccatgtttgcagccctggcgatgagtctgagttcagcgtccgttgtattcaactcgctgcggcttcgtggttccgtttaag

SEQ ID NO: 275171 - DNA, 1726 bp, Unknown
  Bacterial polypeptide expressing nucleotide sequence isolated from the Sargasso Sea
gggttgtactcgatgacagttgtgttcttcccgggctatgtccctgaaatggcacgacatgtttattttgaggcaaccgctatgatcatcggcctaattaatttaggcctggcccttgagatcaaagcacgcggtaaaacctcagaggccattaaaaggctgataggcttgcaagccaagactgcacgtgtcatccgagatggcgatgatattgatattcctattgaagatgttttgctcaatgatcttatccgggttcgacccggagaacgcatttctgtggatggtgtagtcgtcgagggccaaaccagtattgatgaatcaatgctaacgggtgagcccatgccaattgagaagcgaaaagacgatgaggttgtggccggtaccatcaacaaatcaggctctatcgtctttcgggcagaacgcgtgggaaaagacaccgcgctagctcagatcatcaacatggtaaaacgtgcacaaaattcaaaaccacctattggtcgattggcagatgttatttctgcctatttcgtgccagttgttatgatcattgcagtaatgagcgcactagcgtggctcaattttggtccggctcccgaggttgccttcgcaatcgtgtcagcaactacggtactgattattgcatgtccttgcgcattaggtttagccacgccgatgtcggtcatggtgggggttggcaaggcggctgaagcaggcgtacttatccgcaacggtgaagcgctgcaatctgcttcgaaaattaccacaatggtattagataagaccggcaccataacagagggggcgcctaaagttaccgacgttgttattgcgtcagatcacaatcaagatgacgtgctttcgttagctgcaagcctggagtcgggttccgaacacccactcgcaatggcgatcgttgaatcagcgaaagagacaggtgtgccgatccactcggtgactgattttgagtccattgcagggaagggcgtagcggcaacactgaattctcagcgtttgctatttggcaatgaaaaattgatgaaagaaaaatcaatagaacttcatcattacgttgataaagcgcagaggctggccgcagaggctaaaaccccaatgtatttcgcgattgattcaaaattagttgccgtcattgctgttgccgatcccataaaatcagactcaatagatgcgattaaccgcctacagcacaacggaatacgtgtggtgatgttgacgggggacaatcgtatgactgcaaaagccgttgctcgaaaggcggggattgttgattacgttgctgaagtgatgccagaagataaagcaaacaaagtgctcgaacttcaacgtgagggtgaaatcgtcggaatgaccggcgatgggatcaatgatgcgcccgccttagcccatgccaacgtcggatttgctatcggaacaggcactgatgtcgcaatagaaagtgcagatatcacgttgatgcgaggctccttacatgggttagcggatgcgattgcagtgagtaaggcaacgctgagaaacataaagcagaatctcttcggagcatttatctataacgtcgcggggatcccatttgctgcaggtgttttttatccatttttaggcttactactaagcccagtaattgccggtgcagcgatggcattctcgtcgttaacggtagtgaccaacgcgaatcgattacgtttattcaaagctaaagagcactagg

SEQ ID NO: 275172 - DNA, 1756 bp, Unknown
  Bacterial polypeptide expressing nucleotide sequence isolated from the Sargasso Sea
gatggggacgggggtcgcctggatctacagcgtcgtcgcgacgctcgcgcctcagctgttcccgcctgccttccgcggcgaggacggcatggttgccgtctatttcgaggccgccgcggtgatcaccgttctcgtgctgctcggccaggtgctcgaactgcgcgcgcgtgagcggacctcgggcgcgatcaaggcgctgctcaacctcgcgcccaagaccgcgcgccggatcgccgccgacgggagcgaagaggagatcagtctcgatctggtcgcggtcggcgaccgcctgcgcgtgcggccgggcgagaaggtgccggtcgacggcgtagtcgaggacggccgctcctcgctcgacgagtcgatggtcaccggtgaatccatgcccgtcaccaaggccaaggccgacacggtgatcggcggcacgctcaaccagaccggtgcgctggtgatcgtcgccgacaaggtcggacgcgacaccatgcttgcgcggattgtccagatggtcgccgaggcgcagcgctcgcgcgcgccgatccagcgcatggccgatcaggtgtcgggctggttcgtgcccgtggtcatcgcggttgcggtggtcgcgtttatcgcctggggtatctggggccccgagccgcgcttcgcctatgggctggtggcggcggtcgccgtgctgatcatcgcctgtccctgtgcactgggtctcgccacgccgatgtcgatcatggtgggcgtcggccgcggcgccggactcggcgtccttatcaagaatgccgaagcgctcgagcatatggagaaggtcgacacgctcgtcgtcgacaagacaggcacgctgaccgaaggccgccctgccgtcacccaggtcgtgccggcgcccggcttcgacgaagccgagttgctgcggcttgccgcctcggtcgaacgggcttccgaacatccgctcgcgctggcgatcgtcgaggctgcgaaggatcgcgccatcgccacgagcgacgtcaccgacttcgactcgccgaccgggcgcggcgcgctcggtacggtcgaagggcggcgcatcgtcctcggcaatgcgcggttcctcgccgacgagggcgtcgccaccgaggcgctcgccggccaggccgacgcactgcgacgcgatggcgccaccgcaatcttcatcggaatcgacggcaccgtcggcggtgccttcgccatcgccgatccggtgaaggccacgacgccagaagcgctcgccgcgctcaaggcggagggtattcgcgtggtcatgctgaccggcgacaaccgcacgacagcggaagcggtcgcccggcgcctgggcatcgacgaggtcgaagccgaggtgctgcccgatcagaaaagcgccgtggtcgccaagttcaagcgcgaggggcgggtggtcgccatggccggcgacggtgtcaacgacgcccccgcgctggccgccgccgatgtcggcatcgccatgggctcgggcaccgacgtcgccatcgagagcgcgggcgtgaccctgctcaagggcgacctcaccggcatcgtccgggcgcgtaagctcagccaggcgaccatgtcgaacatccgccagaacctcgtcttcgccttcatctacaatgtcgcgggcgtgccggtggcggcgggcgcgctctatccgctgttcggcatcctgctctcgccgatcatcgcggccgccgccatggcgctctcctcggtcagcgtggtcaccaacgcgctgcgactcaaccggaaggcgctgtga

SEQ ID NO: 275173 - DNA, 2491 bp, Unknown
  Bacterial polypeptide expressing nucleotide sequence isolated from the Sargasso Sea
cctgaagacagaagatgcttcggtatgcataaggagagttactgtgaaaaatgacaatgcagtgcaacacaacaaccagactgcttctgagcagacattatccccggacgagggccacgtattgcataaggtgagagatcccgtgtgcgggatggccatcctgcccgacagggcgcacagcagcattcgataccaggaccatcaactttatttctgctccgccagctgtgagagtaaatttaaagcccatcccgatcgttatcttaccgaagatgcctgtgaacattcccatcaccatcaccacgatcatcacgaagtcagccctgatcagataaaacagcctcaccaccaggcggaaaaagagaattctgaaggtgtgtggacatgtccgatgcacccggagatacgccgcaatggtcccggaagctgtcctgtctgtggaatggcactggagccgctcgtagctacggcatccacggggccgagtgatgaacttcacgacatgacaagacgcttctggctggggttgttgctggcgtttccggttctggtactcgaaatgggatctcatctgtttcccgacttgaggaatacagtaccgccacagtacaacacatggctgcagctgcttctggcctcccctgtcgtgttgtggtgtggctggccattcttcgcccgggccggaatgtcgttacgtaaccgctccctgaatatgtttacccttgttgcaatggggaccggcgtagcctgggtttacagcgtcattgcaaccgtcttcccctcctggtttcctgcatcgttcagaaacatggatggcctggtggccgtttattttgaagccgcagcagttattacggtgcttgttctgctgggacaggttcttgagctgcgggcacgggaacaaacctcaggcgccattactgcgcttctgaaccttgcccccaaaaccgccagacggctggatcatgacggtcatgaaacggatattaatgcggaagatgtcctgccttgcgataagctccgcatcagacctggagagagtattccggtcgacggtatcgtgatcgaaggcaaaacaaccgttgatgaatcgatggtgaccggggagtctatgccggttaccaaaacgaagggtgaccctgtcattggggggacgattaatcagacaggtagtcttatcatccgtgcagagaaagtcggtgatgaaacgatgctctcacgaattgttcagatggtcgctgatgcacagcgttcgcgtgcccccatccagagaatggctgacagcgtttcaggctggtttgttcctctggtgatacttatcgcggttgttgctttcgtgatctggtctgtctgggggcccgagcccaggatggcgcacggtctgattgcggctgtgtcggtcctgattattgcctgcccctgcgcactggggctggccacaccgatgtcgataatggtgggggtaggcaaaggagcccagggcggggtgttaatcaggaatgccgaagcccttgagcgtcttgaaaaagtggacacgctggttgtcgacaaaacaggcacgctcacggaaggttcgcctacggtgacagggattatcagtctcaatccgggtggggaagcatctcttttacgtgtagcggccgcagtggaaaaaggctcgcagcatccgctgggtatggctgtagtccgggcagcccagcacagggggatcatgatacccgcagtcagtgatttcaatgctccgtcggggaaaggtgtttcaggcgatgttgaaggtcaacgggttgttattggtaatgaactggctatgcaggaaaacagtatcgttattgataatcaaaaggccgttgcggatacgttgcggatggaaggcgctaccgttatctatgtggccacagatgggtaccttgcaggcctgatagctatctcggatcccgtgaaagcaaccacgccggatgcgcttaaagctttgcgtcaggcggggatccgcattgttatgctcaccggggataaccagcttactgctgaagcagtcgcacggaaactgggaatagatgaggttgaagccggggttctgcctgacggcaaaaaagcagtgataacccgactgaaagcgtctggtcatgtggttgcgatggcgggggacggtgtaaatgatgccccggcgctggcagcggctgacgtgggcatagctatgggaacgggtacagatgtggcaattgaaagtgccggagtcacccttctcaaaggcgacttgatgatactgaacagggcccgtcatctgtcagagatcaccatgaaaaatatccgacagaatctgttttttgcatttatctacaacgcacttggcgtgcctgtggctgcaggtctgctttatcctgtgtatggaatactgctgtcgccagttattgcggcggcggccatggctctttcctccgtcagcgtcattgtgaatgcgttgcgtctgaaaagtgtcaggctcgggaaataa

SEQ ID NO: 275174 - DNA, 2278 bp, Unknown
  Bacterial polypeptide expressing nucleotide sequence isolated from the Sargasso Sea
catgtcgcagataaaactctatgtcgccaccatgaattgtgcgggatgtgtggccaaaattgaaaaggcctttgcggccgaaccgaatgtgagtgcccgtatcaatctcgccgataagcaagtgactgtcgatggcaagatgagcagtgatgcggcgctggctgttatggacaaggcgggttatcccgctcaattgatcgtggacgcaaaggcggccgcagaggaaaagcgggtcgaagatgcggcagagtattgcctgcggatgcgtcaggccatcgccgcgctcgctgtcggtatccctatgatgttatggggattgctgggcggcgaaatgatgattaatcgccctagcatgcagcttggctggggcattatgggcctagtcactttagcacttttagtcggtaccgggcgccatttctatcagggaatgtggcgcgcgcttaaagccaaaaccaccaatatggataccttaatcgtgttaggtaccagcacggcatggctttattccatgctggtggtgcttattccgagtgcgtttccaatggatactcgccacgtttactttgaggcgagcgtgatgatcttaggcttgattaacttaggccatgccctcgaactcaaagctcggggcaaaactagcgaagcggtgcagcgcttactcggcctgcaatcttctaccgcgattcgtattggcgacaatggcgatgaagaggttgaaatcagtcagcttaaattaggcgataaactcagacttcgccccggcgacagggtcgcactcgatggcgtggtggagtccggccagtcattactcgatgaggccatgctaacgggcgaacctattccggtgccaaagcatgttggggataatctgagcgcgggaactgtcaatggtaacggcagtttagtctaccgagtgaccgctgggcagcaggatacgcgccttgccaaaatcatcgcactggtgcaggaggcgcaaacctctaagatgccgattggtcgtctggccgataaaatttcggcggtgtttgtaccaacagttgtggttatcgccttactcgcggcggcgatttggtattttgttgggccagaacccgcgctcagtcatgcacttgtggtgctcaccagcgtgctgatcatcgcctgtccctgtgccttaggcttagccacacctatgtctatcatggtgtccgttggccgcgccgctcaaatgggcgtattggtaaaaaatggtgaagcactgcaaagcgccagcaaggtcgattgtgtagtgttggataaaacaggcacagtgactcagggtaaaccccaagtgactgatatccattggattgaaggtaatgaccaagctcctaatgaccaaaaattcagtgatgaagacaagcgcgcactccttggcgcgatcgccagtcttgagcagcattcagagcatccgctagctagcgcaatagtcagctatgttaagcaagcctcgattccattacccgcaaccgagatttttaccaatcatcagggtaagggcattgaagggcgagtcgatggcgccgactttttagtgggtaatcaagccttaatggcggcatttgatgtgcagtcaggggagggcgtgacaggcaaccactcaggctttgcgatagaagccgccgcgcaatttgccaaacagggcaagacggcgatttatgtcgctagggcgggcaagttagtggccactatcgccattgccgatccgatcaaggacgacgccaaagaagcgataagcgcgatacgttcacaggggattcgcgtagtactgctgaccggagataatctgcaaacggcgcaggcggtggcagctcaagtggggatagatgaagtgatagcgggcgtgttacccgagcaaaagcaacagcatattaaagccttacaacagcaaggtcatgtggttgccatggtgggggatggtatcaacgatgcgcctgccttaatgagcgccgatgtggggatcgccatgggatcgggcactgaggtggcgatcgaaagcgcggatatgactctactgtcccatcagctgatagtgattgctaacttattggcactttcccgcgcgaccattcgcaatattaaacagaacctgtttggggcctttatctacaacagtttaggtatcccagtggcggcgggcgttttgtatccgctcacgggtatgctgttaagccctgtgattgcaggggctgcgatggcgctgtcttctttaactgtggtcaccaatgcgaaccgtttaagacagcaaaaactgtaa

SEQ ID NO: 275175 - DNA, 2776 bp, Unknown
  Bacterial polypeptide expressing nucleotide sequence isolated from the Sargasso Sea
atgcattgcggcggctgtacgggccgcgtgcaacgggcgctggccgcggtaccgggcgtcgtcgaggcgacggtcgacctcgacacgcacacggcggctgtgacggcgcacgatacggtcgacgccgcacaactcgtcgaggcggtcggtacagccggctacggcgccgccgtgcgcgacccgctgcccgaagacgctgcgacgccgcatgcccatcctgtcgaagcatcgcccgcgccgatggccgccgccgcttcgactgcccgccacccgcttccggccgacagcaccatcatcgaactcgatatcgacgggatgacctgtgcatcgtgcgtgtcgcgcgtcgaaaaggcgctcgcgaaggtgccgggcgtcacgcgcgcgtcggtcaacctcgcgaccgaacgggcaaccgtcgacgccgcgtccgacgtgactgccgcccggcttgccgaagccgtgaaacaagccggttatggcgcgacgccggtggccggcgccgcgatcccgccggcagcctccaacgcccccgccgatctcgaactcgacatcggcggaatgacctgcgcctcctgcgccggccgcgtcgaaaaggcgctggccgccgtgccgggcgtcgcgggcgtttccgtcaacctcgcgaccgagcgcgcttccgtacacggcgccggtgcgctcgacgccgcggcgctgatcgcggccgtcaccaccgccggctaccgcgcgtcgctctccgccacatcatcagccggtgccgccggggctgacgcgcaaccggccggccccgcgcaagaccccgacgtccgcaagcacctcgaagcgattcgcgaacgcgatctcgtgatctggtccgccgtgctgagcgcgccccttgtcgcaccgatgctcgtcgcgccgttcggcatcgacctgatgctgcccggctggctccagctcatgctcgcatcgatcgtccagttcggctacggcgcgcgcttctatcgcgcggcctggcatgcggtgaaggcgcgcaccggcaacatggacctgctcgtcgcgctcggtacgtcggccgcgtacgggctgagcctgtggatgctgctgcgcgcccccctgcaccccggccacctgtatttcgaggcgtcggccgtcatcgtcacgctggtgcgcttcggcaagtggctcgagtcgcgcgcgaagcgccagaccaccgacgcgatccgcgcgctgaacgcgctgcgtcccgaccgcgcgcgcgtcatcgagcacggcgtcgagcgcgacgtgccgctggcgcaggtgcgcgtcggcacccgcgtcagcatccgtcccggcgagcgcgtgccggtcgacggccggatcgtgacgggccgctcgcacatcgacgaatcgctgatcaccggtgaaagcctgcccgtgccgaaggacgacggcgaccccgtcacggccggctcgatcaacggcgaaggcgcgctcgtcgtcgaaaccaccgcgatcggcgcggaaacgacgctcgcacgcatcatccgcctcgtcgaatccgcgcaggccgagaaggcgccgatacagcggctcgtcgatcgcgtgagcgaggtattcgtgccggcgatcctcggcatcgcgttgctgacgctgatcggctggctgatcgctggcgccggcacggaaaccgcgatcctcaacgcggtcgcggtgctcgtcattgcgtgcccatgcgcgctcggcctggcgacgcccgccgcgatcatggccggcacgggcgtcgcggcccggcacggcgtgctgatcaaggatgcgcaggcgctcgaactcgcgcagcgcacgacggtgatcgcgttcgacaagaccggtacgctgaccgaaggcaagccgtccgtgacggcgttcgaagcggtcggcgtgccgcatgacgaagcgctcgcgctcgcggcggcggtgcaacgccagagcgaccatccgctcgcgcgcgccgtggtcgccgcgcacgaagccgaactggccgcacgcggcggtgcggtgtcatcgcccgtcgccgccgatgcgcgtgcggtggccggacgcggcgtggaagcacgtgtcggcggacagttgctcgcgctcggcagcacgcgctggcgcgacgaactcggcatcgcggtgccgcccgcgctcgatgcacgcgcagcggaactcgagcgcgcgggcaacacgatctcgtggctgatgcgcgccgacgcgccgcgcgcgttgctcgcgctgatcgctttcggcgataccgtgaagccgggggcccgcgacgcgatcgcggcgctgtcggcgcgcggtgtcgcgagcgtactcgtgacgggcgacaaccgcggcagcgcggccgccgtcgcggcgtcgctcggcatcggcgaggtgcatgcgcaggtgctgcccgacgacaaggcgcgcgtcgtcaccgagttgaagcgcacgcacggcggaatcgtcgcgatggtcggcgacgggatcaacgatgcgcccgcgctcgcggcggccgatgtcggcatcgcgatggcgaccggtacggatgtcgcgatgcacacggccggcatcacgctgatgcgcggcgacccggcgctcgtcgccgacgcgatcgacatctcccggcgcacgtaccggaagatccagcagaacctgttctgggcgttcgtctacaacctggtcggcgtgccgctcgcggcgctcggctggctgaacccggtgatcgcgggcgcggcaatggcgttttccagcgtcagcgtcgtgaccaacgcgttgctgttgcggagatggaaggggcgcgcggggtgac

SEQ ID NO: 275176 - DNA, 2407 bp, Unknown
  Bacterial polypeptide expressing nucleotide sequence isolated from the Sargasso Sea
atgtcagacgaacatattgtccatcactcccacccagaagcgcttgccggaggtcccattgaggcagcgagggaggatgtcaccgaccctgtttgcggaatgcgcgtcggttcagccaccgcgcgctctatcgaattcaaagggacaacctactatttttgcagcacaaagtgcggcgatgcgtttcaggcggagccggcaaaatatgttcatgtatcggaccgcccccagccggcgcccgaaagaaaacccggcgtcatttatacctgcccgatgcacccgcaggtgcgtcaaccggctccgggcaactgccccatttgcgggatgacgcttgagcccgtcatgccggcggctaccgaggagcgcaatcccgaactggaatcgatgacacgccggttctgggttgcgctggtgctgtcaatcccgctcctgtggatcacgacgggcgctatgctcccctcgcttgacctcggcgcactcatcaatcgccttggtgccagtctggcctggccgcatctgatgtcggtgacctgggcgcagtgtgcccaagcgttgcttgccacgcccgttgtgctatgggcgggatggccgtttctggaacgcggctggcgctcgttcgtaacgtggcaactcaacatgttcagcctgatcgggctgggtgtggcggtcgcctatgttttcagcctcttcgccttgttcttccccgcgcaattgccgcaggctttccggcaaggtaacgagcttccgctttatttcgaagcggcgtcagtgatcgtgacgctgattctgctcggtcaggtgcttgagttgcgtgcccgatcacgcacgtccagcgcgatccgggatctgctcagtcttgcgccgaacacggcatttcgggtcaatgccgatggcaccgaagaggaagtgggactcgatgtcgtggcagtcggcgatgtgctgcgcgtgaagcccggctcgaaggtgccggttgatggggtggttattgaaggtcagtcgagcatcgacgagtcgatgattaccggtgagtcgataccggcagagaagtcggccggtagcaaggtgactggcgctaccgtgaaccagacgggcgcattcctcatgcgtgcggaaaaggtcggtgcggagacgttgctcgcgagaattgtccagatggtggccgatgcgagccgctcgcgcgccccgatccagaagctggccgataaggtgtccgggtggttcgtgctcgccgtcctggggatcgctgcgttgtcatttgcggtgtgggcattggttgggccggcgcccgcgcttgcgcatgcgctggtggccgcgatcagcgtcctgattatcgcgtgtccgtgtgcactcggactggcgacgcccgtgtcgatcatcgtcggtgtcggccggggtgcgaaggagggtgtgctgatcaaggatgcggaggcgctcgaactgatggaaaaggtcgacaccttggtggtcgacaagaccggcacgttgaccgaaggcaagccgcaggtgcaggccgtcgaagtgctcgccagcatgtcggaggctgacgtgctgtcttactcggcaagtcttgaagggctaagcgaacatccccttgcgcaggccatcatcacccgggcgaaggctgccgatgcgccagtcctcgcggtgcgggatttcgcggctgtgcccggaaagggcgtgacgggcaacatcgacggccgtgcggtgctgctcgggaatgcgcacctgatggaggataaccacgtcgaccttgcggttctcaatgagcgggccgaagcgctgcgcgaacaggggcagacggtgatgtacctggccgtcgacggcaaactggcaggttgcgtcggggtcgccgattcagtcaaagctacgacacccgaagcaatccggctgctgcgcgcgtccggcgtgaaaatcatcatgctcaccggcgataatccggtgacggccaacgcggttgcaaaggcgctgtcgctcgatggggtcaaagcgggcgtgttgccgcaggacaaatacaagcacgtccaggagttgcagaaccaggggcgcatcgttgcgatggcaggcgacggtgtcaacgatgcacctgcccttgcgcaggccaatgtcggtattgcgatgggaaccggcacggatgtcgcaatgagcagcgcgcgcgtggtgctcgtcaagggcgacttgcggggcatcgcgaaagctcgcgcactgagcgtcggcacgatgaagaacattcggcaaaacctgttcttcgcgttcgcctacaacgtgatcggcatcccgatcgccgccggcgttctctatccgtggttgggcatcctgctcagccccattatcgcgagcgccgcgatggcgttgagttccgtgtcggtgatcggaaatgcgctccggctgcgcgcggcgaaagtctagg

SEQ ID NO: 275177 - DNA, 1417 bp, Unknown
  Bacterial polypeptide expressing nucleotide sequence isolated from the Sargasso Sea
gctgaccaagggtttcgaatcatacgagaagccctctgaccgcctgaagcgcagtctgtttggcctctttggtgcaatagcaccgataccttcaatgcggcgagcgctgttcaagcgagcgcaaggctgcgttcgcacgttctgggcactcaagggtgtggacttcgagatcgctcgcggggaaacagtcggcatcatcggtcgcaacggatcgggcaagagcaccttgttgcagatcatctgcggcacgcttgcgccgacaggcggtgaagttcagacgcaaggccgaattgccgcgctgctcgaactcggctcaggattcgacgtcgagtacaccgggcgtgaaaacatctacatgaacgggcaattgcacggtctgacccgcgagcaaatcgatgcgcgactagaccagatcatcgctttcgcggatatcggtcagttcattgaccagcccgtgaaaacctattcgagcggcatgttcgtccggcttgcgttcgccgtcatcgctcacgtggacgcggacgtactggtgattgacgaggcgctatccgtcggcgatgcgtttttcacgcagaagtgcatgcgcttcttgcgtcggttccaacaaaccggaactgtgctattcgtcagtcacgactcgtccgccgtccgcggtctgtgcaaacgtgtgatctggttggatcgcggtgtaattcgagagtccggcgaagccaaggatgtttgcacaagctatttcgaggcattttaccgacagcagcaaggcgaaggtacgtcatgggcaaacccggacgatctcgacggaaccgaaagcaagcgcaaagcgcccgaaagtgtggcgcctggtcggggcacgcagacagccgaccagagacaacgatttgccgaatctggcggctcagccgcctcgccgctcgttgcactttatgtcgacccgcatagcctcgcgacacatcgagaccaccacctcatcgaggcagtgcaactgaccagcgaacaaggttcgccgatcagttggatagtcggcggcgaacgggtcctactgagaatccgagctcgaagaccagaatccggctccgcaccgatcatcgcctttttcgtgaaagacaggctcggtcaacccctgttcggcgacgacacctcgctcgtaaaaacaatcgaccatcaggcggcgcctttagctgagaagaacagcatcattgaggcggaatttctgttcgatatgccgattttgccgccgggcgagtacgcgttcactgcactggtcgcgaccggagcagcagctgcgcccaacgtgctggactgcctgcatgacgcactgatcatcaagtcggaatcagcaagtgttgcgacaggcctcattgggctgccgatgaccagcatcgctctctttgttcgagaagctgtagaggaagcttga

SEQ ID NO: 275178 - DNA, 613 bp, Unknown
  Bacterial polypeptide expressing nucleotide sequence isolated from the Sargasso Sea
gctggaaaatcgatggatctggaaggatctcaacctcaaggtagaggcagggtcgagaatcgtgcttatgggcccgaccgggtccggaaaaacattgcttcttcgggtattggcaggattggaaaacccggaccatggacaggtgttttttcaggaacgagatcaaaatcaatggaagatgccggaataccggactcaagtcacgcttcttacccagcgtccagcgtttcaggaaggaagcgtcgagcagaattggcggatgccgttcgttttccgggaacgaagcaatcaacagtatgaatccttacgtttcaagccatggctcaagatgctcgaactcccaaccgattttccccgtaaacagactgcggaactctccgggggagaaagacagttggccgcacttttgcggatgctccagtttgatccccatttgcttctcctggatgaacctgcctcagccctcgacgagtcaaaatcgaagaagatggaagaacttttgaacgactggcagatgcaggttcccggacgaacctggatctgggtgtcacatgattcccgccaggcagagcgggttggggatgaagttctggaattgggagcagtttcctga

SEQ ID NO: 275179 - DNA, 613 bp, Unknown
  Bacterial polypeptide expressing nucleotide sequence isolated from the Sargasso Sea
gctggaaaaccgttggatctggaaggatctcaacctcaagttagaggcagggtcgaggatcgtgcttaaggggcccaccgggtccggaaaaacactgcttcttcgggtattggcaggattggaaaacccggaccatggaaaggtgttttttcaggaacgggatcaaaatcaatggaagatgccggaataccggactcaagtcgcgcttctcccccagcgtcctgcgtttcaggaaggaaacgtcgatcagaattggcggatgccgttcgatttccgggaacgaagcaatcaacactatgaatcctcacggttcaagctatggctcgagatgctcgaacttccaaccgattttgcccttaaacagaccgcggaactctcagggggagaaagacagttggccgcacttttgcggatgctccagtttgatccccatttgcttctcctggatgaacctgcctcagccctggacgagtcaaaatcgaagaaaatggaagaacttttaaacgactggcagaagcagatttccggacgaacctggatctgggtgtcacatgattcccgtcagacagagcgggttggggatgaggtgctggaattaggagcagtttcctga

SEQ ID NO: 275180 - DNA, 565 bp, Unknown
  Bacterial polypeptide expressing nucleotide sequence isolated from the Sargasso Sea
gatgagtatcgccgctgaaaatgtgacctggaaagtcggtaaaaaggtcatcgtcaacaatgtctcgctcaacgtcgcgcccggtaagaccgttggattacttgggccaaacggttgtgggaaatcatcacttttacgcatcctggcaggattacgtcgcccggatatcggcaacgtgacgctggacggcaaaaccctatcccgtatacccaaaaagcaacttgcccgtcgggtagctttcgttgaacaacacggcatgaccgatgcaaacatgcgcgtgcgtgatgtcgtaaaacttggccgcattccccatcactcccccttctctaactggagcacgcacgacgacgaaacggtcaacgcggccttacagcgggttgatatgctggaaaaatgcgaacaaggctggctcagtttatccggcggtgaacgccagcgggtacatatcgcccgtgcgctggcgcaagcccccaccgaaattctactggacgaacccaccaaccacctggatattcaccatcaaatgcaattaatgcatctgatggtgaatatccaggtggttggt

SEQ ID NO: 275181 - DNA, 595 bp, Unknown
  Bacterial polypeptide expressing nucleotide sequence isolated from the Sargasso Sea
ttggccgccgaagcattaagctgtgtccgccaggacagagtgttatttgaaaacttaaattttcagttaagtgcagggcaagtgctttatattcaaggaaaaaacggtgccggtaaaagttcgctgttgcgactgctggcgggtttgactttgcctgaagacggtcagattttattccacggtaaacctctgcagcagcaaactgaattttttgccgaacaattgctgtttatcggccatcaaagtggcattcatcctcagctgaccgcattacaaaacctggcgttctggtctgctttatctgaacaagctatagctgatccatatgagttgttgggcgctttaggtttggcaggactcgaagatattccctgttttatgctctctgcaggccagcagcgccgcgtatctttagctcgtttatggtttaccaataaatcactgtggatactggacgagccttttacctcgttggatcagcagttgattgccaaactggaaacgcattttttacagcatctgtcagcaggtggcgttattgtcttgaccagtcatcagaatttgtctgcctcttatccggcccttcaggcagttg

SEQ ID NO: 275182 - DNA, 538 bp, Unknown
  Bacterial polypeptide expressing nucleotide sequence isolated from the Sargasso Sea
tatgattcttcaggtaaaaaatatatcaaaaagttttggtaaattaaaagtattagataatgtatcctttgatgtatctgaaggagaatacttagctttaattggaaaaaatggtgcaggcaagactacccttttaaatttattactaggattgtcatatcctgatagtggttctattaatttttttggaaaaactttagagaataatctaacctatatattaaataaaattggaattgtttttcaacaacacactttagattttgacttaagtgtcataaaaaatttaattttttatgcagatgttcatggcatgaaaagatcaatttcaaggcctaaaattgatgaacttttaatcaaatttgatttgaaagattttgaaaattataaagctagaaatttaagtggtggcatgaaaagaaggttggaaatttcaagagccttacttaaagatcctaaaatattaattttggatgaggcaacatcaggacttgatcctaatgctagagaaaaaattctgtttgatttaaaaaaactt

SEQ ID NO: 275183 - DNA, 917 bp, Unknown
  Bacterial polypeptide expressing nucleotide sequence isolated from the Sargasso Sea
tatggaggcgctttattactggtaactcatgatcgtgaatttctccaaaatgttgtaaacggaatagttgaactagatcgagggaatatctatcagtttgatggtagcttcgaccgctttttgcgctttcgcgaagaacagttagccgcagaggatactgccaataagttatttgataagaaacttgctgaagaagaggtttggattcgcaaaggaattaaggcaaggcgcacgcgcaacgagggacgtgtcagggctcttcaagcaatgcgagagagtaggaagagaaggagagaatcgctcgggaaggcaaagttcaaagctaacgtctccgaggattcagggaaagtagtagccgaactgactaatgtgagccactcatttggaaataagccaatcattgataatttttccacaacgatactccgaggagaccgaattgggattgttggaggaaatggtgctggtaaaactacgttactcaaaattttgttaaataaactaagcccagatgagggaaaggttaagttaggcacaaagatgaaaattgcctatttcgatcagctacgtgaatacttggacatggagaaaaatttagtagataacgtgagtgatggaggagacttcattgaaatcaatggaaaatcaaaacatgtcattagttatcttagtgaatttctattcacacctgatcgaattcgaacgcctgcaaaagcattatctggcggtgagcaaaatcgagctatactcgccaaagtattcagtaagcccgccaatgttttagttctagatgagccaactaatgatctcgacattgaaactctcgagttacttgaagatattcttatcaagtttgagggcacgatccttttggtaagtcacgatcgaaagtttatggataatgtagttacctcttt

SEQ ID NO: 275184 - DNA, 655 bp, Unknown
  Bacterial polypeptide expressing nucleotide sequence isolated from the Sargasso Sea
atgcttgaactgcgcaatgtcgtccacagctatccaggcgccaaccgcgccgcactgcaaggcatcgacctacaattgcaggccggcgaatgcctgggcctgctgggcagcaatggcgccggcaagaccaccctgctctcgctgctgagcggcgtgctggcgctacaacagggcgaactgcattggcaaggccaacccaggctcggcctggtgccgcaacagctggccttctatgccgggctcaaggtgggcgagaacctcgacctgtttgccgacctgtatcgcctgcgcggcacagagcgccgccagcgtctgcagcaatgcatcgacatctgcgccctggacgacaagctgacgcggcgcagtgagcaactctccgggggcgaacagcgccgcttgaatttcgccatcggcctgctgcaaccagctgacgtctatctgttcgacgaagccaccgtgggcgtcgatgccgccaatcggcagcacttgctggccgccgtggagcagctgaccgccgagggcaaggcggtgatctacaccagtcattacctggaagaagttgagcgtgtggcccagcgaatcctgctgctgcacgaaggtcaggtacgcctggatctggataaacgccagctgctcggcgacgaccacggcctgc

SEQ ID NO: 275185 - DNA, 484 bp, Unknown
  Bacterial polypeptide expressing nucleotide sequence isolated from the Sargasso Sea
atggcagctagtattaccctaaaaaaagtaggcaagttaataggtaaaaaaactattcttgctggactatcttttggaatagagaaaggcagcttagtagcgattgttggtttaaatggtgctgggaaaactactttactcaaattactatctgggtttgaaaatccaaattatggccaggttttcatccatggccttgatatgaataaaagaaggaatgaaacaagaaaattagtaggatatgtaccatatgaaaatgacttagatccatggctttctttgagggaaaatatactatttaatgcagaattatataaagttaataaagatatcgcatcaaaaagaattgaaaaattttcaagattattagattttagaaatcaattagatcgcactgctcataaagtatctggcggaattcataaaaagacaatgattgttagaggtcttgtacacaatcctgatatattgatattagatgaac

SEQ ID NO: 275186 - DNA, 790 bp, Unknown
  Bacterial polypeptide expressing nucleotide sequence isolated from the Sargasso Sea
atgagagcagttttttcacttaatgatttaacacttggatatgaacgtcatcctgctgtacatcatattacagggaattttttaccagggtcgttaacagcaatagtaggtcctaatggcgctgggaaaagcactctcttaaaaggtttaatgggattaattgatcctctagatggtcatataaaccaaaataaagcattatataaagaaatagcttatcttcctcaacaagctgatatagatagaagcttcccaatttcagttatggagacagtcttactcggtcactggaaaagaattggattatttcgatctgtcaccgataaaatgataaatgaagctgagaatgcaataaaagcagttggtatgaccgggtttgaaaaaagagtaatttcatcgctatcatctggccaatttcaacgtgttctatttgctcgaatgttgttacaagacgcaccaattatactcttagatgaaccatttacagcaattgacgctaaaacaacagctgatcttttaaatgtagtttttaggtggcatactgaaaaacgtacagtgatagctgtattacacgacatggatcaagtaagaaacaacttccccgaaacacttttgatttcacgtgaaccaattgcttggggacctacaaatgaagttttaataaataaaaatattacaaaagcaagactaatggctgaatcgtgggacgaacgtgaggaactttgtgatcgaaaatgtagctttaatgaatttttacgaattctttatagatccatttttaagctttgaa

SEQ ID NO: 275187 - DNA, 553 bp, Unknown
  Bacterial polypeptide expressing nucleotide sequence isolated from the Sargasso Sea
gagctggtgcaggtaacgggcgcgaacggcagcggcaagaccaccctgctacgggtgctctgtggcctgctggcaccggcaagcggctcgctcacttggcatggtgcgccagtgcgcagcggcgacgctgccttcctcaatacgctttgctatgttggccacaccaacggtatcgacccagatctcactgtgacggagagcctgcgtctggccctgcagttggccgggttgcgcgattcggcatccgagccgtttggcatcgggctcgcactggaagcgctcgaactcggcaagcttgccgccacgcccgtgcgcaagctctcgcaaggccaacgccggcgggtggcactggcgcgcttgctgctcgcgcggcgcgaactgtggctgctcgatgaaccgatcgcctcgctcgacgatcatgcagtcagcctcttcaccgcgcagctcgatgcgcacttgcgtgcaggcggcatggcgatcatggccacgcaccacctgctgtcgcgcccgcaaggggcgaatcgcgtgctcaggctgggaggcatcgcatgaa

SEQ ID NO: 275188 - DNA, 322 bp, Unknown
  Bacterial polypeptide expressing nucleotide sequence isolated from the Sargasso Sea
catgctgtacatgaagaacgtatcaacccactacggcaagattcaggcgctgcatgaggtcaacctggaggtccagcgcggcgagattgttaccctgatcggggccaacggcgccggcaagacgaccctgctgatgacgctgtgtggtgacccgcgggcaaccaccggcagcattcgctatgaaggcgaagagctgaccggactgaccaccgcccagatcatgcgcaaggacattgccatcgtcccagagggccgccgcgtattctcgggcctgaccgtggaagagaacctggtcatgggtggctttttcagcgacaaggaa

SEQ ID NO: 275189 - DNA, 262 bp, Unknown
  Bacterial polypeptide expressing nucleotide sequence isolated from the Sargasso Sea
atggataataatttatttaatctagataatatttgtcttactagacaagataaggaaatacttactaatatttcaatgaagatcaattatggggaacagttaaatatttttggaaaaaatggatccggaaagacctcgctgctaagaatactatcaggtattacttctccaacatcgggcaaagttaatgccacagagtcttttaatgcttgtaatgatatattttatatgggccataaatatggattaaacaataatctat

SEQ ID NO: 275190 - DNA, 799 bp, Unknown
  Bacterial polypeptide expressing nucleotide sequence isolated from the Sargasso Sea
ctgatacccaggccgttcccgccccgacggacacggcgacgaccgcggcggcccgcgaggcatcctccgaccaccgagcaggtgtggggcgtcaacgtcaacaacctggactggtcctacccgaacatcgacggcacccccatcgacggtcaggagccgctcatcaagggcatggacctcaagctcgcgcccggatcgtgctgcctcctgctcggcgcgaacggcgcggggaagacgacgctgctcaagatactcggaggtaagcacatggtccccaaggacaaggtgctcatccacggccgcgaggccttctacgacaccggactcaccacctccggacagctgtcctacattggcggcaactggcaacgcgacgtcgccttcgccggctatggcgtcaccctcgccggggacttccccgcgaggcagatgctcgactccatcccgaacgtggaccccgaacgcaaggcgcggatcatcaacgtcctggacatcgacccggagtggcgcatgcaccaggtgtccgacggccagcgcagacgcgtgcagctcgcgtacgggctcatgattccgtactctgtcctactcttggacgagatcaccgtggacctcgacgtgctgggcagggcggacctgatgtcgttcttgcgacgggagtgcgaggaacggaaggtgacgatcgtgtacgccacgcacatcttcgacgggctggagcagttcgcgacgcacgtcgctttcgtcgcggggggtcggcttcgtttttgcgagccgctcgacgcgatcgaggggctgaggtctc

SEQ ID NO: 275191 - DNA, 460 bp, Unknown
  Bacterial polypeptide expressing nucleotide sequence isolated from the Sargasso Sea
atgttgcgtattgaacggcttacataccggataggcccccggatactttttgaaaactctgaagtggctatcaatgaaggacaacgagtcgggtttgtgggccgcaatggcgcagggaaaacaacacttctcaatttgataaaaggaagtctaactccagatacaggtacaattaattttccccatcgttggcaaattggtattactgaacaagaagttccagaaagttcgctaaatcttattgacaccgtaatgagcgctgacaaagagcttactaggttggaaaaagagtctaagaccgcgaccgacccaaatcgtatagcagaaattcattctcgattgtatgagaaagaggcacatcgtgcgcattcaaaagcggctcgaattctttctggtcttggtttcgcggaatcggaaatacggcgtccgtgtaaagaattctctgggggttggcggatgc

SEQ ID NO: 275192 - DNA, 220 bp, Unknown
  Bacterial polypeptide expressing nucleotide sequence isolated from the Sargasso Sea
atggctgcgatccgccttcaagcaatcgaaaaatggttcggtgccctacaggtcatcaaggggctcgatctcgacatacaggagggcgagttcatcgttcttgttgggccgtccggctgcgggaagtcgacgcttctgcgtattctggccgggcttgaggatgccaccctcgggtctatcctgattgatgacgaggatgtgacagataggctgccgtcgg

SEQ ID NO: 275193 - DNA, 595 bp, Unknown
  Bacterial polypeptide expressing nucleotide sequence isolated from the Sargasso Sea
gatgaataatcatattttgaatcttaaaggtatttctgtcgagaagaatgacgtatgcatactagaagatataaatcttgaaatcaaacaaggtgattttttaaatatttacgggagtaatggagctggtaaaacaacattgttaaaactattatcgggtcttacggagcctacggctggtgagataaaatttaataatgatgattttatggacaaggtttttatacttgggcacaaaaatggcataaaacttaacttaacagttttagaaaatcttcaatttataagtaataatcaagatataaaaaaaatcaaatctgtaatcgagaaatacgagcttacttcaaaaatgaatacactcgctaaatacctctcgcatggccaacagaaaagagttgcgttaatgaaagccatgataaatgactatgatgtctggctactagatgaaccgtatagtggtttggatcaagctggtgaggagatccttgataacatccttcttgatcacattaaaaatagtggtgtggttgtcattacaaatcataaagaaattaaaaaagaaaaagttaatataaaaaattacaaaatagaatga

SEQ ID NO: 275194 - DNA, 476 bp, Unknown
  Bacterial polypeptide expressing nucleotide sequence isolated from the Sargasso Sea
gatgctaaaagcccagtcgatcacctgcgtccggggcgaccgcctcctgtttcaggatctcaatctggaagtacgtcccggtgaggcttgtcagattcaaggtggcaatggcgttgggaaaacaacgcttttacgtaccctctgcggcctgagccttcctgaaagcggtgaaattttctggaatgatgcgcccattcatgaggatccgggaaagttccactctgatcttgtctatatcgggcacagtaacgggataaaactggatctcacgccaaaggaaaatctcaccttcgctctcaccctgcaatccgttatcccggatgtctcgattgatgaggcgcttgactgggtaggtctgagtggatcgcagcatctgctgtgccgggtactctccgcaggacaacggcgcagagttgccatcgcccgcctgtacttaagccgcgctcccctgtgggtgctcgacgagcctttggggg

SEQ ID NO: 275195 - DNA, 583 bp, Unknown
  Bacterial polypeptide expressing nucleotide sequence isolated from the Sargasso Sea
ttgaagaatcttactgcccttcgaaacgacatagagctctttaggtccattaccattactttgaatagtggcgactgccttgagttatctggagccaatggctccggtaaaagtacgctgttgagaacgctggcaggtctgcatgaccaatatacaggcaaatatgtttgctccgattatttgtaccaagggcatcggctaggattggatgaaacgatgactcccgttgaaaatctcgactggtttcttggtgtggagggctctagcctcgaggaagcaaggctccaagaaattctggagcgtgtagagcttcatgatttagctcacaagccatgttttcgaatgtcgcaaggccagaagaggcgggtgtctgtggctcgctggatactgagcaagcgatccgtttggattttggatgagcctttttcccatctggattaccaaggattggaactggtgaatgcagtgattaaggaaaagtgtttgaacggaggtattgtgatatgtgcgacccacgtgcctcttcagcatgaagaaaagaccgaatggactctgacgcccttcaatggtttggctcaatgat

SEQ ID NO: 275196 - DNA, 730 bp, Unknown
  Bacterial polypeptide expressing nucleotide sequence isolated from the Sargasso Sea
gatgataaaaggtgatatagtagttgaaaatatgtctaaagagtataggctgggcaacattgggtacagaacattaagggaagatttacaaagttggtgggcaaaaataaataataagccagatccgaattcaattattggagacgaaaataataatccctccgataggatcttagcacttaataatataaatcttgaagtaaaaagtggagatcgccttggtataattggtaacaatggggcaggaaaaactacattattaaaaattctttctagaattgcatcaccaacaaatggaattataaagataagaggtaatgtcgctggacttatagctgtaggcactggatttcacccagaacttacaggtagagaaaatatatatttgaatggctgtattctgggattaactaaaaagcaaataacaagtaggcttgaagaaattattgatttttctggagttgaaaaatttattgatactccagttaaaaggtattcaactggaatgtgcataaggttaggattttcagttgccgctcatttaaaaccagatattctaattgttgatgaggttcttgctgtaggtgatgcagagtttaggaaaaaagcaatgggaaaaatgaaagatgctagtgaaaacaataatcgtaccgtgctgtttgttagtcataatttaactgcgatcaaatcactttgtgaaaaaataatagtattagataatggaaaataa

SEQ ID NO: 275197 - DNA, 602 bp, Unknown
  Bacterial polypeptide expressing nucleotide sequence isolated from the Sargasso Sea
ggttcatttgttgcgtttttgaagtcaccctattcaaattttagagaattaacaaaactgacttcttttaaaaatcatgaagaatcaaaagatattatctgggctctgagaaatgtttcatttgaagttgaaaaaggtgaggttttaggtatcatcggaggtaatggagcgggaaaaactactcttttaaagttattgagtcgtatcaccagaccaacttcaggccgtgctattgtcgctggtcgtgtggcgagtttacttgaggttggaacgggattccaccctgagttaacgggaagagagaatatttttgtaaacggtgctatacttggtatgacaaagagggagattgagaaaaaatttgatgaaatcattcatttctctggcgtagagaaatttattgatactccagtaaaacgttactcgtcaggaatgcgcgtacgtttagccttttcggttgcagctcatcttgaacctgaaatacttatgattgacgaagtattagctgtgggggatattgagtttcaaaaaaaatgtttagggaagatggatagcgtagctaaagaagggagaacagtcctttttgtgagccataatatggg

SEQ ID NO: 275198 - DNA, 418 bp, Unknown
  Bacterial polypeptide expressing nucleotide sequence isolated from the Sargasso Sea
atgcttcttttaaataatctagaattcaaacgattagataaaataatttttaatgaaattaatatttcagcaagtgctggtaaaattatattaattaatggaaataatggtgcaggaaaaacaactttattaaaaactattgtaaatattttagagccaacaaatggagaaattttttggatgggcaaaaaaattaaaaaaaatttgtttaatttttattctaatactacatttattatggataaacctacttcatcaaaaagtttaacagttttagaaaatatctatttttggaaaaatttgtctatatccaaaattacctttgatgaaataaacaagttgttagaaattcttgaattaacaaattacaaaaacaaactagtaggttttctctctttaggagaaataaaaaaattag

SEQ ID NO: 275199 - DNA, 613 bp, Unknown
  Bacterial polypeptide expressing nucleotide sequence isolated from the Sargasso Sea
gctggaaaactcctggatctggaaggatctcaacctcaaggtagaggcagggacgaggatcgttcttaaggggccgaccgggtccggaaaaacactgcttcttcgggtattggcaggattggaaaacccggaccatggaaaggtgctttttcaggaacgggatcaaaatcaatggaagatgccggaataccggactcaagtcgcgcttcttccccagcgtcctgcgtttcaggaaggaagtgtcgagaagaattggcggataccgttcgatttccgggagcgaagcaatcaacactatgaatcatcacggttcaagccgtggctcgagatgctcgaactcccaaccgattttgtccgtaaacagacttcggaactttcagggggagaaatacagttggccgcacttttgcggatgctccagtttgatcccaacttgcttctcctggatgaacctgcctcagccctggacgagtcaaaatcgaagaagatggaagaacttttaaacgactggcagatgcaggttcccggacgaagctggatctgggtgtctcatgattcccgtcaagcagagcggattggggatgaggttctggaattgggagcagtttcctga

SEQ ID NO: 275200 - DNA, 220 bp, Unknown
  Bacterial polypeptide expressing nucleotide sequence isolated from the Sargasso Sea
aatgtctggaatttttctcaaaaagattaataaatcatttggaaataccttagtattaaataatgtagatttagaaatctatgaaggtgaatttttaactttagtaggaccatctggttgtggaaaatctactctattaagaatacttgcaggattagaaagctctgatagtggaaaggtttttattggaggagctgatatgactaaggtaaaacccgct

SEQ ID NO: 275201 - DNA, 613 bp, Unknown
  Bacterial polypeptide expressing nucleotide sequence isolated from the Sargasso Sea
gctggaaaaccgttggatctggaaggatctcaacctcaaggtagaggcagagtcgaggatcgtgcttaaggggccgaccgggtccggaaaaacattgcttcttcgtgtattggcaggattggaaaacccggaccatggaaaggtgttttttctgaaacgagatcaaaatcaatggaagatgccggaataccggactcaagtcgcgtttctcccacagcgtcctgcgtttcaggaaggaagcgtcgatcagaattggcggatgccgttcgatttccgggaacgaagcaatcaacactatgattcatcacggttcaagccatggctcgagatgctcgaacttccaaccgattttgcccgtaaacagacttctgaactttcagggggagaaagacagttggccgcacttttaaggatgctccagtttgatccccatttgcttctcctggatgaacctgtctcagccttggacgagtcaaaatcaaagaagatggaagaacttttgaacgactggcagatgcaggttcccggacgaacctggatctgggtgtctcatgattcccgtcaagcagagcgggttggggatgaggtgctggaattgggagcagtttcctga

SEQ ID NO: 275202 - DNA, 646 bp, Unknown
  Bacterial polypeptide expressing nucleotide sequence isolated from the Sargasso Sea
aatgctttatcttaaagatctaacaatacaaagaggtaacaaaattgtattttctaattttaatgcagtcattaaatctggatatacaacacttataaaaggtaaaaatgggtctggtaaatctacattattacgagctattgcaggatttactccattagaaagaggaacaataatacaagataaaaaagatatttttgaaaataatgaagaatgggttaaaaatttaatttttttagataccaagaacggcctatcaaaggatttaacagttgctgaaaaccttaatgcttggttaacaatgaaaggatggtcatctaataaagaaattataaaaatggcactaaaaagtgtaggtatggaaaaatatgctgaattatacatttcgcagtgttctgaaggcttaaaaaaaagagctgctttatctagattatatatttcatttattaataaagttaatttttggatattggacgaaccaactaatgaattagatacaacaagcttggttttatttaagaaattagtctttaattttttagaacaaaagggaacaattattatagctagtcatgatcaaaatataattgaaaaaaatttttatactctagatttagatgaattaaaaaaacagagggtttcatga

SEQ ID NO: 275203 - DNA, 1011 bp, Unknown
  Bacterial polypeptide expressing nucleotide sequence isolated from the Sargasso Sea
gttcgctcgggaaggcagagttcaaagctaacacctccgaaaattccgggaaaatagtagctgaattaactaatgtgagccactcatttggaaataagacaatcattgataatttttccacaacgatactccgaggagaccgaattggtattgttggaggaaatggtgctggtaaaactactttactcaaaattttgttaaataaactaagcccagatgagggaaaggttaagctaggcacaaagatggaaattgcctatttcgatcagctacgtgaaaacttggacatggagaaaaatttagtagataacgtgagtgatgggggagacttcattgaaataaatggaaaatcaaaacatgttattagttatcttagtgaatttctattcacacccgatcgaattcgaacgccagcaaaagctttatctggtggtgagcaaaatcgagctatactcgcccaagtattcagtaagcccgccaatgttttagttctagatgagccaactaatgatctcgacattgaaactctcgagttacttgaagatattctaatcaagtttgagggcacgatccttttggtaagccatgatcgaaagtttatggataatgtggttacttctctaatggtttttgaagctaatggaaaaattaatgaatatgttggcggctacagtgattggtcgatcaaaggtgggaagcttcaaaagttaggggattcgaacgtaaaaacagataaggcgagaggtaaaaacctaactcaagaaaatcagagaaagcatgagactaccaaaagaaaatcaagagagcatgataaagaaataaggcgaatattattacttatcgagaaacttgaacttgaacagtcccaactagaaaaaatattgtcaggaccaaacttttatgaagactcgaaggaaaatatagagagaacgttacaaaaatttgctgaaaataagaaggggttagagattacctatgagcgctgggaacaactagactatgaagactaag

SEQ ID NO: 275204 - DNA, 1454 bp, Unknown
  Bacterial polypeptide expressing nucleotide sequence isolated from the Sargasso Sea
catgcgcacgctcttgacggttcgcgccaacaaggtgaacacgttttacctcaccaaggcgatctcgagcgcgagctggaagttttgggtgcgctggtttttcaacttttgcggctggatggcgagcggcgtcgtcgtgaacagcggtttgagatacacggagagtttgatcaccatcgaactcagggcggcgctgacgaagagagcgcacaagatgtacatggagaacaacaacttttataagacggcggtgttgcgtcaagggggattggacaatgtcgatcaacgcatcgtggccgatatcgacgcgttcgccaaggagacggcgttcctctacggacactccttcaaaccaatcttggagtttacgctgagcttggcggaggcggcgaaggaactggggtactcccgaccgctcgcgctgtttgcgtcgcaattcatcatcacgggtgtgttgcgctcgatcgcgcctcgtctcggccccatggtggcgcgagaagccgctctcgagggcggtttccgtcacacgcactcgagattgatcgcgcacgcggaggagatcgcgctcttggatggcggaaagcgcgaagttgagattctagatgagggtttggataacttggtcgtcactcaaagatggcacgcattgcaacgcattcgcaagagcgtcgcggataacatttccaaattccaaggcttgctcgtgggtagtattttcgttcacgttccattcatgatgaaggcgaccgcgtcggagggtgagcgcatttcctcgttccgggcgacagaagagctcatgcttcgttgtggcggtgcgttcaccgaggtgttactcctcggaaagaacctcgacgagttggccggttacacgcatcgtttgtcgcaattgttcaaaactttagatgaatcgagcaagcaagcgaacgcggagagagcggcgcgcgcgtccgtgtcggaagacgcggcggagacgcccatcgtgttcgacgacgtgaccgtcggtgcgcctgaacctgacggatctcagcgcgtgctcgtcaaaaatttgacgctctccatctcccccggaaaaaacttactcatcaccggtcccaacgggtgcgggaagacgtccttgcttcgcgtcttggccggtctttgggagcccatgacgggtagcgtcacgcgaccgaccggtgcctcgtcgatcatgtggttgccccagcgtccgtacctcttgcaaggttcgcttcgcgaccaagtcgtctatccgcaagatcctcgcacggccaaggtggacgacgctcgcgtgaaagagtgtctaatcatggctgggctttcgaagttcgtcgacgggtcgatgaacgtcggtctgaatacgcgacacctggaatggaatgacgtgttgtctggaggtgagcgacagcgcatcggattcgcccgattgtactatcacgcgccaaagtttgccatcc

SEQ ID NO: 275205 - DNA, 781 bp, Unknown
  Bacterial polypeptide expressing nucleotide sequence isolated from the Sargasso Sea
tttgtcatttaaccatgtcaagtccaagtctcggacaaacatctcaaacagcctattccggaagcgagtggtcagctattggaaacagggtaatgccaatgagcccgtcagagttcagacgatgatgaaatcttcgttcattctggaaacgcaagaactgggacgccggctggaaaaccgttggatctggaaggatctcaacctcaaggtagaggcagggtcgaggaccgtgcttaaggggcccaccgggtccggaaaaacactgcttcttcgggtattggcaggattggaaaacccggaccatggaaaggtgttttttctggaacgagatcaaaatcaatggaagatgccggaataccggactcaagtcgcgcttcttccccagcgtcctgcgtttcaggaaggaagcgtcgagcagaattggcggatgccgtttgatttccgggaacgaagctatcaaaactttgattcctcacggttcaagccatggctcgagatgctcgaacttccaaccgattttgcccgtaaacagactgcggaactctcagggggagaaagacagttggccgcacttttaaggatgctccagtttgatccccatttgcttctcctggatgaacctgcctcagccctggacgagtcaaaatcgaagaagatggaagaacttttgaacgactggcagaagcaggtttccggacgaacctggatctgggtgtcacatgattcccgtcaagcagagcgggttggggatgaggtgctggaattaggagcagtttcctga

SEQ ID NO: 275206 - DNA, 571 bp, Unknown
  Bacterial polypeptide expressing nucleotide sequence isolated from the Sargasso Sea
ctatttcagggatctcaatctggaagtacgccccggtgaggcttgtcagattcaaggcggcaatggcgttgggaaaacaacgcttttacgtaccctctgcggcctgagccttcctgaaagcggtgaaatcttctggaatgatgcgcccattcatcaggatccgggaaagttccagtctgatcttgtctatatcgggcacagtaacgggataaaactggatctgacgccaacggaaaatcttaccttcgctctcaccctacaatccgtcataccggatgtctcgattgatgaggcgcttgaccgggtccgtctgagtgaatcgcagcatctgctgtgccgggtactctccgcaggacagcggcgcagggttgccatcgcccgcctgtacttaagccgcgttcccctgtgggtgctcgacgagcctttgggggcgatcgatgccgcaggtgtacaggagattgaaaaggcaatcgggacgcatcttgaccagggcgggatggcgattttgacaacgcaccagccgctgcaccttcagcatgcccccatccgcgctgtgcagctggataactag

SEQ ID NO: 275207 - DNA, 334 bp, Unknown
  Bacterial polypeptide expressing nucleotide sequence isolated from the Sargasso Sea
atggaaattagcccagataaaccaacagaaattgaaatttgctcagcctctgttttttacggaaaagagagaattttagaaaacctaagtctatccatcaaagagcaaagggttggatttatcgggcggaacggttcgggtaaaaccacccttttgcgcattttggccggcttacaagaattgaataatggaaaggttttaatagatggaaccgaagtagcaaaaaaaaggaaggaggccattaagaaggtaggtataatttttcaaaatcccgatcatcaaatcattttcccaactgttggcgaagagctacggtttggcctctctcaattag

SEQ ID NO: 275208 - DNA, 595 bp, Unknown
  Bacterial polypeptide expressing nucleotide sequence isolated from the Sargasso Sea
atgaataatcatattttgaatctaaaaggtatttctgtcgagaagaatgacgtatgcatactagaagatataaatcttgaaatcaaacaaggtgattttttgaatatttatgggagtaatggagctggtaaaacaacattattaaaactattatcgggtcttacggagccaacggctggtgagataaaatttaataatgatgattttatggacaaggtttttatacttgggcataaaaatggtataaagcttaacttaacagttttagaaaatcttcaatttataagtaatgatcaagatataaaaaaaattaaatctgtaatcgaaaaatacgagcttacttcgaaaatgaatacactcactaaatacctttcacatggccaacagaaaagagttgcgttaatgaaagctatgataaatgactatgttgtctggctattagatgaaccgtatagtggtttagatcaagttggtgaggagatccttgataaaatccttgttgaacatattaaaaaatgtggcgtggttgtcattacaaatcataaagaaattaaaaaagaaaaaattaatataaaaaattacaaaatagaatgaa

SEQ ID NO: 275209 - DNA, 619 bp, Unknown
  Bacterial polypeptide expressing nucleotide sequence isolated from the Sargasso Sea
atgattaataaacatataatctatgctaaagacttgtccttagaaaggagcggtcgcaatatattttgttctttaaatttttcattagattcaagtgaaagcataattattaagggcaaaaatggttctggaaaaacttctttattaagatgtattgcaggcttttatccaattactagtggaaaattattatggtatggagagtctattcttcctgcatattattccgaaaaacctttggtatcttggttaggccattttgatgctatcaaaggatcattgaccgttagagaaaatttagtattttttaaagaaatttggtctgtaaataaaaatgtatttatgaaagctatacaaacattttcctttgaaaattttttagattgtcccgcgtcttggttgtctgctggtgaaaaaagaagattaagtctattaaggttgtcattttgtccagctaaagtatggattttagatgagccttccacatatctagataaagataataaagaaatattaatttcaattataaatgagcatgttaattctggaggggcgattatttgtgcgacacatgaaaattttaatttaccaaatgctaaagaatattctttaagttgat

SEQ ID NO: 275210 - DNA, 1249 bp, Unknown
  Bacterial polypeptide expressing nucleotide sequence isolated from the Sargasso Sea
atgctgacccgttttgaaatagataacttcaaatcgctggtgggttttagcctgccactctcacgctttaactgcgtgattggcctgaatggtgcgggtaagaccaccctgctgcaagcgctcgatttcgcctctcatgtgatgagtggtgaagtgaaggattggttgaacgctcgtggctggtcggcagcagacctggccagccgcttaggtaataaatccaatattgagctggcgttagagttagacatcgatgggctgttactgcgttgggaagcaacgtttaatcgcgttcggcttgcatgcacacgggaggaggtgaaagtaaaaagctcaatattggagggtgctaggcaatacgaaatcattgttcgtgtagatggtgctatctatgagcttaaatcgggaaaatattggcaccgctcggaaagcgccgatccatcacaatggaacgagatccccttcatctatgaaggctcactgctgtcacagctcaaagataaccagctttcgccattgctgcgcgaactgcgcgaacggatcaaggcgatccgctctctcgatctgctctcaccagaacagttacggcgtaaaacccggctctcggatctgacggatgacatcggaagtggtggccagcaattgggcgcttttattcaccaattgaacctcactgagcgcgagcaattgctacaaaatttgcaacgctactacccgcaagtcaccaagatacacacgagtgtattgcgcagcggtgccatcaaactggaattacatgaacgttatcaaactactacggacatgaatgggcaggctagtctatttgagagcgacatggtcaccgaggcccgccatatcaacgatggcatgctgcgtctgttggccattctggcccagcaattcagcccttatgagtttgtgctgtttgacgagatagagaacggagtcaatccagagatcactgaagcgttggtggatgcgctggttggttccgccaagcaactgttggtgaccacccatagccctctggtactgaactatctggaagatgacgttgcccgccagagcgtgctgttgatctacaagcggcctgatggcgtcagccgggctgtccgcttgttcgacgtgccgatggcagcagagcggctcgaatgtctctcaccgggagagtcgatgcttgatctgtcgcttacccgagttgcagaggctgcagagcagatggacgcaccctcccatggggaggggtaac

SEQ ID NO: 275211 - DNA, 616 bp, Unknown
  Bacterial polypeptide expressing nucleotide sequence isolated from the Sargasso Sea
tttggccgccgaagcattaagctgtgtccgccaggacagagtgttgtttgaaaacttaaattttcagttaagtgcagggcaagtgctttatattcaaggaaaaaacggtgccggtaaaagttcgctgttgcgactgctggcgggtttaactttgcctgaagacggtcagattttattccgcggtaaacctctgtccggacaatccgaagagtttgccgagcagttgctgtttattggccaccacagcggtattcatccgcagctcacagccttacaaaacttagccttctggtcggcgttatctgaacaagctgtggcagatccttaccagttattgggctctctgggcttggccggtcttgaagatattccttgttttatgctctctgccggtcagcagcgtcgcgtctctttagctcgtttgtggtttagcacgaaacctttgtggatattggatgagccttttacttctttggatcagcagttgatcgctacactggaacagcattttttacagcatcttgccaaaggtggtcttattgtattgaccagccaccagagcttgtcagctgattatccggcacttcaggcgatagaactggagtacagatggtga

SEQ ID NO: 275212 - DNA, 496 bp, Unknown
  Bacterial polypeptide expressing nucleotide sequence isolated from the Sargasso Sea
gttattgcgtatcatcgctggcttttctgcgcctgatgaaggcgaggttttgtatcaagaacgctcaataaataaatactatgaagagttcgcccacgacttactttttataggccacaaaacgggtgttaacattcagttgagcgctgttgaaaatgtacgcttttggttacggatcaacggttattcaaatgagcctgacctttacccaattttagcaaaactaggcttggtcggtcttgaagatgtgcctgttagaatgctgtcggcaggccagcaacgacgagttgcattagttagactttggctaagcgacgcaaatttatgggtgttagacgagccatttactgcgctcgataaaagcggtgttgcgtttttgcagcagcgatttactcaacatctaaataataatggcgccatattattaactacccaccaagacctaactactcactttagtgatttacaaacaatcacattggagtaccgccactga

SEQ ID NO: 275213 - DNA, 130 bp, Unknown
  Bacterial polypeptide expressing nucleotide sequence isolated from the Sargasso Sea
tatgctttctctccagaacgtaacaaagctctacggcactgtcattggtgtcaatgatgtctcggcggaacttgggcagggggctcatggacttcttggtccaaatggtgcaggaaaaacaacgttgctc

SEQ ID NO: 275214 - DNA, 709 bp, Unknown
  Bacterial polypeptide expressing nucleotide sequence isolated from the Sargasso Sea
atgagccaggcggtattgacggcccagggcatttgcctggggtatggcagcgggccggtgttgcaaggcttcgacttgcacttgcaaccgggtgaagtggtgtcgatcctgggcccgagcggcgtgggcaaatccagcctgctgcgcgtgctggccggcttgcaggcacctcaggctggccgcgtgcaggtattgggcgagccgttgagcggcccgcatccgcgcgtggtggtggcttttcaagacccgagcctgttgccttggctgaccctggaaaaaaacgttgccttcggcctggatttcgctcgccaaccgcacttgagtggtgaagaacgccgccgtcgtgttgatcacgccattgcagcggtggggctggagcctgcgcgccagcagttcccggcgcaattgtccggtggcatggcacagcgcacggcactggcccgctgcctggcgcgtcagccacaagtgttactgctcgacgaacccttcggcgcgctcgatgaagtgactcgcgccgatatgcagcacctgttgctcaaggtcaatcgtgagcaaggctcggcggccgtattgatcacccacgacatcgacgaagcgctgttgctgtcggaccgcatcctgctactgggtaaccgcccggcgcggacgttgggcgagtgggctatcgatttgccacaccctcgggaagaacaggtcgaggccatcggcg

SEQ ID NO: 275215 - DNA, 604 bp, Unknown
  Bacterial polypeptide expressing nucleotide sequence isolated from the Sargasso Sea
gaacttggtcatgaaatcaatagtgaatatcttatccaatcacaaaacatatcttataggatagcagacaagaaacttctgtcagggatatctctaaaaatttcaaaagcagaaatcgtgacagtaattggtcccaatggcgctggaaaaacaacattactacgattacttttaggcttaattccatgcagttcaggctacatatatcgtaaacctaaacttagaattggataccttccacaaagagcagtttataatccagttctaccactttcagtcagcagattaatgaatctgactggaaattattccaataaacagattgaaacttcacttgaggaaacaggagttcaatcattgaaagacaaacctgtttctcaactctcaggtggggaataccaacgtgtaatgcttgctagagcgttattgcgaaatcctgaattgcttgtacttgatgagcctgtacaagcagttgattatatgggagaatctgaattatataatttaatagggaacctgcaaataaaactaggttgtggggtgctaatggtttcacataatatacatgtagtaatggcttcaactgacagagttttatgcctaa

SEQ ID NO: 275216 - DNA, 430 bp, Unknown
  Bacterial polypeptide expressing nucleotide sequence isolated from the Sargasso Sea
gatgaccaatgctcctgagtttcttttagataccagagttgtcctcgaccgaggcaaccttcgcttagacgccgaactacaggttcatcatggcgaggtagtcgcgatcatgggaccaaacggcgccgggaagacgacccttctaaatgcattgctcggatggctaccccttcgatctgggtggatattggttgacggcaaagcctttgaaacaccgggtgacgactcggtgacgccaatccaccgccgcgacatcggcatgatctttcaggatggccttcttttcccccacttaaaggtggctggcaatattcggtttggcgctgctcccgataaagatttgacggggctaatagaaacactggagctttcaaacttacttgagagatatccctccgaactatccgccgggcagactcaaagagttgct

SEQ ID NO: 275217 - DNA, 775 bp, Unknown
  Bacterial polypeptide expressing nucleotide sequence isolated from the Sargasso Sea
cctgcctgttgctgctcgacgagccagcagctggcctgcgtcacaaggagaaggaagccctcggccagttgctcagccgcctgcgcagcgaaggcatggcgattctgctggtggagcacgacatggacttcgtcatgggcctggtcgatcgcgtggtggtgatggagttcggccagcgcatcgccttcggcctgccggccgatgtgcagaaggatccggcagtgctggaagcctatctcggaggagcggagtgatgaacatgcccatgcacaacctgcagcacacgcaaaaccaggtagccaacccggtgctggacgtcagcgacctgtgcgtcgcctacggcaaggtcgaggcgctgtccaacgctagcctgcgcgtcggccagggccagatcgttaccgtgatcggccccaacggcgccggtaagaccaccctgctctcggccatcatgggcgtgctcggctcgcgtggccgggtcgcctttgatggcagcctggaagctgtgccggaagtcgaggtgatggtcggccgtggcctcggcctggtgccggagaagcgcgagctgttcagcagcatgtcggtagccgacaacctgctgctcggcgccttccagcgccaccgcagcggccagcgcgaccacggtcagacgctcaaggaggtctacgaactgttcccgcgcctgtgggaacgccgcgagcaactggccgccaccctctccggtggcgaacggcagatgctcgccgtcggccgcgcgctgaggccaagcccaagctgc

SEQ ID NO: 275218 - DNA, 841 bp, Unknown
  Bacterial polypeptide expressing nucleotide sequence isolated from the Sargasso Sea
aaactagaggacaacgttgcggcaatttttggtaggaacccgacgcaagcttatggcactaaaacggcacttgataatattaatctgactattaaagaaggcgaacgggtcggagtgataggtcctaacggggcgggtaaaacgactttactgagtttgataattgaacagctagaaccgtcttcgggtaaggttgaaattagcggttccgttcaagctatgatgcaaactgggttcgggtttagtgacgaattaagtggatttgacaatattgtaaactcgctactatttaacggtcttagcacttctcagcgagaggcggcgcttcttgacgtgatagattttgtggaactcggagaattcttgtatcacccagttaaaacttattcattaggaatgcgcgcccgattggaatttgccgccgcgaccgctatttaccccaatatattggctatcgatgaagttatgggagccggagatgggtatttttcgtcgaaaagtgcggagagaatgagaaacctaattagctctacgacgttgttattggtttcacattccctccagcaagttattgattattgtgagcgggcgatatggcttgatgaaggacaaattaaggccgacggtcccgtcaaagaggtggtggcacggtatgagaagtatatgctcgaggcacacgcagcgttgcatcaaaaaatagaaaaggactcacttgcgattaacgaggatagttatttcgaccaagagccagccgcagggaaacgtatagatgttctcctcaccactttcacctcaacgattaactacggcaatttgccaactattagtgattttagtttta

SEQ ID NO: 275219 - DNA, 877 bp, Unknown
  Bacterial polypeptide expressing nucleotide sequence isolated from the Sargasso Sea
aaatttaaaagcagtgcaggtgcttcatatgttagagcccttgataaaataaccttacagctcaccaaaggcgaccgagtcggccttgttggacataatggcgctggcaaaacgactctgcttcgtgtcttagcaggcgtttaccccccttcatatggcgagataagatgtaagggcagaatagcctctttattagatatttctttaggttttgatttggaagcttcaggatatgaaaacatttttctgcggggcctttatctcggcttgagcaaacagcaaatttctaaatgtatagataaaattagcaatttcactaatctaggtaactatttatctatgccactcaggacgtattcgagtggcatgttgatgcgattggcattcgcaataaccacggaagttgaaccagatataattttgatggatgaatggataagtgtaggcgatgccaaatttatggagcaggcaaaagagcgattagagagcttcattagcacctccagcatcatggtactcgcatcacattctgagaatttaattcgatctacttgcaataaagctatcctgctaggacaaggcgaagtactcgcaaaaggaagtgttgacgaggtctttcatcactataatttttttggatcaagtgcattttttgacatagatgaatacatatctatccatccagatctcgaggcatccatgtcggttccaggaatggcaccgtggatgcattttattcgttacggcatctttgaggggaggtcacctggttgcggcattagtcttgaagcgttcaataacgatcctgtatttaccaatgcccttcaagcaaagaatggcctggcagcagccgagcgaatagagaatatagccccat

SEQ ID NO: 275220 - DNA, 631 bp, Unknown
  Bacterial polypeptide expressing nucleotide sequence isolated from the Sargasso Sea
actcctcggcgtgaacggcgccggcaagaccaccctgctcagattgatgtccggcgatcttgtaccggacaccggaaccatcaagcgggccgcggatctgcgggtggtcaccttcagtcagcatcgcggcacactcgtccccacccagacccttcaggaagcattgtgtccggtgggcgacatggtcgaataccgtggaaagtcggtgcacgtcaccggatgggcgaagcgtttcctgttcactccggatcaactcgcgaccttcgtcggcaatctttccggtggcgaacaggcccgagtgctcattgcgaacctcatgctcgaacccgccgacatcctcctgctcgatgaaccaaccaatgatctggacatcgcatctctggaagtccttgaagatgccctgctggagtttcccggcgcactggtgatggtcacccacgaccggttcatgctggagcgggtcgccaccgagtacatcggtcttgatgatgcggggagtgcgaagtcgttccagacctacgagcaatggatcaaggcccgccggaacaccacccccgcctccgcccgcaaggaaccggccgccccgaagcaggcaaggaagccgaagaccagcgcctctcgccgcaagctc

SEQ ID NO: 275221 - DNA, 508 bp, Unknown
  Bacterial polypeptide expressing nucleotide sequence isolated from the Sargasso Sea
aatgggtcaattattactccgagttaaaaatgtcagtaagatgtttggtaacttaaatgcattagatgatttgagtgttgatatcgaaaaaggctcgataattggcttagttgggagtaacggggctggaaaaactaccttacttaggctactttgtgggctttacagaccgagtaagggggatgttgtttttttaaaagatggagaagaaaagaatattgataaatttcgagaagctgttggaattttacctgaatctacaggactatatcatagattgactgcatgggaaaatatacgttattattcaagattaaatggggttagtgattctatttcttgggaacgaacacttaggttttccaaggcactttcattttcaaatgatctgatgagacatacaagaggatttagtagggggatgaggcagaaaacggcaatcttaagggcgttagcccatggcccggaaatctacttcttgacgagcctacagcaggtcttgacgtaa

SEQ ID NO: 275222 - DNA, 508 bp, Unknown
  Bacterial polypeptide expressing nucleotide sequence isolated from the Sargasso Sea
tatgtctgactcagttcttattgaagtcattgatgcttcattaacatatcctaaaccatacggttttaatctaaaaaaattaaaaacaaaacatacagacagaactgttataaataccctcaaaaactttagcttgaacattcatagtggtatgagaattggtgtaataggtgcgaacggagcagggaagaccactcttttgagagttcttgcgggaatctatccaatctcaaatggagagataagacataacacagatagcataagcacgatcattgatggtaatcttggttttgacccatttttgagtggacgtgataatataattcttaagtgtaatttgaatggcatacacgataacgcattaattaacaaagtatgtgaagatgtgcatgattttatagagcttggtgacatgtttgagtatcctatttatacctattctacaggcatgttctttagacttgcatttgcatttgcaacgagtcatcaaagcgatttagtgata

SEQ ID NO: 275223 - DNA, 532 bp, Unknown
  Bacterial polypeptide expressing nucleotide sequence isolated from the Sargasso Sea
aatgaatcttcttgagataaataattttagagtttcgtatggtgggataaaggctgttaagggcgttaatttgcggatatctgatggtgaagtagtagcactaattggctcaaacggtgcgggtaaaactactttgttaaaagcgatctgcggcttgttaccatttgatggggatttattgtatggtggtgagcgcgtggtcaataggcgatgtgacgaactcgttaagcgaggattatttatggtgcctgaggggcgtggcatttttggtcgattaacagtgcgagaaaatctactgatgggcgcttttcttcgaaaagacaaaacaaaaataatagaagatctatacaaggtttttaaaatgtttccaagattagaggaacggaagggacagctagcggggaccttgtccggcggggagcaacagatgcttgctattggaagagcgttagtgggggagcctagattactacttttagacgagccatccatgggattggcacccatgatggtagaaatatttttgaggtaa

SEQ ID NO: 275224 - DNA, 793 bp, Unknown
  Bacterial polypeptide expressing nucleotide sequence isolated from the Sargasso Sea
atgtttacaactgatgataatactgttgatgaacttggtcatggaatcaatagtgggaatcttatccaatcacaaaacatatcttttaggatagcagacaaagaacttctgtcaggtatatctctaaatatttcaaaagcagaaatcgttacagtaattggtcccaatggcgcgggaaaaacaacattactacgtttacttttaggcttaattccatgtagttcaggctacatatatcgcaaacctaaacttagaattggataccttccacaaagagcagtttataatccagttctaccactttcagtcaacagattaatgaatctgactggaaattattccaagagccaaattgaaacttcacttgaggatacaggagttcagtcattgaaagacaaacctgtttctcagctctcaggaggagaataccaacgtgtaatgcttgctagagcgctattgcgaaatcctgaattgcttgtactggatgaacctgtacaagcagtcgattatatgggggaatctgaattgtataatttaatagggaacctgcaaataaaacttggttgtggggtactaatggtttcacataatatacatgtcgtaatggcatcaactgacagagtgttatgcctaaaccagcatatttgttgtgaaggacagccaaaagatgtaagtcagcatccagaatatttacgtctttttggcttagattcagggagtagcttggccatatacagtcataaacatgatcataaacaccatatttccggtcgattaagtcaaaaacaataat

SEQ ID NO: 275225 - DNA, 291 bp, Unknown
  Bacterial polypeptide expressing nucleotide sequence isolated from the Sargasso Sea
aatgacaagtgatgaacaaaatttcattgaaataaaaggcgtcagtaaaaattttggtgatgttgttgctgtagataatgttgatttaacaatcaaaaaaggtgagcttttttccatacttggtgcatcaggctctggtaaaacaacccttttgagaatattggctggtttagaaataccaagccaaggaagtatattaatcgatggcgtggacatgacatcggtggctccatatgacagacctgtaaacatcatgtttcaaaactatgctttattcccccacatgagtgt

SEQ ID NO: 275226 - DNA, 439 bp, Unknown
  Bacterial polypeptide expressing nucleotide sequence isolated from the Sargasso Sea
aatggaatctacaactctagaaaacagagaatctctaatactctcagttgagaaccttgaagtcgtttataacgaagtcatactcgttcttcgtggtatttctttaaacgtttcagaaggagaaattgttgctcttttgggtgcaaatggtgccggaaaaacaactttattgcgatcaataactggtttattagatattcatagaggtcgaataacaaaaggttctgttacatttctaggtcaaaaaacaaacagatatgatccatcaaaattagttcgtgcgggtttatcacaagtgatggaaggcagaagaatttttgcagagttaacagttgaagaaaatcttcgcgctggagcatatacagtaacttcacgtcagaaaatatcagaagcacatgatcgtgttgtaagtctttttcccagtattggcttctcgatc

SEQ ID NO: 275227 - DNA, 604 bp, Unknown
  Bacterial polypeptide expressing nucleotide sequence isolated from the Sargasso Sea
tattgggcgtaacggctctggtaaaactactcttttacgtattttggccgggttacaggaacttaaaaatggaaaggttttaatagatggaaccgaagtggcaaaagaaagaaaggccgccattaaaaaagtaggtataatttttcaaaaccccgatcaccagattattttcccaactgttggcgaggagcttcggtttggtcttactcaactaggtctaaacagtaatgacgctgatttaaaggttatcgcatgtttgaaacaatatgataaaattgactggtttgaacgatccatttctactttgtcgcaagggcaaaagcacttggtatgcttactttcggtattattgatgaaacctagggttttgcttttggatgagccatttactggaatagacatacctacaaagctaaaactagaacaatacttaagttctctaaagcaaactatcattcacgtctcccatgttcctgaaacattcgagaactatcaaagattaatctggatggataaaggtataattcaggctgacggcattccaaaaagtgtcataaaaaagtatagagacgctatggagaattacgttgaaaagagtatttga

SEQ ID NO: 275228 - DNA, 703 bp, Unknown
  Bacterial polypeptide expressing nucleotide sequence isolated from the Sargasso Sea
aaaatggcggccacgattcagtcgctctctggcggttggcgaatgaagctcgccatcgcgcgcgccatgctctggaacgccgacgttctcttgttggacgagcccacgaaccacttggacacgagcgccatcgcgtggctctccaactacctcaagtctctcaccaacaccaccatctgcctcgtgtcgcacgattacgacttcttggcggatgttctcacggatgtcattcacttgagcgaaaagacattgacgtattacccgatgggtttccgcgatttccaatccttgaagccggaaatcgtcgccgctttgccctccaacgacaacgccatctccaagcaagccaacatcgaggataacggccccgctgccgccccgaaggaggcggcgcagggtagtggattcgctatcgatcaaatcggcgaaaaccagccgtcgcacatcaagccgattcgcttcccggaaccgggtgacttggagggcgtcaagtcgcgcgccaaggttgtcatgtacatgaaggacgtgtcgttcggatacccgggcacgtccaagaagattctcaacggcgccacggtgaagattacgcaaaactcacgagcggcgctcgtcggattgaacggcgccggtaagacgacccttttgaaattgctcatcggcgaactcgaaaccgacgaaggcgtcggcgaggtgtggcgtcacc

SEQ ID NO: 275229 - DNA, 314 bp, Unknown
  Bacterial polypeptide expressing nucleotide sequence isolated from the Sargasso Sea
aatgacaagtgatgaacaaaatttcattgaaataaaaggcgtcagtaaacattttggtgatgttgttgctgtagataatgttgatttagcaatcaaaaagggtgagcttttttccatacttggtgcatcaggctcaggtaaaacaacccttttgaggatattggctggcttagaaataccaagccaaggaagcatattaatcgatggcgttgacatgacatcagtggctccatatgacagacctgtaaacatcatgtttcaaaactatgctttatttccccacatgagtgtgtttgagaacattgcatacggct

SEQ ID NO: 275230 - DNA, 172 bp, Unknown
  Bacterial polypeptide expressing nucleotide sequence isolated from the Sargasso Sea
tggacctaatggtgcaggaaaaaccactttgttaagccatcttagcggtgaaatcaaacctgattcaggaactgttttgtttaatggggataaatatttcaagtatggatgtacatttgcgctcttctcttggacttgcacgttcatttcaaattacaaatatttttcttga

SEQ ID NO: 275231 - DNA, 778 bp, Unknown
  Bacterial polypeptide expressing nucleotide sequence isolated from the Sargasso Sea
tccgaactagatctcccaatgcaaaaaagaatgagtcaattatcgggtggctggcgacgcaggacagctctcgcaaaagctctggtacagaaacccgacctcctactccttgacgaacctaccaaccaccttgatattgctacaatcacatggcttgaaacggtgatccgctcctaccctggcgcagtattgtttgttactcatgaccgggcattcttacaacgtctcgcaacacgcatcgtggagatcgaccgcagccaactaaaaagctggccggggaacttccaaaagtatcttcgaagaaaagaagaagccttgcacgccgaagctcgtgccaatgagcaattcgataaaaagctagcacaagaagaaatttggattcgacaaggtatcaaagcacgccgtaccagaaatgaaggacgagttcgagccttaatgaaaatgagagagctgcagtctgcacgcgtagatcgggaacagagcgcgagaattcatatagaagaagcagaagcttcgggcagaaaggtgctccgtgcaaaaaacatcagttatagctacggtaaagagcaattaatagaaaatttttccatcaatattatgcgaggagatcgcatcggcatcctcgggaataacggggcagggaaaactactttgttacgattattactcggtgagttgaaaccggacagtggcacagtaaaacatggctccaatatcgaatttggttactttgaccagttacggggtacactggatgcaaataaatcggttgctgaaa

SEQ ID NO: 275232 - DNA, 721 bp, Unknown
  Bacterial polypeptide expressing nucleotide sequence isolated from the Sargasso Sea
ctcgcgcggcgaccgcatcggtctcgtcggtccgaacggcgcgggcaagaccacgcttttgaagatgctgaccggccagcttgcgcccgacagcggctgggtccgcctcggcgtcaatctcgaaatcgccgtcatcgaccagaaacgcgaggagctcgaccccgacgacacgctggcgcattacctcaccgacgggcgcggcgatacgctgctggtcaatggcgagcagcgccatgtcgcgggctacatgaaggacttcctgttccagcccgaacaggcgcgcacgccgatccgcaatctgtcgggtggcgagcgggcgcggctgatgctggcgcgcatcctggcgaaaccgtccaacctgctgatcctcgacgagccgaccaacgatctcgacatcgagacgctggatctgctgcaggagatcgtcgccggttttgccggcagcgtcattctcgtttcccatgaccgcgacttcctcgaccgcaccgtcacctcgacgatcgcgccggccaatccgctgtcgccggatggcgaatggctggaatatgccggcggctattccgacatgatggcgcagcgcaagggcgcggccgccgaagcgaaggcccaggaaaagaaggaaaagcaggccgcccgggaaaaggcagcgcccgagcccgccaaggcgaaaggaaaactttcctacaagcagaaattcgcgctggaaaacctgccgaaggaa

SEQ ID NO: 275233 - DNA, 446 bp, Unknown
  Bacterial polypeptide expressing nucleotide sequence isolated from the Sargasso Sea
catgagcggcgcacacctcaccgtgcagaacctgaccacgggctaccacggctttcaagtgctgcaagacctgtcgctgcaggccgcacccggcatcaccgtgatcgtcggccccaacggcgcgggcaagaccacgctgctcaaggccctggccgggctgctgccgcgcacgggcaccgtggcgctggacggcagcgacctgcccgccatgaacgccaccgcctgcgtgcagcgcggcctggccttggtggcagagggccgccagctcttcccgcaaatgacggtgaccgaaaacctggagttgggcggctggctggtgccatcacgcatccgcgccgaccggctggcccaggcgttcgaagacttcccgcgcctccaggaacgcgccacccagctcgccggcaccatgagcggcggcgagcagcagatggtggccgtggcccgcg

SEQ ID NO: 275234 - DNA, 383 bp, Unknown
  Bacterial polypeptide expressing nucleotide sequence isolated from the Sargasso Sea
gttgtgtcatcgctatacaaacaatggcgatttaacacataaaacgcttgatggcgtatcccttagcttagaagctggagagcttgtcagtttaattggcccgaatggggcgggtaaaacaactttacttaaatgtcttgcaggtttgttgacacctgatgcggggcaaattttatatgatgggcgtgaggatgttttgtccgatacctataagcgcgccaaaatgattgcctatctaccccaatttcaagctttgcattggcctgttttggcgcgagaacttgtcgccctcggacgcttaccgcatggagagagtttccaagcgcgtcaaaatgatgagataaaaatttatgaggccatgcaacgttgcggagcagatgcct

SEQ ID NO: 275235 - DNA, 241 bp, Unknown
  Bacterial polypeptide expressing nucleotide sequence isolated from the Sargasso Sea
atgttaacagatgttgaaaatactgttgatgaaattggttttgaaatcaacggagaaactcttatccaatcccaaaacatttctttacatataggcgagaaggaacttctatcatcaatttctatcaatatttcaaaatcagaaattgtaacagtaataggccctaatggcgcagggaaaacaaccttactccgtattattttaggcttaatgccgtgtagctcaggacgtatatatcgta

SEQ ID NO: 275236 - DNA, 405 bp, Unknown
  Bacterial polypeptide expressing nucleotide sequence isolated from the Sargasso Sea
catggcgagggagttgattcggctcgatgacgtccacagggccttcggaccgctgacggtcctggagggagtcaacctgcgcatagaggagggtgatcggattggcgtgatcggccacaacggcgcgggcaagaccactctcctacggaccatcagcaaccaggaccaggacctcggggagatctcgttctcgccggccctgaggctcgcattcctgacccaggtgagggacatcgacgacgatgcgaccctgggggaggagctgaatcggagggggaggcagttcctcgagctcgaggaggagatatccgagatcgaggagaggatggaggacccctcgttctacgagggggattggcagcccaccatggacaggtaccaggagctgcagagcctgatggcccg

SEQ ID NO: 275237 - DNA, 406 bp, Unknown
  Bacterial polypeptide expressing nucleotide sequence isolated from the Sargasso Sea
gatgggatataaagctaaagatcttactgtttatataaataatataaatataattgacaaaatttcctttgattttccttctggaagttatgtatcgataatcggtcctaacggtgcaggaaaaactacgttattaaaaactttagcaggtttgttaaattataaaggatcactctctataaataaccaaaatgttaaggagttattcaaaaattctaataattttaattgtgcttatgtcccacaaattattggtatacctgagggtatgtctctaatagagtatatttttttaggaagaaattcatttactaattggtttctatcagagaataaaaaagattatgatatagttgaagaggcactaaataaattaaatttagggtcaaaaaaaaatcaactagtt

SEQ ID NO: 275238 - DNA, 880 bp, Unknown
  Bacterial polypeptide expressing nucleotide sequence isolated from the Sargasso Sea
atgctggtaacgacaaatgcccttacgaaaagatatggttcatcaatggctcttgaggcatgttcgcttcatgtcagccagggtgagatctttggactccttgggcacaatggagctggaaaaacaacgcttctacgtctgcttctcgggtacatcaccccttccagcggcatggcctgtgttgatggcattaattgtgctactcagtcattggctgttcgatctcgtacggcgtatcttccaggagaagcccgactttttcgtcgcatgaaagggcatgcagttctcgattttttctcaggacttcggaaagagtgttgtcgtcttcgagcgaaacagatagcggatcgattagagcttgattgcaatcggcaagtggctcgaatgagtaccggcatgcgtcagaagttagcgttagcaatcgtattatccactgacgcgcctcttgtcattctggatgagccgacagccaatctagacccgacggcgagatctgaagttctcaaaatggtcatggagtcacgtgctgtgggacgtactgtgattttttcatctcatgtgctttcagaggtggagtcaacgtgtgaccgcgttgtgattcttcgatcagggaatgtggttcatgaacaatccatagaatcaatgaaacgaagtcaccttattacagccagattaacaggttccatgggcaaggtgccaccacatctggagaagtctgtttcaatttgctcggcaaatgcagttgatgatacgtctagagtcacaatcgaatcgagcgggtcattaaaagagatgctaggttggcttgcagagttaccactcgaagagattcatatcgagcctgttggattatcgtccgtgtatgatcagtatacgtagg

SEQ ID NO: 275239 - DNA, 1612 bp, Unknown
  Bacterial polypeptide expressing nucleotide sequence isolated from the Sargasso Sea
catgcggcgcgctgctcgcgctggccggcgcactgctgcaggtactgttgcgcaatccgctcgcggagccgtacgtgctcggcgtgtcgggtggcgcggccggcttcgcgctcgtcgcgatgatcgcgggcggcgcgtggtggctcgtcgatgcgtcggcgttcgccggctcgctcgtgtcggtcgcgctcgtgctcggtctcgcgcgccgcgagctggggcgcgccgaatcgcgcgatgcgtcgccgcggttgctgctcacgggcgtcgtgatcgcggccgggtggggcgcactcgtcacgctgctgctgtcgctcgcgcccgacgcacgcctgcgcgggatcatcttctggctgaccggcgacctcaacggcgtgaccgcgccgtggttcgcgtggggggcgctgctgctggccggctgcgtcgcgctgccggccgcgccgcaactgaacgtgctgctgcgcggcgacgcgaccgcgctcgcgctcggcgtgcccgttgcgcgcgtgcgcgtgcggatctatctcgtcgcgtcgctggccgctgcagccgcggtgacgacggccggcacgatcggcttcgtcggtctcgtcgtgccgcatgcgctgcggctcgccttcggcaacgaccagcgaatgctgttgcccgccgcgatgctcgcgggcggcggcggcgtgatggcggccgacctgctcgcacgcaccgtgatcgcgcccgcgcaattgccggtcggcgtgatgaccgcgttgatcggcgtgccggtgttcctgtggatgttgttgaggaggtcgatgcgatgacgagggccgcactgcacgccacggccggcgacatgagctgcgcggccgtcggcctgacgctgaaggccggcgcgcgtacgctgctcgacggcttcacccaggtgtttcgtcccgccgagatctggtgcgtcgtcgggccgaacggcgcgggcaagacgacgctgctcgcgacactcgcagggctgcagccgccggccggcggacacgtcgagatcgatggccggcggcttgccgcatggccacccgagcagctcgcgcagcgccgcgcgctgatgccgcagcaactgcacgacgcattcagcgcgaccgtgttcgacacggtgctgctcaaccgttttccgtatctcggtggttggggctgggagcgtgacggcgatcgcgcggccgcgcatgacgcgctggcaacgttcgacctcgctgcgctggcgtcgcgcgacgtgctgtcgctgtcgggcggcgagcggcaacgcgtcgcgctcgccgcgacgctgtgccaggatgcgccgctgatgctgctcgacgagccgctcgcgcatctcgacctgcatcatcagatcgattgcctgaccgcgctggccgcctggctcgacgcaggcccgcgcacggtgctgttctcgtgccatgatctgaatctcgcacggcgtttcgcgacgcacgcactgctgctcgacggtcgcggccatgcgtgggccggccccgtgcacgacgtgctgacgcccgagcgcgcgagcgacgcgttcggctatccgctcgtgctgatccgcgagaacggccgcgatgcgctgctgccggcgtggcccgagcgacaatga

SEQ ID NO: 275240 - DNA, 703 bp, Unknown
  Bacterial polypeptide expressing nucleotide sequence isolated from the Sargasso Sea
atgttagaacttcgcaacgtatcgacccactacggcaaaattcaggcgctgcacgacgtcagcgtccaggtaaaagagggggaaatcgtcaccctgatcggcgccaacggcgccggcaagaccaccttgctgatgaccctgtgcggcgaacccaagcccagcagcggctccatctggttcgagggagagcagatagactcgctctccaccgcccgcatcatgcgcaaggacatcgccgtggtgccggaggggcgccgcatcttcgctcgcctgacggtggaggagaatctgctgatgggggccttcttcgtcgacaaggccgagcagcgcggcctgctggatcagattttcaccctgttcccccgcctgcacgagcgcctggagcagcgcgccggcaccatgtccggcggcgagcagcagatgctggccatcggccgcgccctgatgagcaagccgcgcctgctgctgctggatgaaccctcgctggggctggcccccatcgtcatccagcagatcttcgacaccatagagcagctgcgccgcgacggcatgaccatcttcctggtggagcagaacgccaaccaggcgctcaagctggccgatcgcggctatgtgctggagaacggccacgtggtattgcaggacacgggggcggccctgttggccaacccggccgtccgccaggcctatctcggcggctgac

SEQ ID NO: 275241 - DNA, 1594 bp, Unknown
  Bacterial polypeptide expressing nucleotide sequence isolated from the Sargasso Sea
tttgattaccaccgcaaatatcacaatgcagtttggctctaagccattatttgaaaatatttccgcaaaattcggcaacggcaaccgatacggcctaattggtgcaaacggttgtggcaagtctacctttatgaaaattctaagcggtaaacttactccatcgtcgggcaacgtttctatggcgccaggcacaaagctaggtatcttgagtcaggaccagtttgcgtttgaagagtttagcgtagtcgataccgttatcatgggtgaccgtgaactatgggaagttaagcaagagcgcgacgccatttacagcaaggctgaaatgagcgaagaagatggcatgcgcgtggcggacttggaaacccaattcgccgagatggatggttacaccgccgaagcgcgcgctggcgatatcttaaactctgctggcatcgacgaaagctatcattttggtctaatgaaggaagtagcacctggtaaaaaagtacgtgtgcttttggcgcaggcgttatttgccgagccagacattctgcttctagacgaaccaaccaacaacttggatatctacaccatcagttggctagctgaagagctcaacaaacgtaagtcgaccatgcttattatttcgcacgacagacactttctaaactctgtatgcacgcacatggccgatatcgactacggtgagctgcgcgtttatccgggtaactacgacgactacattcaagctgccatgctcgttcaagaacagcttcatgcagagaatgctaagaagtcagcggaaattgaagagctacagagcttcgtagcgcgattctctgccaacgcatcgaaagcgaaacaagccacctcgcgtgcccgccgtcttgagaaaattgaattagctgaggtaaaagcgtctagccgtcgtaagccttatattgtgtttaaccaacataagaaacttcaccgacttgctattactcttgaagagctaggccatagctacccagatcttccgctattcgacaacgcgaacttgctattagaagcaggtcagcgcttggcgattattggtgagaacggggccggcaaaaccacgcttttgaagtgtttggttaatgacattgaacctaccgcaggtagctataagtgggctgaaaacgctgcgattggttacattccgcaggataacgccaaatactttgccgaagatatcactatgtttgagtggatgagccaatggcgcagcccaaaacacgatgacctgcaaataaaaggtatgctaggacgtttgctatttacgtctgacgacttcaacaagcgcgtgcaggtatgttctggcggtgagaaaaaccgtttgttgtttggaaagctaatgcttcaagacatcaacgttttggtaatggatgaacccactaaccacatggacatggagtcgattgaagccttgaacaatgcgctatacaagtttgatggcactgttatttttgttagtcacgaccgtgaattcgtttcgtcactggcgacgcaaatcatcgaaattaaagacaagaaactgaatcacttcgatggaaactacgaagagtttttggcgcataaagaaaacgcgtaa

SEQ ID NO: 275242 - DNA, 709 bp, Unknown
  Bacterial polypeptide expressing nucleotide sequence isolated from the Sargasso Sea
aatggttgctgatattgtattgcaaaaagcaggcaaatcatttggccccattgctgcattgcatccaaccgaattatctattcctaatggacagtatgttttattactcggctctaacggagctggaaaaactacactcctccgattaatagctggagttagtcaaccgtccactggacatgttttgatttgtggacaagacttgcatgatgacaaaacaggccgtgccaaaattgggctcctctcgcattatagtatgctatatgaggatctaaccgctgaagaaaatcttcttttttttgcccaattatatggtttagaagaaactcaactgaagattgagcaatccttagaattgatgggacttatccaatttagaaataaaaaagtgaatggattttctcgtggcatgagacagcgactagcaattgctcgtgcaaccattcacaatccttctataatccttcttgacgaaccttacactggcttagaccttacggcacgtaaaaccctgcaaaatttattgattcaattaaaggcacttggtcacacattccttatgacgacacaccgactagaagatgccgctcccttagctgatagaattattatcatagaatcgggcaatctcattttcgatcaggtttggcaagggtcagggcttcagcttatcaaactatttgaatcgagtacggaacgaaaactgtga
